United States Patent Application Publication US 2008/0050393 A1 - sequence listing, part 32

SEQ ID NO: 116976 - DNA, 753 bp, Homo sapiens
atggcttattgctgtttattggtgtttggggactgcagagaagactcattggccggagttgaatccacagcaaagggttggcatcatctggaggtgacttcactcacatgtctgcagaggacatggggcttggcttcaggacctataggagacctcccagttaccctgggattccaggtagcagagcactctcaggacattcagagctttgacttggtgatcaagggcaccatagaatctcgctgtctccttccaaccacctgtggtcggcatccccgcgttgtcactgcgacgcagaggcgagcgaggtcgcagcttcatggcctgatgccttcaggaagtattttgaagtcatcgtggctgtggattgggggatttcttgtttccactgaccttagcagtgggcatttccagacggtgcagcttgtggctaaagtgacaggaagatgtaggagctttcagtcttggatgaggattcgaactgaagggcttaggcccagctgtcttggagcaaaacatctgttgtggggtgagaagggaaaggagggatgtggcggcagaggagggcaaggccgaaggagcagacagcaccgcttcttggggagttgtgaaggcatcatgcggagggccgagcttagcagccaagtggaggacagcaccctccatgcctggattcgttactcgctcgttctcgatgttgagctgctggcatattgcagcacaactagagatgtacggatgcccccatcttga

SEQ ID NO: 116977 - DNA, 871 bp, Homo sapiens
gggtaccgcgtccggaattgccgggtcgacgatttcgtctccaggtgaaggatgcccggaggcctcggcaggaccgcgcggaaacgggccttctgcccaaaagatgctgcttctctccttattctttcccctcagaatctcgctgtctccttccaaccacctgtggtcggcatccccgcgttgtcactgcaccgcagaggcgaccgaggtggcggtaagcaaccgcggggcggggagggaccctgcgagcgcggactccacaccaagcctctgctcagcgtcaccccgcttgctgtgtcctcgcaggtcgcagcttcatggcctgatgccttcaggaagtattttgaagtcatcgtggctgtggattgggggatttcttgtttccactgacctgtgaggccgcgcacgtggagggaggcaccccgggtcctccggcactgtccggcctcgcctgtgtccctagtagcagtgggcatttccagacggtgcagcttgtggctaaagtgacagcaagatgtaggagctttcagtcttggatgaggattcgaactgaagggcttaggcccagctgtcttggagcaaaacatctgttgtggggtgagaagggaaaggagggatgtggcggcagaggagggcaaggccgaaggagcagacagcaccgcttcttggggagttgtgaaggcatcatgcggagggccgagcttagcagccaagtggaggacagcaccctccatgcctggattcgttactcgctcgttctcgatgttgagctgctggcatattgcagcacaactagagatgtacggatgcccccatcttgatcttacagaatcagaggtgcatccgcaagaaagagtcaagaacagacact

SEQ ID NO: 116978 - DNA, 723 bp, Homo sapiens; identical to SEQ ID NO: 114928

SEQ ID NO: 116979 - DNA, 639 bp, Homo sapiens
atgactaaggttatatggtgtcccctggggacccgtcaggaccaggtggaggcgttgggcactgtgactgtgactgtgactctccacttgctctcagaccggccatgtgggggcgctgctatagatcttgattgctgggcccaggatatcatttacaaggtaaaaactgttttcaataatgagtttgacgctgcatataaacaaaaagagtttgaaattgcacgcgtgaaggaaagaaatgttcgaattcgagaaattattttagatctggaattggaagaagcagtctggcaaccagaatttgaagactgtgagaagccagagagaacgcttgttgtgcaagatgaggaggcactacctaccttccccaatcccaaatgcagtcattctaatgttgggtgggaagctgcctctggagccacctggaatgtcaggtctctgtctcagtattcctctctgattctggctctttcccaggatgccagtacaagactccgagctctgatggacatgatgggaggagttctggaagtcaagaaggaagatattttgagaatggtgattcctcaacctgctttcatggcaaaacctgatgctgtgtggactgaagaagaaaagaaaacaattcaaagattatga

SEQ ID NO: 116980 - DNA, 1850 bp, Homo sapiens
atggtttataagtggacagaaaaacactcactcacgtattcagccacgtatggtctggagtgctctgtagaacagcccgaagtgtacaccatgtctctgcacttgaagctcatggaatgtgttggaggagactcaagctccatgtgggaacagtgtggcccaagagccagcatggaggagggctgtcatgtacctggacttcctttgggtgccggcttttctgctggactaagattcatggaaagaaccccagggcaaggtgaggagaagcagctggtacagactgatgacgaaggagaggaccagaaaagctgcttgggtgtggtggaagtttcagtgtaagccaggccctgcgtggctccctctactacctgctcagtgccctgccccagcccaaggccccaggatacatctgccatggcctcagtcctgggggcctctccaatgggagccgtgaggaatgctactggggccacgtcttctgggaccaggacctctggatgttcccgagtatcctgatgttccacccagaagccgccagggccatcctggagtaccgcatccgcacgctggacggggccctggagaacgcccagaacctgggctaccagggagccaagtttgcctgggagagtgcagactccggcctagaggtttgccctgaggacatttacggagtccaggaggtccacgtcaacggggccgtggtgttggccttcgagctgtactaccataccacccaggacctgcagctatttcgagaggctggtggctgggacgtggtcagggctgtggccgagttttggtgcagtcgtgttgagtggagccccagggaggaaaagtaccacctgaggggagtcatgtcccccgacgagtaccattcaggggtcaacaactctgtgtacaccaacgtcctggtccagaacagcctgcgctttgctgctgccctggcccaggacctgggtcttcccatccccagccagtggctggcggtggctgacaagatcaaggtaccctttgacgtggagcagaacttccacccggagttcgatgggtatgagcctgaccctcgagtctgtcctggaacaccttccagtcagcggcacctccctgtaggagaggtggtgaagcaggcagacgtcgtgctcctgggatacccagtccccttctccctgagtcctgatgttcgcaggaaaaatctggagatttacgaggctgtgacgtccccccagggccccgccatgacctggagcatgtttgctgtgggctggatggagctgaaggacgcagtgcgggcccggggcctcctggacaggagctttgccaacatggctgaacccttcaaggtgtggacggagaatgcagacgggtcaggcgctgtgaacttcctgacaggcatggggggcttcctgcaggcggtggtcttcgggtgcacggggttcagggtcacccgagcgggtgtgacctttgaccctgtgtgtctgtcggggatctccagagtgagcgtctccggcatcttctaccaggggaacaagctcaacttctctttttccgaggactccgtgaccgtggaggtcacagctcgagcagggccctgggctcctcacctggaggctgagctgtggccatcccagtcccggctctccctgttgccaggacacaaggtctcctttccccgctcggctggccggatacaaatgtcacccccgaagctgcctggaagttccagctccgagttccctgggaggactttttcagatgttagggacccgctccagagccccctctgggtcaccctgggttcctccagccccaccgagtcactcactgtggaccctgcctctgaataa

SEQ ID NO: 116981 - DNA, 1967 bp, Homo sapiens
tgcagtgtgctggaattcgaaactttaactgtctatagggttgcttgtcatagttgaacattatttaattaacttattgactatatatgggtatacttttctctatagccattcacttttttaaagttttaattatttaattgacaaattagctattcattttccttcaaatcctgtttttatcacaatgtccattttacagctagacacaaaatttagtgggtccaaattgttcaatcacttctatgttatttgttcagaatagtggatctttgcttaattcacttctgttttaatcccatcatattcctttaggccaagaaaaggaaagctgatttggattatatttatgcttaatatcaacatggtttataagtggacagaaaaacactcactcacgtattcagccacgtatggtctggagtgctgcatgtagaacagcccgaagtgtacaccatgtctctgcacttgaagctcatggaatgtgttggaggagactcaagctccatgtgggaacagtgtggcccaagagccagcatggaggagggctgtgtgagcagactgctatagaatgctaaagttataatcctagctggtgtctcgttctgtttaaaaaaatcaaatttctgtatgtaattgacgtattggtccttatagtcagtaccatcaggtcttagattgttaagtcattttgctgccaccagaccagtgagagtcactcacttatttgtaatgattcttggggaagtttagtcaagagaatatccttgaataaagaagtacatgttttaagtattttcatcgtagtctagatgggctgtaaaacccatttccacacgagtataaatttaaaacagaaacatcaaggtgtcagcaatcatgattttgttttgcttgttcacaagtttgaaaaggtgcatgaggcaccaatcagtgacactggaatgctttaaggatggtttgtgactttaccccattgtgccttatcatttgtcagcaaacttactgggccaaacacaaatggctgagacactcctggcccatttcttgtcatcgctgccatccccaaagacagactctgggaaacaacttgggaactgcttcaagtccatgccaggtcatggcttcgtccgcctcccagcatgtacctggacttcctttgggtgccggcttttctgctggactaagagattcatggaaagaaccccagggcaaggtgaggagaagcagctggtacagactgattgacgaaggagaggaccagaaaagctgcttgggtgtggtggaagtttcagtgtaatgtgattcctagtaggcacatctgtgactcccttaaataaaaagggccagagatgaggggacgcctggtgaaaatggtgtttgctgtaacatcttggtatcattgtgggtaagtagaacaaatatttacatctgttatgaaaagctacctttagccgtagataaacattaaaaggaagactcagccccagagtatatttgatctattggttaactcatctgtcagcaaatggttaagtaagtaaaattaatttttccatttggtgtgtatttcacagggtaacaatgaagtgctccaatctgcttgtgagaccagttagattagtagttgcagttgagaccattcctcctgtatgtctgtacaagcaaattgaaacgacatgctcttctttgtactatacagaaggacacacctcagatcctctttttaaagcaggtaataaagtagctttttccttttgaaacatcattgtaaaacagtgctttttaaactatccatggtaaaggatgagttttaaaaattctaatcctttgcaggttggtagttttataaatacgataaaaatatagcaccaagattagattgttataaaagtttctaaacactttcagtttctgtacttaatcttgcagtgtggtaataaagacttctacactttagtagcact

SEQ ID NO: 116982 - DNA, 518 bp, Homo sapiens
attccagtgtggcggaattcgctcacccctcctatggtttcagtcacagactacacttaggctacttctaaatatcttcccagctcacccttggctccttagctctaggcctttatatccaaccatgaactctttcagagtacttaaattcactaagaccaaaattgattccttatctcccccatgatcccttccttctccagccttccctgtgacagagagaagcatcttcatccactcaggccccaagctcaagcctttctctcctatgaccctgcctacaaccaacagtcctgttggctccccttcctcaaaagcttgaatttgctcacttccctccactttcatggccacctcccttgtcctagtcactgctacaattggcaggtcacaaatgcctcctattgggcttcccagtctctacttcctcaacccattttccgtgctgaagccaatctagtgaggtttctatgggtcctcgttggctcagcataaatccaagcttctagggtggcatg

SEQ ID NO: 116983 - DNA, 393 bp, Homo sapiens
atggcgcggctcgggagcgcgccgcggccaatcaggagcggcgggagcggcgccgggagccggcgggcgcagagcgagctcgagtctggagccggcgtcggcgctgcggccgggagggatcgtggcgagagcagtgcggccgggtgggtatcccgcggccagagaagccggctttgccgcggcgacctttcggcggacgccggggaccctgcggaccgcggcgcaggtcattttggagagccagcagtttttccccctcgtgcagctgtggcctcggtactgccttcacttgatctattctatggtgaactaccacagttccctccagctcaggtttccaggaaacctggcctgaaatttcaaaaggtgcagcaaacaaaactgtggatgtaa

SEQ ID NO: 116984 - DNA, 972 bp, Homo sapiens
atggccacacaaccaacacggcttgctggtgtcacagtgtccctgttacatggacctggcagtgcaccaggtgacatggaggccacacactacagggtagtgattaagaatggactcccaagcccctaccctttccccgacctctaccaggcagccctgctgacatctgattcctggggcaggattgagagatgtcccttgggagatcaagttggccagaggggaggtccgaagggagttggcggcctgcagagcaacaagggcctgcctggaattaatggggtcatcgccctgctccccatcgcccaaaggaggaggagccacagccagaagacacagatgtctgaagaaatgagattgcagctcttggcaactaccattttactttctgtctttatgaatttgactactccagaaaaggggaaagagggcctctcccagggggagatcagtgtacaactggaggagtgtcaagaagtgcggccaagcaagagaagatgcccagagcaactgcacagggcctccatcatcctgcagagcccaccgccatggctcatcagcccttcaatggcccccggtgatgacccagtagagcggctaagaaaacccatatgcttctgcaaagcaggttggccccagaccactaaatacacaccacctgaagatacagcaaaacccagaagtggtgaccacagcaacatgagtacacacactgcagactgtcagcagcaggagggtcatgtgattgcagagggcagcctgacaagcccatgtgattccctccacattaagtggaaaacactgtctccactgagaaagagagatgtttctagagtcaattccagctgccaccgggcctgttgtccatttcctggcacgtgctcagtcaatacaaataaagacgatgagccgacactgcgcgtggtcgtgaccatgttcccctggattgccctggacttggtcttcctttag

SEQ ID NO: 116985 - DNA, 2074 bp, Homo sapiens
ctccctccgcgccaccagaccccgtagccccgcgcgcccccagccctttaagccagatgatgaacttcctgcggcgccggctgtcggacagcagcttcatcgccaacctgcccaacggctacatgaccgacctgcagcggcccgagccccagcagccgccgccgccgccgccccccggtccgggcgccgcctcggcctcggcggcgcccccgaccgcctcgccgggcccggagcggaggccgccgcccgcctcggcgcccgccgcgcagcccgcgccgacgccgtcggtgggcagcagcttcttcagctcgctgtcccaagccgtgaagcagacggccgcctcggctggcctggtggacgcgcccgctcccgcgcccgcagccgccaggaaggccaaggtgctgctggtggtcgacgagccgcacgccgactgggccaagtgctttcggggcaaaaaagtccttggagattatgatatcaaggtggaacaggcagaattttcagagctcaacctggtggcccatgcagatggcacctatgctgtggatatgcaggttctccggaatggcacaaaggttgtccggtccttccggccagacttcgtgctcatccggcagcatgcatttggcatggcggagaatgaggacttccgccacctgatcattggtatgcagtatgcaggcctccccagcatcaactcactggaatccatatacaacttctgtgacaagccatgggtgtttgcccagctggtcgctatctataagacactgggaggagaaaagttccctctcattgaacagacatactaccccaaccacaaagagatgctgacactgcccacgttccctgtggtggtgaagattggccacgctcactcaggcatgggcaaggtcaaagtggaaaaccactacgacttccaggacattgccagcgtggtggctctcacccagacctatgccactgcagagcctttcattgactccaagtatgacatccgggtccagaagattggcaacaactacaaggcttatatgaggacatcgatctcagggaactggaagacgaacactggctctgcgatgctggagcagattgccatgtcagacaggtacaaactgtgggtggacacctgctctgagatgtttggcggcctggacatctgtgctgtcaaagctgtacatggcaaagatgggaaagactacatttttgaggtcatggactgtagcatgccactgattggggaacatcaggtggaggacaggcaactcatcaccgaactagtcatcagcaagatgaaccagctgctgtccaggactcctgccctgtctcctcagagacccctaacaacccagcagccacagagcggaacacttaaggatccggactcaagcaagaccccacctcagcggccaccccctcaaggttgtttacagtatattctcgactgtaatggcattgcagtagggccaaaacaagtccaagcttcttaaaatgattggtggttaatttttcaaagcagaaattttaagccaaaaacaaacgaaaggaaagcggggaggggaaaacagaccctcccactggtgccgttgctgcgttctttcaatgctgactggactgtgtttttcctatgacgtgtcagctcctctgtctggttgtttacctgttcctgttcgtgcttgtaatgctcacttatgttttctctgtataacttgtgattccagggctgtttgtcaacagtatacaaaagaattgtgcctctcccaagtccagtgtgactttatcttctgggtggtttgatagtgtttttaaaagtaatatataatgtggggtgaaatgggagtagggggtggacaggggagaaacgaaaaccacaaaaagaaacccaactcctctcctccccaagctcagttaaatcccccaccttcccaacctttccctccaccagtgtgcttgggatcttcaatgaactgtgctttcgcttcttctgcatgactattataactagatagaacattaagagatttcaagatcaactccatagcttctaccactgaattgaggcatcaccttt

SEQ ID NO: 116986 - DNA, 483 bp, Homo sapiens
cccacctcagcggccaccccctcaaggttgtttacagtatattctcgactgtaatggcattgcagtagggccaaaacaagtccaagcttcttaaaatgattggtggttaatttttcaaagcagaaattttaagccaaaaacaaacgaaaggaaagcggggaggggaaaacagaccctcccactggtgccgttgctgcgttctttcaatgctgactggactgtgtttttcctatgcagtgtcagctcctctgtctggttgtttacctgttcctgttcgtgcttgtaatgctcacttatgttttctctgtataacttgtgattccagggctgtttgtcaacagtatacaaaaggaatttgtggcctctcccaagtccagtgtgactttatcttctgggtggtttgatagtgtttttaaaagtaatatataatgtggggtgaaatgggagtaggggggtggacaggggagaaacgaaaaccacaaa

SEQ ID NO: 116987 - DNA, 1647 bp, Homo sapiens
  misc_feature (1)...(1647): n = a,t,c or g
cactgtggtggaattccaggccaacagctcacaagtgttgagtcactcaatgtctttccttcctcagctttccatcctgctgggacttcaggagctcctttctccagcttgtctgccgaaagccacaggatggcattttaaagttacctttgacaaaaacccacaaaccctcatccatgggcttggtttctgtcacaggccagtgatttcctttccaatcatctcaagagctaatatttaccatttctgcaaggaccttgctggaactaagcaatatacagaaggcatggtataacccagaccagaattccctgcacatgaaactgctatgcatcaggtgacaggaaaccacacaacaatatcttctccactgatgcacgaaattctaacattagacctcccttcctttggattgatatttattttttaaatagtagtaggatgctcacttacattgcctaacactttacagtttacaaagcacactctttagtttaagcctaacaatccttatttaagatgtcttgggctggcaaatgtatctttgtttcacatatcagcaaagagaaggcaactgcnnnnnnnnnnnnnnnnnnnnngctaagcaggagagctggatcttctgggccccaattcaaggagttctccacaatactgtgcaccatgcccttttggtgctcccacatcagcagaggcgaagctaggcacaagcactgcacttcacattcttacctgtttgaatcaatccaacttcctgaggaaagctctgcctctcagtctggccatgagttcctgctgtgggctggctccaggccagcctttggcagtgacgccagagtggccagacttctgtggaattcggcatcccaggatgctctgggtgactggaaacagatcccatgggccaagtgctttcggggcaaaaaagtccttggagattatgatatcaaggtggaacaggcagaattttcagagctcaacctggtggcccatgcagatggcacctatgctgtggatatgcaggttctccggaatggcacaaaggttgtcctttattggtctttctggcctcaggatcattgtgactgtctccagagttactacctctggcccaaagaggtggtttctaagaactggattggtgacaggaaaggccagactggaggtgtctgggacctaacaacaggaaatacgagcttgtccattctgaagatcaagaaagaagacagaaaaagagatgtccatccgggtggggagtccttccggccagacttcgtgctcatccggcagcatgcatttggcatggcggagaatgaggacttccgccacctgatcattggtatgcagtatgcaggcctccccagcatcaactcactggaatccatatacaacttctgtgacaagccatgggtggtgagtgaggcccccttcccccaagtaaaaggaatgattaaacttttggaaaggcctgagcccagtgacaaccaagggaatagtccaactcaggtagtgacagagtcctaccaagtggttcagcaacctgaaaatgaaatttatcctcatgcatgtgaatcaaatacttatgagctagaagtgtcttggagatcatcaaagcctaaccctaattctgaccttaacctttcatga

SEQ ID NO: 116988 - DNA, 1305 bp, Homo sapiens
atggtgtttgttaagaggcggctgcttggtgcccgttccccagccctggccgggagatggcaagatgaggcactgaagctgaggcctggtttaatgaactgcctcagcatctgctcaggtgctgcttgtcagagggaagagaacaaactgccctggaatcacaagttatacagagaaaacataagtgagcattacaagcacgaacaggaacaggtaaacaaccagacagaggagctgacactgcataggaaaaacacagtccagtcagcattgaaagaacgcagcaacggcaccagtgggaggggcctcatgcccagtaccactgaagggtcccaatgcatcatctcaaatgttggccaagagcagcttacgatgttctcctcccagagaattggtattcccagagagggttacagaagactatgtggcataagagcagaaccagggccagggctccgggcctattccctgtggggcttggctaccatgggatctgtttccagtcacccagagcatcctgggatgccgaattccacagaagtctggccactctggcgtcactgccaaaggctggcctggagccagcccacagcaggaactcatggccagactgagaggcagagctttcctcaggaagttggattgattcaaacagagttccagaccagcctggaccagctacagagtcttaaactcagcaagacccctagggttattggacctgtgcagagatgtcttgcaggtataggctttcaggagcttggcaaggagagtgtgccgcttccatcaaagctaattgggctggtatcctgctacgctgaatctactgggcttagtgatcagagaagccagggaggaaggagagagctggtgaagctcaagactcctccagacaagctggagaaaggagctcctgaagtcccagcaggatggaaagctgaggaaggaaagacattgagtgactcaacacttagctcatctcctggagtggggccctcccataacctagaacccaagaaatatcccatgggggcagtccctgagtcttctgggggcactgaggggcaggtcactcaaggtcccatggctgcacacagtctggatctcagcatgtcaggcttggaaggagattttataagttacctgctccaacagccccagtccccagccctcccctttcaccatgtgccttacaagctgctcatcctgctcctgcttgaacatcagcaacaatgtggcagccgcatgccgtttctgagtgttagagagtttactccctacactgggtcaaaacctgtctgctaa

SEQ ID NO: 116989 - DNA, 639 bp, Homo sapiens
atgagacctgatatttaccaagttccaacaagacatgaagataatgatgtggaaatggatgaactgggcacacagtggtgtgattcaggcaagttgcttagcatctccaatctctatgtctttaccggtaacactgggatcatgatgccctactcaggaccagagagctctgtggtgacaactgaaggagacccttatggcagagtggctgagtggacagatttgcacacaagcattgcacctggacaaacaggactcaaacttgtctgctccaagggcaatattgctccacaggatcattttactggctgcatcctcagccatccaacagagaaattccttctcaactcagtgtctgtaaaccccaagaatgcctcttgcctccagaactgtgagagaaaaaatttctctcgttttgagccatccagtttgtggcaatttgttatggcatccgtaggaaacaaacaggaaaaaatggaaaatgagagtgcattaccaaaactcagaaagattataagcactgttgagaacttagttgaggttggtgatcatgaatttatgttggcaataaatgtacagcagcccaggattaactgtgaaaggatctatgcctcgtgtcagggaatcatccagatttga

SEQ ID NO: 116990 - DNA, 1108 bp, Homo sapiens
acactctcgttttggggatatcttagagactgggaaccagagagcacaaacagaggagatggattcccacatcttcaccatcataggcctcgaggaggagagattgccgatatcgaagagaaattactctgctctgtggatctcattggcacaggttcctgctgagtctgaggggaaaaggggattctggaaggcggggaaatggatggatcctgtggagaggccagacagcttccgagcagctgagaaagaaggaagtcagccaagatcccctgcatctccactgaacaaccaaggcacccctactccggcacaactcacaaaatccaatgcgcatgtccacactgatgtgggcagccacatgtacaccagcagcctggccaccctcaccaaataccctgtatccagaatcagaagactttgtgatgacctcagagaaaggatcacgctaagtggtgacaaatccttggtagaagaagtgtttccagagatcggcgatgtgatgtgcaactttatcagtgcaggctggaatcacgactccacgcacatcgtcaggtttccactaagtggctactgtcacctcaactcagtccaggtcctcgagaggttgcagcaaagaggatttgaaatcgtgggctcctcagccactgcgctggtccaggacaacctcacctcctgcttgacggccacagagcttctgctccactcctgttcctctgtagggtgcagccctggaggtggaggaaatgggtggaatatccatgaagattcctggaaaaaggtggagatttcttggaactgtggtgccacccatttgtacaccaaatatggggattctcagaaccgtcataacaccgattggcatttagtacctgtggatttttcaggtgcacagtgcaagctgtcgatggagctaccattctggtgtctggatagtggtggcccacttcttacagctccagtaggcagtgccccagtggagactctgtgtggggactctgaccccacatttcccctccccattgtcctggtcaaggttcttcatgagggcttcacccctgcagcagacttctgcctggacatccatgcatttccatacatcctctga

SEQ ID NO: 116991 - DNA, 1313 bp, Homo sapiens
ttccttacatcctccccaaagacagccaggtcgggcccgacgtgaaatccgaggctgcgcccaagcgcgccctgtacgagtctgtgttcgggtcgggggaaatctgcggccccacttcccccaaaagactttgtatccgcccctcggagcctgtggatgcggtggtggtggtttccgtgaaacacgaccccctgcctcttcttccagaagccaatgggcacagaagcaccaattctcccacaatagtttcacctgctattgtttcccccacccaggacagtcggcccaatatgtcaagactctctgatcactagatcccctgcatctccactgaacaaccaaggcatccctactccagcacaactcacaaaatccaatgcgcctgtccacattgatgtgggcggccacatgtacaccagcagcctggccaccctcaccaaataccctgaatccagaatcggaagactttttgatggtacagagcccattgttttggacagtctcaaacagcactatttcattgacagagatggacagatgttcagatatatcttgaattttctacgaacatccaaactcctcattcctgatgatttcaaggactacactttgttatatgaagaggcaaaatattttcagcttcagcccatgttgttggagatggaaagatggaagcaggacagagaaactggtcgattttcaaggccctgtgagtgcctcgtcgtgcgtgtggccccagacctcggagaaaggatcacgctaagcggtgacaaatccttgatagaagaagtatttccagagatcggcgacgtgatgtgtaactctgtcaatgcaggctggaatcacgactcgacgcacgtcatcaggtttccactaaatggctactgtcacctcaactcagtccaggtcctcgagaggttgcagcaaagaggatttgaaatcgtgggctcctgtgggggaggagtagactcgtcccagttcagcgaatacgtccttcggcgggaactgaggcggacgccccgtgtaccctccgtcatccggataaagcaagagcttttggaactaaatggaaatatttcttatgcaaaaaggaaaacacacacaaccaataactcaaacaaaaaagggacatttatgtgcagttgggacagcaaaccaagtcctggacgtaaaatcgaataaaagacacatttatatccaatagagaccacacctgtattcatatgggaacaattggaatagtgatatcctcaaggtgtaaaaaatatataaatatatatatatatgtcaaaaggtaggaaatgcaaaaaaaa

SEQ ID NO: 116992 - DNA, 708 bp, Homo sapiens
atggatgcagctggaggccattatcttaagcaaattaatgcagaaacagaaaatcacctactacatgttctcacttctcctcaacgtcacatggatctggaaagcagggagactggactacggagccagccctccagggttggaactgagtttgaatctcagcttgactacttactaggatctaaggcacatcatatgtctgagcagttcagcatcctcactcacaagtccaaggctctcagcaatgtggaagaagatgtgattcctaaaattaccacccttacacacagtgacacactcaccagaaactttattcacatttgttctataacatttcagcacagttcagaccttccgctgagccagtgtgaggtcagggtgttgaggaagcgagtccctgcagtcagactccagctggctgtcgtcctgcttctgcttattccacagaatgagtctgagggattcctcctgaccagtcattacaaaaattcttggagcatgagcaagactgagtctgtgtttggattggaggaagggactcatcaaacagacatggctaaatctgaattcaacaccccaaaacctgtcctacctgcatcatctatcttggtaaagggctccacccagatacctaaggacagcattcaagaattcactctcttcttcctacctgcatattccatcaacagtcctactaattcagcctaa

SEQ ID NO: 116993 - DNA, 452 bp, Homo sapiens
  misc_feature (1)...(452): n = a,t,c or g
tggaattcctgaagcagccacgggatttctgttgtgtctgcgtggaagccaaagagggtcacctgtctgtcatggcagcccagtctgtgtatgatacatccatgccaagacccagcagaaaaatggttcgcggggagatcctgcccagtgcctggatcttgcagcccatcactgtggaagggaaggaagtcaccagagtcatctacttggcccaggtggaacttggtgctccaggcttcccacctcagctcctgagctctttcatcaaacggcagccactggttatagccagactggcttccttccttggtaggtagcatctcaccgtcaagatggtgctgctgagatgcaggcccaggctgctcaagagagacactgtggcagctccttgttactttccataccacagtgcaggaaaagctgatgctacctgctgtggccgattggggcan

SEQ ID NO: 116994 - DNA, 957 bp, Homo sapiens
atgggcaacagggatttggccaagcatgtcgtggacacttctatggctgatgtaatggctgcttgttcggataatttgcacaacctcttcagctgccaggcaactgctggctggaactatcagggtgaggagcaggcggtgcagctttactacaaggtgttttctcccactcggcatggcttcctgggggcaggtgtggtgtcccagccgctgtctcgtgtgtgggcggctgtcagtgaccccactgtgtggcccctgtattacaagcccatccagacagcaaggctgcatcagcgagtgaccaacagcatcagcctggtgtacttggtgtgcaacaccaccctgtgcgcactgaagcagccacgggatttctgttgtgtctgcgtggaagccaaagaggtgcctgccttggtggtaaagatgttgtgggaagaacttgggctgaagtgtcgtgagaaacaatctatgtgggcctcaggtcctctaggggaaggagggcaaattggggctggagccaggggtcacctgtctgtcatggcagcccagtctgtgtatgatacatccatgccaagacccagcagaaaaatggttcgcggggagatcctgcccagtgcctggatcttgcagcccatcactgtggaagggaaggaagtcaccagagtcatctacttggcccaggtggaacttggtgctccaggcttcccacctcagctcctgagctctttcatcaaacggcagccactggttatagccagactggcttccttccttggatgggccctaccccaagttactggtttggtagccccggagaaggaccagagaatttgtgttaacaagaagtcccaggggaccctgaagtttgctggtctggggaccacattttataaacagctggctttggaacatggcattcagaacaaattggatttaaaggataaagataaaggcctttga

SEQ ID NO: 116995 - DNA, 414 bp, Homo sapiens
  misc_feature (1)...(414): n = a,t,c or g
gaggacttcatcaaaggcttgctgtatgacttacagtgtggacattaatttttaagaatgatttgttatatagttagaacggaagagtttttctacctaaagaaatgagaatctagaatttgtgaaagggctgaatgttcctatcttgctgcttctgggacaaacttttccctgacatgtaaaacgcctgcaactgccatgaacaggaaagaaatggaaatggtactgattcactcatcaactccaggcaacnnnnnnnnnnnnnnnnnnnnnnnnnnnnnnnnnnnnnnnnnnnnnnnnnnnngaaataactttattcgcagcctaacactttgcactgcattcagcatgacttagaatttacttttggtgttgtccagctgctgccaaaaattgggtagaatcagattggtt

SEQ ID NO: 116996 - DNA, 692 bp, Homo sapiens
  misc_feature (1)...(692): n = a,t,c or g
gtgctatgtcatcacaggcttgttgtatgacttacagtgtggacattaatttttaagaatgatgggttagaaagttagaacggaagagtttttctacctaaagaaatgagaatctagaatttgtgaaagggctgaatgttcctatcttgctgcttctgggacaaacttttccctgacatgtaaaacgcctgcaactgccatgaacaggaaagaaatggaaatggtactgattcactcatcaactccaggcaacnnnnnnnnnnnnnnnnnnnnnnnnnnnnnnnnnnnnnnnnnnnnnnnnnnnngaaataactttattcgcagcctaacactttgcactgcattcagcatgacttagaatttacttttggtgttgcccagctgctgccaaaaattgggtagaaacagattggtattctttgttggtgcctgtgaattgtacgccagtggtacaaaggtgatgttgttccttgctgagcacttcgtggaagaaggcaaaactttgatcatctgcccttgcacttgggcagtgttgaaggtgattggagtacaagtgccaatttgcaggaacaattgtaaacaccttttgatacaaatggccatcatcccatttttactgattaggaaaaactttgctattaataggtgcacagtccatttcagggataattggtaaagaactgagtgcaccg

SEQ ID NO: 116997 - DNA, 1044 bp, Homo sapiens
cttcttatgtattcttagaccagatgaagtggatttttcccttacaaaggaattcggaatgtatactaaggaaaccattcccttctgggatccaatctagtccttgtttgggaaacaaaatgtgaaacatatccaggtggctgaaagagaagagacatcctgacaatactcttcagaaggctccctggatcctcccttcctccacgtcattttaccagcccttgaaaatgtacttttctcccaaataaggatacttatattcgcattctgtaagcagtcctagtcttagtgagagaaggcatgcgcataccatcccaagcatgcgctgcagaacaagagatcagcgtgcttcccctcaaaggcctattcccacgggcctttcccgtgtcccctcttgtcaccactactcatatctctatatttcacaccaaagccagtggaagccaatgaaagttccacagtctgcctagattccggtgcttggtcagaacaatcggaggacctgggctctggcaacgtcatggaactgccatcctagtcccagactgcacatcactggatgtcctgcccaatatgaaacctggaatcttttgcaaagtccgtgatactttgaaacacgaaaggctggaagtgtcattagctgggaaggatgaatgcagcagctattggaaggataaacagaaggtccagagagaagaggacctggaaaagactagcattttggagactgggaatggtgactgggaggccacaagagggctgcctgaagaatgtgctggaatgagggaaagagattgtgcagaagcacaggcagctggacttccagaggaacacatcagtgggggaacacacaggcagctgaacatccagaggaatgcaccaataggcaccagcacgccagtaggccaccgatcggcagaagcagaaggacatggagtttggctggggcagttggaggagagcctgggccaccaagagcccgactctaggggaaaaccatctcccttctggctcccccatctgctgagagctacttccacttaa

SEQ ID NO: 116998 - DNA, 486 bp, Homo sapiens
atggcaccagaagatttggcgtctggtgagggctcatctcctgcatccaagatgatacctttttgctgtgtcctcacatggcagaagggcaaaaagagcaaagcaggctccctcaagcccttttataagggcactatccccattcatggagcattaggattacaggcattagccatggaacctggcctgtcccacacgttcaagggcttggacagtggtgcccttgcttatacgatgacttttcagcttgtttcaacacattcagtgtacacatgctcagattcaatggatttacaggctaccttatctattttaaccaaacaaaccctcaccaaatggactaaaccctgcaaagacattgagatgaaccacattagcaattgtgccaacggcaaacaaaaggacaacggcagagttgagagctgacgttttctcctttcctacattctgaggtgaaaacaatcagatattgcaggagaatccatt

SEQ ID NO: 116999 - DNA, 403 bp, Homo sapiens
atgctgactctcctggatgggctgccatcagggatcataggtctcatgagcagactgtcaccggatgtccacctaacccataaatatcagccctctgtgcaccaggagcttcctccttggaatgcagccggactttataaaaagcaaaatgttcttattccacatgtgaagtgcctgccacgaaaccaagtaccaatcgaatgtagccactgtcaggggggaggtggcagtggggacagtgtgcaagaggacgatgcgggcaatccagcagggcttctcggaggaggagtggcttggggcgagcctgctggacctgctggtctggaagtgtttatcatgctgtcccttctgactcgcgttgtatgcccctgtcctccttaggcttgctgagcctccaagtact

SEQ ID NO: 117000 - DNA, 301 bp, Homo sapiens
gagatgagatcttggctatgttgcccaggctggtcttgaactcctgggctcaagtggtcctcctgcttcagccttccaaagtgctgggattaccgacataagccaccgtgcctggccttaatgtttcttttctagacacgtgagatgactgagttcttgaatgccctccagaaattaaaccaagaccttttggaacattcttgggaggaaggtaacaagcagattcccgaaggtgacaatggagggagtagaagccttcagcccaggtccagaggcacggatctgggaagggagctcatcc

SEQ ID NO: 117001 - DNA, 1644 bp, Homo sapiens
atgagcagagaccacaggctgctgtgcctcctgggcctctgttgtgtggcagatgcttccaaacagcccttcaggaaatctggaattcccagaggttatacattgcacctgaggccatctggctacaatccaaactctgggtgcggctggcgccaaagctactacaccatgctgccttctaagctgcatttcatctggaaccgctgtggctggcaggccgagcctctgaacactgcaattcaggttaatcatgcagacctgctggagcacgcggggccgaggggaggcccacactaccgctttccccactctggggacggggagaacctgatttgtcttcggtccacagctagtgtgtgcaagggcccaattcaggtccagatcggcgtgctgacaaggactgtgtttggggctgctcccctgcagacagagccccatgggcaggccctgatgggcggtcagaggacacaagacaagagccagacacgtgagatgactgagttcttgaatgccctccagaaattaaaccaagaccttctggaacattcttgggaggaaggtaacaagcagattcccgaaggtgacaatggagggagtagaagccttcagcccagatgctattctgacatgaaacctttcactcaaatatttctctacaatggagtctctccacagtcgggccatggctccactgtggaagatgtggagtttgcagcacggcatggtgtcaaacagccacatgcacagcagtcctgcaggcactaccttgcagctgccaccatgatcgtggacagaacgctcctcttggccccaggctgttttcgatgcgggatccatgacacgcttctctctccaacagatccccgcaacctagccaggtcagatgccgtccgaggaggcaagaaaattctgatcgatctctttgtccccgaacggcaaaactggcagagatcccacccaaagtccccagacaaccaggatgcctctacactccaaggagcaaaccctgtggagatcttattacatttactttacagagaaagccaaggatttgaggttaagcagtattcccatgatcacgctgcccagggacacacagatggaatctctctcccgagaaacctgaagcgggcaagacaaacacaacgaaccttgctgcaaaagctaaaacgacagattccggagacatttcggaatggtggaattgaaagaaacatcagggcaaacacagttggtcactgggtcgaggatgaaaaaagcaccgaacggaggccgccccaaccaaccaggcgccggaaaaagctctctcaatttcatttcatgggaccgtgcgattcttacgcaaccgtgccaattcgtgagacaaaacagacatcgccaggcccgactgtgtcctggcacgggcctgaggctctgctgatccagcgccttatctatatttggtacgtgagtccccacagccctgaccaggacctgcattgggctctcaggatgtcccactgggtactcaactctcgttcagaacatcagctccacgaggccaggactatgacctgcctccccggcacctgggaccgtgcccagcataatgagaacactcgatacacaaggcatttccatgagtccttgtgcaactgtaaataa

SEQ ID NO: 117002 - DNA, 906 bp, Homo sapiens
atgccaccactatcagagaatggggaaagagtggtgttggtgattgaagactgtttttcctacctcttcagtacctctttcagttatgtgaagttaaagccagatactgggtcactccccacactgctgccaaggcagctagaggcagcaaagctggacactgctgggtcaggctggttcaggctctctagggcaggtacaggtgctgaccttggtgaagttctggggcagctctcaggccactgggacaaccgtccagggaagggcagaggcatctctccagagccacagagccagctcagaggaagaggggtggcctggggttttcagcgcagtagggagctgtggggcctgctcagctcccacaccctgatctggtgggtcttcctcctctcagtgtctggctctggcaacaggcccaaccagttaggctacttccaagtcatctatgcccagatcactgagccattccaggcattccagagtataaaattccctgtggcagaaagccctggattccgtgaacccgactgcgaaatgatgtctcttttccccagaaccaggaagtcaggccagcacctgacagatgcctgtggcgccagcagctcgctgagcctccacacgattgtaattcgcttgtttctccggcctccaagcttccagggaattagaaagtggaggcggcttatgggatcagatgagtacattcgcagatgggggaaaaaagtgtacctgtcagcttggaagccagagggagacaaagggataaaagcaaaccctgtccagaagaaaaaagaaaaaaaaatagggcaaatgaaaaaggaagacaatgtccagatcaaagagttaaatatggacacaagaaatgcaagcagctgtaaagtgaaagatcaagaaccactctga

SEQ ID NO: 117003 - DNA, 514 bp, Homo sapiens
aggatagctctttccctgtggcggaattcgtggggaggaggcaggacaggccctgtgagggcagggcaaagtgggagtcagcgttggccaaagcgagagagccccaggcagtggagcctttgatgtcaggcctgaaggcagtggggactgtcttataattttatgctgagatgaaaatgtatgactgaaaaattggtctggtggcaggaggtgatcagagtgggtggccgcaagaggcttcctggggaatgggcttcctcagtatccgggtgcagcaggtgggccagaggcgacccatggcagcccccagtgtcaacgtgagcaagtgcaggactgtggacaagactgtgatgccatgcccggggcagagaagatgatggaaaaggagaagttgccccagatccagtggctcacagaagcactcttcctgaggaagagcttgttcttgaagtttgcacccacagcttctcctaggcgatgggcttggagagctgtggtcagcatcaagagctag

SEQ ID NO: 117004 - DNA, 993 bp, Homo sapiens
  misc_feature (1)...(993): n = a,t,c or g
ggatggtgagtttccagctgacccacaatgacgtatttaactcacagtgaaactcagctctgcgggtttaatagtttccttttatttctaagagcaagggagcctatgtttctaataattggacatgtctggaactgtccctaacatttgacagttttttcctccttgccagtgttaaggagattctttcttcctcacttcagagacagcttaatgtgttgtatttggatgtagggatgtgtcagttacctattgctacatgacaaccgaattctaatttaatggctgaaaacaacagtcatttattggttcacagctctgtatgtttgcaaattggtcagggctcaccctgtgagtgcttctgctggtttctcctttcttgtgcagttacaattcattggcaacttgatggagttttgtggcctaatagtgtctccctcagatgcctcgtggttggtttcagctgtcagcttggcctttctctacatgtggtctcttatccccaaggaggctagcctgggcttcttgtctcagagttccaagaggaagtttaaaggtagtttttacgggagatacagattggactatgaagtacttaagcaagaggtccctttttccacacccttgtacgggaaggttttggaaccgccggagagtaaggggaaggtgtcccattttgatacgaatatgccggctccaagccccagagtgttgattttagcagtagtgggcacaggccacgcggggttcacattagccggggccgccatacaacgcgttccgttgtacccacacttcctcctccgtgacgagncacagtgtgagctcagtgaatttgaaaccagtagggacaggtctgtggtggttggggttgccatggctgttgttaagaatgaagacacaaacaagcttgtatatgggcacggctgctgctgctgctgctcccccctgatggccgttgttgattttcagagaaagaaaagtggattctga

SEQ ID NO: 117005 - DNA, 379 bp, Homo sapiens
  misc_feature (1)...(379): n = a,t,c or g
cggcacgagaactgttgttgctttaaagtctttttgtctgatataggaatagctactcctgtgtccatttgcatggaatatctattcccacccctttaccttaagtttatgtgagtccttatgtgttgggtgagtctcttgaagacagcagatacttggttggtgaatttttattcattctgctattctgtatcttttaagtggcacatttaggccatttacattcaatgtgggtattgagatgtgaggtactatgctattcatcannnnnnnnnnnnnnnnnnnnnnnnnnnnnnnnnnnnnnnnnnnnnnnnnnnnnnnnnnnnnnnnnnnnnnnnnnnnnnnnnnnnnnagtggtagaattatctgttgttttctt

SEQ ID NO: 117006 - DNA, 480 bp, Homo sapiens
tgctgagcaaattcaccattaccaagccaccactacaagaacggctaaaaggagctccaaatcttagaaccaaaacttggaagcacatcaaaacagaacctctttaaagcataaatcacacaggacctataaaacaaaaatacaagttaaaaagctaaaacagaaaacaaaaaacctaagtactcagacaacaaagaatatgatgaatgtaaccatacctcacatttcaatactaacactgaatgtaaatggcctaaatgctccacttaaaagatacaaaactgcagaatggataaaaaaatccaccaaccaagtatctgctgtcttcaagagactcacgtaacacataaggactcacataaacttaaggcaaagggttggaaaaagacacttcgtctaaatggacacatcaaaagcgagcaggagtagctgttcttatatcaaacaaaacggactttaagacaacagcagttttaaaaa

SEQ ID NO: 117007 - DNA, 600 bp, Homo sapiens
atggccccactccctgaacttgtgctggccatggcctccttgttggagacccagtggcctctgggaaggcgatgcactgggcgccatggagaagctgtgccggcagctgacataccacctcagcccccactcccagtggaggcggcaccgggggctggtgaaaaggaagccacaggcctgacatgcgacaccaaagccatttctattcgcctcgccctgctggaccttttctggagagatgggaattcttggaacagggtccggggctcatggaagcccaacaaggaaaccctgatgcctccgctggtgccctcggtgcccctgactggctcttctggctctcctcaaagcgtggtcctcaacctgaccagcagcatctgcatccctggaaactcctgggaaatgcacatgccctgccctgctgaatcagacactctggtgctcagcagtctgcgcctttacaagccctccaggggattccgatgcatgctcaagtttgagcaccacctaaaccagtggtgcattgtacccgtccctggattccttcttgcttcatcacctttccagacaatatttcacaggttctcttcttatgtttaa

SEQ ID NO: 117008 - DNA, 719 bp, Homo sapiens
gcaccacaccacctagtgcccagaacatcggcattgaatggcgccataacaaaagactctccccagggtctaatcataagatgatcaaacactttcattcaaaatgcaggactgaaactgtgatgactgaagaggaggaatggaagcccatggacccatccaagatgagatgcagcttcttccagaatggcaaggagtctgagaaagagaaggtccccacaaggtctcttctggctcaagtgattattccgctagtaaattacaggggcgatggctcagatgccaccctccagaatgcagaccccttcgtgggaaaggcggggctgggatttgtggatgacagtcctctgaaggaggtcaggtgtcagagaggtctgatggacaatgtgcacaagtctgtgtgtgagaagaccaagaaaggcgaggctgtccccgccctctgcattctcatcctggataacccaagctcatgttatcagcctttcctggcatacccccggtacgttaaaccgtcgtctgaaatacccagcattctgccgtggaaagaaaacattgagctcggaaaacaggccactaacaactcgttcacagagtatatgctgaattgcgctggtctagatccttgccactcaatgtgtggttcaaggaccaagatcatcatcattacctgtgaacttgcaagaaatgcagaatctcaggctccacctcacacctattga

SEQ ID NO: 117009 - DNA, 879 bp, Homo sapiens
atggttgcctatgaccacattctggccttaaatcacctgtacatgtgcattgctgggtgccagcagatgattcatgaaactcaacagacagatgccctggtgggcacaggaaaccgaaggattgagagacatggtggaatcagatgtaagaatcagagggcctgggctgttgactctgggagcaattatgaccagggccatgaggttcaacagattcctcgccttggagaaataaaggcgtggttctggcacatcgacatcactttttcaaaatccagattctcggactccctccagacctactggatcagaccctctaagggtggagctcaaccgtctgtgcttcaaggagcactgcagcggccatccctgtgtgtggctagtggggaatttgtgggaaggggtctccacaactggggcttgttgagggactcccacccaatgacaatttggcacagctctgagctggagctcccgtgcatcttcagccaggaagaggaagagggaggcaccacaccacctagtgcccagaacatcggcattgaatggcgccataacaaaagactctccccagggtctaatcataagatgatcaaacactttcattcaaaatgcaggactgtgattttgccgcttaaaatagtccccgaatgtagtgctgaaggtctgtctagtgatcctgagtgcaagaaggccatggtgtgccttatggagaaaatagctgtgttggataagccttgttcagtaatcttcccagtgtcccccagtgcttcaatgcgctggctccactgtggctccttgagcaacgaggtgccagcagcagcagcagacaatgatgaccacaaagacaacaacacttgcacagcccctgccttctga

SEQ ID NO: 117010 - DNA, 552 bp, Homo sapiens
atcctcacatacagagaagagcgagagattcatgcggccgcttactataaagtggacgacccagtgtggaacattcaaattgcaaggatgcttgagctgcccactatctacaggaaagtttatgaccagccttttcacagctcagccctagagaaagaagaggcactaagcaatccaggcgccctggacctccccagtctcacgagtttgctgagtgaaaaagccaaagaattcctcatggagaacagagtgcagagcttttaccagcaggagctggaaatggtggagtctttgctgtcccttgccaatcagcctgtgattcacagtgcctgctccgaccaagtgaattttaagaaggacaccacttccaaggcaattcatagtatatttaagaatgctatacaactgctgcaggaaaaaggacttgttttccagaaagatgatggttttgataacctatactatgtaaccagagaagacaaagacctgcacagaaagatccaccggatcattcagcaggactgccagaaaccaaatcacatgggagaaggg

SEQ ID NO: 117011 - DNA, 2024 bp, Homo sapiens
ctcagccaactgctcctgcgccaggcggagtcgtcgccgcctgcggatcccagcgccggaaaggccaagtcgcagggctcctggagctgcatgcggcgggaggggctactaatgcttgactcagtgatgcagaacctttcagagttagctggaagccacagccctgcctcttgatgcagcctggatccagccggtgcgaagaggagaccccttccctcttgtggggtttggatcctgtgtttctagcctttgcaaaactctacatcagggatatcctggacatgaacgagtcccgccacgcgccaggcgtatttttgtacaatggacatccaataaaacaggtagatgtcttgtgaacagtcattgtagtgagagaaagagatgctttctacagttatggagaggatgacagcactggagttataaactgcatctgctggaaaaagttgaatactgagtctgtatcagctgctccaagtgcagcaagaagagctcagcttaaccgtcacaacttaagaagctaacaagaggaccattgagcagaaaacaaagatagagatcggggacacgatccgagtcaaaggcagtatccgcacatacagagaagagcgagagattcatgccaccgcttactataaagtggacgacccagcgtggaacattcaaattgcaaggatgcttgagctgcccactatctacaggaaagtttatgaccagccttttcacagctcagccctagagaaagaagaggcactaagcaatccacgcgccctggacctccccagtctcacgagtttgctgagtgaaaaagccaaagaattcctcatggagaacagagtgcagagcttttaccagcaggagctggaaatggtggagtctttgctgtcccttgccaatcagcctgtgattcacagtgcctgctccgaccaagccggtacataccaggatctttttgactcagcagttaaaaggcctgttggacaaattcatgaaccagttggtctaggagttgttctcaggtgccgtaaggtgaattttaggagggacacccacttccagggcaattcatagtatatttaagaatgctatacaactgctgcaggaaaaaggacttgttttccagaaagatgatggttttgataacctatactatgtaaccgagagaagacaaagacctgcacagaaagatccaccggatcattcagcaggactgccagaaaccaaatcacatggagaagggctgtcacttcctgcacatcttggcctgtgctcgcctgagcatcccgccccggcctgagcgaggctgtgctgcagcaagttctggagctcctggaggaccgagagtgacattgtcagcgacgaatggagcactactacacagcgttctgagcaagagacaccgcagaccagctgaggaggacaaagataaggtggcattcacccccaggctctgactttcagcatcatgcaggggcttatctgtctggaggcagttacctcataataaactataaaatatagtcatcttgggaatgggatttggcataaatgttgttggctcccttctgtccactatgtccttggtgtacaatgactttgatctcagccatgacacaacaagaaaaccctccctgttgagctcctggctggactgtgcgttgttcgcagagcagaaatggggaggaaacagtgttggcagctttaactgatgtgtgtggttggagtcctccttccatggcaaagggacaccacagggtagtgaacatttcgggaactgaggggcatatggcctgatcacacaggtctaagcttttcaaaacttcaggttatcagagaccttcctgtgggcctctcttgctggctaagaaccggtttaggggagtagttctccctggatgagtgtcacttgcttacagtttctgtggctcagttaccagcagtggggttgagacctgggtcgatgctctttacaggcctgcccagagatgggaataaacaggagatccacagcgtgacaaaaaaaa

SEQ ID NO: 117012 - DNA, 414 bp, Homo sapiens
atgagtgagtcatggatcacatttggaaggggcaaccttcagattatggtggtgacactactaggaagacaggaagtggaggttgggttgcctgcttgtgtacctggtgatggtattgtacttcagaaaacagctcgagttctatactcgctgtacaggatacgaactcgagctggatacccagacttatgtgactgccagttatcttgcaaaaagcatttcacctttaccacttggcaggcaggaggaagaagaaagggagcagggatgtccattagaccactacgtggcccatcatgtgaccagccgtcattctttctgaatcatctggaaatggtctttattgttcgtcatgtttttgttaccatgaaggctagttgcctcactcaggttgaggagatgatacagcaatag

SEQ ID NO: 117013 - DNA, 597 bp, Homo sapiens
  misc_feature (1)...(597): n = a,t,c or g
atcgatacgacttttttttttttttttttttttgtgtaagaatatttctgtatcttatttcccctcgggtaactttttctatggcttcaccattttctcttcaaatttgaaagaaaaatatcccaaagtttaggaaactggaatcacttggccctttctcttcttatctcctcccaagttcaaaaatgctggaatctcttaatggccaagcatccttcttggatctgcagtttaggctcaaacacattcccagccttaaccccattcttctttgtggtcttagccttccttccggaaaattggctttgtctgcccaccatagccactctgctttccgatcatagcgcctccttcccgtgggcatacaaaggaatcctttgcccttctttatactgtgtcactttgtgaggctgatgcttgccactacttcttacaaaaggttctttcgggttttaggtacgttgaccaatctttggcagcangggctgttctgtcggactacccggttgaaagaggaacagtaacgcccctgagaggagccacagagccaagctgccgagggagcctcagcaatggatccaaaccaagccaaaatct

SEQ ID NO: 117014 - DNA, 351 bp, Homo sapiens
atgaggacggccagggcccagcatagtgaggaggtgagacgccggaacaccagcatcacagcactgggcaggaacagcacggccagggcaggaggacaacaacctccagggaaggggcaaggaagcctggacagggcaagagcgtgtcaagaagctgccgacaatgtcaaccaggcagataaggccgaggagtccctcgtggcatttcacaacaagggttgttatgctacacactgggacccaaaaactgaagcaacacagcccctgcccttgaggcgtgcagtccagtttgagagacaaatgcgcaaacagaccatgacagtgacgcacaataagcagaagatggagtga

SEQ ID NO: 117015 - DNA, 394 bp, Homo sapiens
atgcccagtgtcattggcttttctacaggacctgccaaagagctgtgtgaaggagataccttagaccgagcatacttcctggccctgggcacagatccttggtcctcagacgcgcacttgaagtccggcctcagctgcccacatgggatgaggaatgtgtcccgtcagaaaggtctagatctctgggggctactgccatttatcccttttattctgggagaaggtccatgtcagccaccacgaagtaagcgtaatgtctgggcctgggaaaatggcaagcagctccaccttacactgtccttacagcttatgatcttagacgaagtgaagccccctgtttcccagtttccttatatcaagcctcagagaagtctttgattggttctactgggct

SEQ ID NO: 117016 - DNA, 490 bp, Homo sapiens
tgtaagtgcacagtatgatgtttgcacaacgatggaatcacctcatgatgaatttttcagactatatccttgttaagtaatgcatgaccttaatcaggaatgagtcacagcaatactgtaatcttgatgaagatgttgatgtagataatactcccatttacaatgcacttgccaaatacaaggcattgcactgaaagctttacagactttattttaaaaaattttacaaccttttaggtaagtaccattaaccacttttacagatcagaaaacagggtctatgaggtgaaataatttgtcatacagtggtgatgtaaatatgcatataatgaaacagaataggcaagtcagaagtgatttttgtatttcttttaatagattaagggtacttactatcagcaaaagagtgaaagtctgacagaaaagaaaaagatggaaagaaatgtggggatgtgcaattccttatgttggttggttcagcagagctttg

SEQ ID NO: 117017 - DNA, 510 bp, Homo sapiens
atgaccttaatcaggaatgagtcagagcagtattgtaatcttgatgaagatgttgatgtagataatactcccatttccaatgcactggccaaattacaaggcattgcactgaaagctttacatactttatttaaaaacattttacaaccttttaggcaacgtgttggaccttccggagcttctcagaagacagagggttttcttttgagggaagtggctatcagaacattaaaggaagtgatgttggcacattttattggcaagaggattcaccacgaggaagaaaaggccagaaggcgactcccggtaaggagcaaggcccacaaatcctcggcaccaggcctggctgtacatccctgccaaggtgcaactaagaccttcacctgcagctcaggggtgccccagacaggagcacaagaggaggctcatccccacccacaacccaggccggagcgaatctggctgcccaggctctgtgtctggcttatgccccaggacctgagcccgtga

SEQ ID NO: 117018 - DNA, 459 bp, Homo sapiens
caaagttttaacaaaacgtgaacactatattgtgatatgtaggacagcgagcagaaaatgtaaacattcaagcaaagtcttggttgagctgtgtagaattccagagtccagagggatggttttcaggagttttcaaaaggcagaaagcaacttggagtcttttaactgtgtctctcaattccaggcatgtgcacaggtccgtggcatgaattatttcagccaaattgaagtctggagatgtgccccgaggcccagctggtgggggtgttggggtgcgcgcggacccggcacccacggcggcggcggcagcagcagcaggaggaggagaaagacgaggaggaggaggaggactagctgagcggcgcctccttcccagcccgcagcgcgcactggctccttggggcacccccgggagagcaccaagaccggagactaggcggcgacacaggcaaccacgac

SEQ ID NO: 117019 - DNA, 438 bp, Homo sapiens
tggtaagagaaaggggcaaggggtataattgacaaggcactgaaagtattgaagtcagagccttgggaaggatctaccgaactctcggcggtccacgcggggacagacctcagcccgtgagccttgagctccacgcggggacagacctcagcccgtgagccttgagctccacgcggggacagacctcagcccgtgagccttgagctccacgcggggacagacctcagcccgtgagccttgagctccacgcggggacagacctcagcccgtgagccttgagcccagaaggagtggcagcctcaggacgtttgccaggtggcctggaatgtgagggaagcctcagccccgccaggaacagagctggcgctgagttcccggctcggcccgggtcagaagcgaggaaagtttgccggcgagtgtcctttgtgctgcgtggag

SEQ ID NO: 117020 - DNA, 1225 bp, Homo sapiens
atggctggggaggcctcaagaaactttcaatcatggcagaaggtgaaggggaagcaggcacgtcttacatggccagagaaggaggaagaaagagacgcgggaggtgcacgccggctgcggggagcacaaagcggggcgcaccgcgggcgccggcaacgagccggtgaacgaggcgaggcccgtgcgcccgcggctgcaagcgcccgcctggcggggagaggggccggcggcgtcagcccgggcggcggcatccctaggcgcctggggcgccttcctccggacctggccgctcgctgccccgccctctgcaccccacttctccgaccctccttcccagtcctgcctccccctgccctggcctctgagagccgactgagcccagccccgtgcagcagcggttgcctgtgtcgccgcctagtctccggtcttggtgctctgccgggggtgccccaaggagccagtgcgcgctgcgggctgggaaggaggcgccgctcagctagtcctcctcctcctcctcgtctttctcctcctcctgctgctgctgccgccgccgccgccgtgggtgccgggtccgcgcgcaccccaacacccccaccagctgggcctcggggaacagagctggcgctgagttcccggctcggcccgggtcagaagcgaggaaagtttgccggcgagtgtcctttgtgctgcgtggagaggggtgtgggcggccgccgactcggcgcttccccgccgcccgcccagggagtccctgcctggcaagctggggctcggggaaaagtccagcagcgagagggccgcgtgtcccgggacggttccaggggagcccgcgcggaaacgcggaccaggcgcttcggcccggatgctggatccaggagaaggggacctcgcttgccgtgtccaccgccgcggccccggcgccaagaacagagcctggccgtgagtgaacgactggccggggtacaaatggttttgaagcacttgaagctcacaggcaaaggctaagagtctaaatcccatcccgccgcacatctccagacttcaatttggctgaaataattcatgccacggacctgtgcacatgcctggaattgagagacacagttaaaagactccaagttgctttctgccttttgaaaactcctgaaaaccatccctttggactctggaattctacacagctcaaccaagactttgcttgaatgtttacattttctgctcgctg

SEQ ID NO: 117021 - DNA, 473 bp, Homo sapiens
  misc_feature (1)...(473): n = a,t,c or g
aagggtcaatgaatcccctgaaactgagttatgatacaggcatacctcagaccacnnnnnnnnnnnnnnnnnnnnnnnnnnnnnnnnnnnnnnnnnnnnnnnnnnnnnnnnnnnnnnnnnnnnnnnnnnnnnnnnnnnnnnnnnnnnnnnnnnnnnnnnnnnnnnnnnnnnnnnnnnnnnnnnnnnnnnnnnnnnnnnnnnnnnnnnnnnnnnnnnnnnnnnnnnnnnnngccgggcgcagtcattcatgtccagttttcctgccgtcagaggagtcctcaggaggcaggaagtggctgtgcatctcgagacctttgccggcgtagggctgtccggggggaacgacccgccttttccggtatcggttgtcatggcggcgcccagcccagcctggttttttccggatagccaattgaactaacaaccccgttccctttaggactaatctgtcacggcggcgccacgaaatcgtn

SEQ ID NO: 117022 - DNA, 1008 bp, Homo sapiens
  misc_feature (1)...(1008): n = a,t,c or g
ggcgtacgagccgggccggaagaagaggtagggcgccgccgtgacagattagtcctaaagggaacggggttgttagttcaattggctaccggaaaaaaccaggctgggctgggcgccgccatgacaaccgataccggaaaaggcgggtcgttccccccggacagccctacgccggcaaaggtctcgagatgcaggcggccctagaggtcaccgctcgctactgtggccgggagctggagcagtatggccaagtgtgttgggcaccaagccagaatcctgggcagcgggactgtcactaccttaagatgagcattgcccagtgcaaaatcctcccagtgagtgcggcccaatcatccagccagatccgcccaggcctgtgctcaagcctttggaggccttcggaggaagggtctttcggacagaaacggaggcaagcttgtggggcaaacttgtgccaggagcatattgcgctcgctttccctgcaggtgcgctggaggcaagtgcagccgccacgcttcacctgcaactgtggaggcacagccacttcctgcctcctgaggactcctctgacggcaggaaaactggacatgaatgactgtcccccccgcccctcccctgcagagtngcccagatggagtcctgagccctggaacatgggcccggctttcctggatatccaggaattcccaataaataaagactctgtatactgggctttgattcctgccatccgtacctgagagggtcctaggagagctggctgggcagagtcatctgttccccagcttcaccgggtgtgccaaggaagtgcctgggaagaacaggactctgcagctgtgccccagggttgagactaccctgcctcccttgtgaactctgccacacagccatttcctgacttctgctgcatgtgcctggggctggagtgctgtgcctggacttggctcactgaaccttcggatttccgggatcggcgattcttctggctaggcctctgagaactgggg

SEQ ID NO: 117023 - DNA, 273 bp, Homo sapiens
atgacctactccaactacttcatttttgaagatgaggaaatggaggtccagataagggaagggtgtcaccatcagcttgtgtcacagctaagggcttcccaccacaaacctgcgtgctttggcgtcttagtaggaggggctgctgaaattcataccggatatgcctttggctgtgtttatcagccccagcccaggctcccttggctgaaggtggctgaagcagagggctttgactattcaggtggccccagcctgcctgcaccctatccctga

SEQ ID NO: 117024 - DNA, 768 bp, Homo sapiens
atggtttcgtgggcagcctcagaacttggggccctgagtcccagctgctccagctcctggctaaaaggggtcaaggtacagcttgggctgttgcttcagagggtgcaagccccaaaccttggtagcttccacgtggtagctgggcctgcaggtgcacagaagtcaagaattgaggtttgggaacctctgtctagatttcagaggatgtacggaaatgcctggatgtccaggccaaagtctgctgcagtggaagagacctcatggagaacctctgctagggcactgcagaaaggaaacgtgggattggacaccgcccaccccccagaatccccactggggcactgcctagtggagctgaagggtccagagaattaccatccagctacccttcctccactggtccctcgatgttctcccggcacctcccgtcctctctccgggcccatctgccgagtaagggccagagagccccctcctccgcttaagcccgaccccaccaacttttcaaccaatacgatacactctttcttctcaggacatagtctcagacttcatcccggccagctccctccgtcccactcctggagactcaccaagcgggcgaggccactcctctccggcggcaactcggacaccccaacaccggacctggcgctgcaccctagtcgcgcctgcgcgcgccgagcccgcgcgcctgctcacttcccgttcgccgcggacacagacacacccctgcagctggagccaatcacggtgctgggggtttaa

SEQ ID NO: 117025 - DNA, 800 bp, Homo sapiens
ctcgaggccacgaaggccgccaggtccggtgttggggtgtccgagttgccgccggagaggagtggcctcgcccgcttgagttttgattcatcatggataatctgtcatcagaagaaattcaacagagagctcaccagattactgatgagtctctggaaagtacgaggagaatcctgggtttagccattgagtctcaggatgcaggaatcaagaccatcactatgctggatgaacaaaaggaacaactaaaccgcatagaagaaggcttggaccaaataaataaggacatgagagagacagagaagactttaacagaactcaacaaatgctgtggcctttgtgtctgcccatgtaatagaacaaagaactttgagtctggcaaggcttataagacaacatggggagatggtggagaaaactcaccttgcaatgtagtatctaaacagccaggcccggtgacaaatggtcagcttcagcaaccaacaacaggagcagtcagtggtggatacattaaacgcataactaatgatgccagagaagatgaaatggaagagaacctgactcaagtgggcagtatcctgggaaatctaaaagacatggccctgaacataggcaatgagattgatgctcaaaatccacaaataaaacgaatcacagacaaggctgacaccaacagagatcgtattgatattgccaatgccagagcaaagaaactcattgacagctaaagctactgctgttcttctttatcatttattcacttccgtagctcctccttgaaagttattaccttttcagag

SEQ ID NO: 117026 - DNA, 451 bp, Homo sapiens
  misc_feature (1)...(451): n = a,t,c or g
gcggtggaattccagcnnnncgccatggacgcagagctggcagaggtgcgcgccttgcaagctgagatcgttgccctgcggcgagcgtgtgaggacccaccggcgccctgggaagagaagtcccgagtccagtattagaaaagttctacagagacacagattatcaggaaattgccacatggttacatttcaacttgaatttcagattctggaaattcagaataaggagagattatcttctgctgttactgacctcaacataataatggagcccacagaatgctcagaattaagtgaatttgtgtctagagcagaagagagaaaagatctgttcatgtttttccgaagcctgcatttttttgtggagtgggttgaatatcgtaagcgcacgtttaaacatctcaaggaaaagtacccagatgccgtgtacctctcggaggggccctcctcc

SEQ ID NO: 117027 - DNA, 414 bp, Homo sapiens
atggacgcagagctggcagaggtgcgcgccttgcaagctgagatcgcggccctgcggcgagcgtgtgaggacccaccggcgccctgggaagagaagtcccgagtccaaaaatcttttcaagccatacaccaattcaatttggaaggatggaagtcttcaaaagatctgaaaaatcagcttggacatttagaatcagaactttcatttctaagtacgcttactggcatcaatataagaaatcactccaagcagacagaagacctaacaagcactgagatgacagaaaagattcaatacgaggtacaagatcatccagccccaaggagcattcaaatggctgtggtcccagatgaccacaacctcatgagaggccctgagcaaggacacccaactgagtggctccaaaattcctga

SEQ ID NO: 117028 - DNA, 555 bp, Homo sapiens
atggacgcagagctggcagaggtgcgcgccttgcaagctgagatcgcggccctgcggcgagcgtgtgaggacccaccggcgccctgggaagagaagtcccgagtccaaaaatcttttcaagccatacaccaattcaatttggaaggatggaagtcttcaaaagatctgaaaaatcagcttggacatttagaatcagaactttcatttctaagtacgcttactggcatcaatataagaaatcactccaagcagacagaagacctaacaagcactgagatgacagaaaagagtattagaaaagttctacagagacacagattatcaggaaattgccacatggttacatttcaacttgaatttcagattctggaaattcagccgccccagggcagcacagacaggacagaagccagacagtggatgtcctgccacttaggtcctgcaacccctgctgctgtggccacactctgcctcctaacagacagtgttggcactgacccagacctcaacagtattttaagccaatattctcatcctcatgtcatgaaagcatga

SEQ ID NO: 117029 - DNA, 2319 bp, Homo sapiens
atgcaaataaatgagacaatttgggatactgtgggagctgcaagcaggcacggtgaaggtgaaaggcaagcaaagagcagcacaaggggctgcacacaccttgctgaagggcagggaatttacctgcaggaggagcagagtccacctgagatgtgcacacgtgttatggagaaaagggaaggacttacaattgagagagagagggatccactcctaccagtctggaaagcactgggcatacaagcgcacaaatgcgtggcacatactacaaatccttctaaagccactgctgtacacctgcctcacttaaccatgcagcctcaaggctgtctcatgtcattctttcctacagctgcagagttttcaacatatggacaggaattatacctagaaaataaccaaattgaagaaataactgaaatttgtttcaatcataccagaaagatcaatgtcattgtactacgttataacaaaattgaagaaaataggattgctcctttagcctggataaatcaagaaaatctagaatccattgatctctcctacaacaagctctatcacgtcccgtcctatctacccaagtccttgctgcacctagtactccttgggaaccagattgaacggatccctggctatgtgtttggccacatggaaccaggcctggaatacttgtacctgtcatttaacaaacttgctgatgatggcatggaccgtgtctccttctatggggcatatcattctctgagagaattatttctggatcacaatgacttaaaatctataccacctgggatacaagaaatgaaagcactacattttctgaggctgaacaacaacaagatacgaggcaataagcaggaaatcaaacagacaagtaagcaggcaagtgctgtgcagtcagaaaaatgggtgacaatgcgacgagcacactggggcctgagggccgccaggagactacggccaccctcaacggcctggattaacagcagatccagaccggtgcctgtggagcagacgcactgtgggcttgctgtagcagaagagagaaaagatctgttcatgtttttccgaagcctgcatttttttgtggagtggtttgaatatcgtaagcgcacgtttaaacatctcaagtgggatgaagactatgaccaagagccagatgatgattaccaaacaggattcccatttcgtcaaaatgtagactacggagttccttttcatcagtatactttaggctgtgtcagtgaatgcttctgtccaactaactttccatcatcaatgtactgtgataatcgcaaactcaagactatcccaaatattccgatgcacattcagcaactctaccttcagttcaatgaaattgaggctgtgactgcaaattcattcatcaatgcaactcatcttaaagaaattaacctcagccacaacaaaattaaatctcaaaagattgattatggtgtgtttgctaagcttccaaatctactacaacttcatctagagcataataatttagaagaatttccatttcctcttcctaaatctctggaaagactccttcttggttacaatgaaatctccaaactgcagacaaatgctatggatgggctagtaaacttgaccatgcttgatctctgttataattatcttcatgattctctgctaaaagacaaaatctttgccaaaatggaaaaactaatgcagctcaacctctgcagtaacagattagaatcaatgcctcctggtttgccttcttcacttatgtatctgtctttagaaaataattcaatttcttctatacccgaaaaatacttcgacaaacttccaaaacttcatactctaagaatgtcacacaacaaactacaagacatcccatataatatttttaatcttcccaacattgtagaactcagtgttggacacaacaaattgaagcaagcattctatattccaagaaatttggaacacctatacctacaaaataatgaaatagaaaagatgaatcttacagtgatgtgtccttctattgacccactacattaccaccatttaacatacattcgtgtggaccaaaataaactaaaagaaccaataagctcatacatcttcttctgcttccctcatatacacactatttattatggtgaacaacgaagcactaatggtcaaacaatacaactaaagacacaagttttcaggagatttccagatgatgatgatgaaagtgaagatcacgatgatcctgacaatgctcatgagagcccagaacaagaaggagcagaagggcactttgaccttcattattatgaaaatcaagaatag

SEQ ID NO: 117030 - DNA, 3457 bp, Homo sapiens
cacatatggctgggagacacagcagctacgcaggtctcaggtccacatacagggcaacgaccctccacaccgctgtctgcccatgcatggcctgaactcacagtcacccagcctgaaaactgggccacggcacagaactgtcagcatgcgaggttccaacggagctgaggctggcgccagagagcgtccaacctcaccaggatttggcccacagcagcgaggtggaactcctgagccttcaggttcctccagtatgacccacgcatcagatggggagcagagaagggccctgaatgcaggaagcctccgcgactcgatagctgtcccctccttaagccccaagctgagacctggggaagccaagatcaatggcatgcatgctaccgctgtcccctcccaagctgaaggcaggcatcaacaatcaatcatgggaaatcgactggtttcctcgctgcagcctgaaggtgcagtacttgggccagtggccacatctcagatcaaccagaatgtggagatccagcgtggccgcctgcgggatgacatcaaggagtacaaattccgggaagctcgtctgctgcaggactactcggaactggaggaggagaacatcagcctgcagaagcaagtgtctgtgctcagacagaaccagctcctgccgaggagaggaaatactgatcagcacgtccctgctctgacgctgctcaccatggccttggcgctcactgctgccctgccccagaatcctgtttgtagaaaaaacaaatccctgactaagctgctgggtgtcgtttctgctgagcagctggtcgtaaggaaccgggccttcagctttccccgcatgctggctttccaatttgacatcactgaccaggcactaagagattcccaggtgctagacgaggaaaagtacccagatgccgtgtacctctcggaggggccctcctcctgctccatggggatccgcagcgccagccggccaggatttcaaaaagcacataacgacatgttttactgctttttcaggtttgaattagtcattgtttggaggatacaaatagatgaagatgggaaggtttttccaaagctggatcttctcaccaaagtcccacagcgagctagtcgggaggagtgcggggtcttggtgaggtccatgccagcagaaaacaaaagaccaaaagctgccaccttgaagtttcttacccggtttaatgttttctttatagccctggagctggacaagaacagagccatagaaactgctcctctcagcttccgaaccctgaaccgtgacctcatcagtcgcccatttagcattgttaagatctgtgaacgcgtgttgtctcaaaccagtcagggccgtcatgactacgcagcagcagcagtttccaagacgggccagaaacgcatccacagcagtggcacccgcggctcaggggctcctcacagcccgggctgccattggcaagatgggcatcggcaccagcaggcctgcctcacaggagaactgacccagggagtgcatgcccaggagggagtctgggtgctgtgtagcacagcaggtcttgagctcaggtctcggcctaaagtgtccctgtccacaaccatatccactcaaacaaataatgagaaaggaaaacagaaagacatgccctatcagttcctgatgtatctgttgaacactcctgttcagtttgctgagtttgtaatgtcctctctaagggagaagaaaagacattacaaactcaacgggaatgttcagcaggtgcagcagtaccgcgtcgccatgactgccaaggactgctccatcatgattgcactgtctccctgtctgcaggatgccagaacatttagtgttgctataaaggaatacctgaagctagaagaaagcctgccctatgtcaccctagccagtccatccaacagacacaggcaacagccaccccatgagcgttctaacagctccaagctgaaaacaaccccagggtcggtctacctgacagtggctcccagccactaccgccttcctgaccacaaaggctctggccaggaccggactctgggctgccccaggagagtaatgtgcaggatgcacagcaaagctctgaaggccggggagcgtggaggcaggccaagatacaattttcatgtagacaagactttgatgttgcttttcccacctaccttcgagctcttccaggtggagtttgagggcctcaagcatgagatcaagcgtctggaggaggagaccgagtacctcaacagccagctggaggatgccatccgcctcaaggagatctcagagcggcagctggaggaggcgctggagaccctgaagacggagcgcgaacagaagaacagccggaatggtgagctgatttacggctgcaaagatgcccggagccccgtggctgactggagcgagcttgcacaccacctgaagccgttcttcttcccttccaacggcctggccagtgggccccactgcacaagggctgtgatcagggagctggtgcacgtgatcacacgggtgctgctgagtggctcggacaagggccgggcaggcaccctgagtccggggctcgggcctcagggcccgcgagtctgcgaagccagccctttcagtaggagccttcgctgccaagtgccagtccagggtgcagtccttgcctgtggtgatgcccgtatggcggagcccaggatgagccctgcggtctgcgccggcctgtgtctccctccacgttctttgataatcaacatgctctcgttttcccctgatgttctcggaaaaaacaccccagagcgctcggggttaccgaagggctgtcttctgtacaaaaccctccaggtgcagatgttggacctgctggacatcgaaggcctctaccctctgtacaaccgggttgagcgatacctggaagagtttcccgaggagagaaaaaccttacaaatagatgggccttatgatgaagcattttaccagaagctgcttgacctttccactgaggatgacgggacagtggccttcgcgctaacgaaggactcagaagatggcacagaatgggtgacagtgggttgcatctcgagagagcaggtttttgccagtcgcttgatatatgctccagagagaaagccccaaagacacaaagatgtgggaatcatggatgagtgtggcctcggggttactaatgggtgcacctgggtttggggatcagggaagacagtggacatggactcgtaccaatacctggactcttcacacaccaaatcctgggggccaggcactgttgtaggtgccagatatttaattcacatcacagatgtgccatgcctcatttcctacaagtcctgcgctgcacagaaggctctctctcatcccatgtttgcatactgcaggaagaacatcactgtgctccttctagtgctgacagccaatgaccatgcagatctccttacctag

SEQ ID NO: 117031 - DNA, 1488 bp, Homo sapiens
actgtggcggaattcgtgacagctgcgctgccggcccggctgcggtcagcaacgcgccatggacgcagagctggcagaggtgcgcgccttgcaagctgagatcgcggccctgcggcgagcgtgtgaggacccaccggcgccctgggaagagaagtcccgagtccaaaaatcttttcaagccatacaccaattcaatttggaaggatggaagtcttcaaaagatctgaaaaatcagcttggacatttagaatcagaactttcatttctaagtacgcttactggcatcaatataagaaatcactccaagcagacagaagacctaacaagcactgagatgacagaaaagagtattagaaaagttctacagagacacagattatcaggaaattgccacatggttacatttcaacttgaatttcagattctggaaattcagaataaggagagattatcttctgctgttactgacctcaacataataatggagcccacagaatgctcagaattaagtgaatttgtgtctagagcagaagagagaaaagatctgttcatgtttttccgaagcctgcatttttttgtggagtggtttgaatatcgtaagcgcacgtttaaaccatctcaaggaaaagtacccagatgccgtgtacctctcggaggggccctcctcctgctccatggggatccgcagccccagccggccagggtttgaattagtcattgtttggaggatacaaatagatgaagatgggaaggtttttccaaagctggatcttctcaccaaagtcccacagcgagccctggagctggacaagaacagagccatagaaactgctcctctcagcttccgaaccctggtagggtctgcttggaatggaacctgctctggacagctcgaatagagtcgctttgtgcagaggagaaccactaggttccaaaacagtgaacgtggaggatgaagatgctgcgtggaggtacatgcaattttattcaatatagacatttgctattttctgcttagaacccaccccctgaatacgtgctgtctatgcagttatggcccattatatggaaactctcatgccatgaagaatagagtaccgctagttaagtattaattgccaaatgaaagtgacacgtacaatgtggtttataaaaataagcttaacatctgagaaaatgtaccaagtggttgtgtgtatgtatataagtgtatgcgtatatgcaaatgacattctagaagaagcatacgccttcgcaggaaggaataggaggaaaaaaaaccttaaggtttttcaccagcttgcacacaaacgtttagcataccagacacatcattatttgggaccagcttgtgcacttgtctgttcataaaactgaggtggaaccatgaatgagtagagggagtttatttcttgttgaagagttccttattaaaaacggggagctggatcagaaacgctccgtggacatgcacaggatagtatttgg

SEQ ID NO: 117032 - DNA, 670 bp, Homo sapiens
atggtcatcatttacctgtcagctggcattacatcaaaggactcttcggaagaagataaaaaagcgactctccaagtcatcaatgaagaaaatagctttctaaacaactctgtaatgattctcacctatgccctcatgaacgatttcttggagccttcaggggagcccagaacaggagtaggtaccctggatggtgtggatggtcataaaagaccagatggggtgactggtttgaaagagctggcttttctgagggatctagctgaaacaaaatccagggaaagtacggtgtgccaaaacgggacggccttgcctgtgattaagggcagcatgatggtgctgaatcaagttgagcaacctggagacccacagtgggcaggttcctacacaaaccttccccaaccggatgattgatgaagccgtcttcagcctgcccttctctgatgagatgggagatggtttgataatgactgtgagtaaaccctgttattttggaaacctacttctgggaattgtaggtgtggacgtgaatctggcttacattcttgaagacgtgacgtattaccaagactctttggcttcctatacttttctcatagacgacaaaggatatacacttatgcacccatctcttacccaggccatatttattgtcagagcccccacttca

SEQ ID NO: 117033 - DNA, 354 bp, Homo sapiens
atgaaaaatttcctggaagagattaagagcagatcagaggccgcagaagaagagaccagtgaatttagagataacttaaaaaatggaaacacagagggaaacaaaagacttcaaaaagctaaaaagctgctcagagacatgtggaacaacataaaagaatctaataaaatgtccagttatggtcatgtggccagatctgatgaatcagatgtggcagaaaggatgcgaagaagctctgagcaggtgccctccctctacatgttcccaccatcctgcgtccttgtgctgcgccggaccaggcatgcaagaacaacacaccaaggatggcggagcaacaagatagaagaggcctga

SEQ ID NO: 117034 - DNA, 477 bp, Homo sapiens
atggctgctgcccagacgccctcaaaagccaaggtcttggcagcctttttatttgccaccaaagcgaaaaacaaacccagggagggacggaggcctgagtcaggggttccgccagggaaaaaggcagaccttgaaactgccctcttagggcgatcctcagagttggttataaaatatttaagggcgagaaaaggatcgcaggagccaggccctgagatgagcttggagtccctgtttcagcacatcatcttcaccgagcatcaggcggaggagagtcgccgtttgatgcgagaagccagttatggtcatgtggccagatctgatgaatcagatgtggcagaaaggatgcgaagaagctctgagcaggtgccctccctctacatgttcccaccatcctgcgtccttgtgctgcgccggaccaggcatgcaagaacaacacaccaaggatggcggagcaacaagatagaagaggcctga

SEQ ID NO: 117035 - DNA, 938 bp, Homo sapiens
atgggtaagggagattctggacttcagaatggttcagatccaccaatagcttgcactgtgctcatggaaaagctgcagacacttaatgccagccatgaaagtagcaggagtggggctgtaccctacaaagccacagggatggagctgtccaaggccatggtagcccacctcttgcatcagcatgacctggatagtggggcgctgctgaaaagataccaaaaaatgttaaatcaattttggaactggataacaggcagaggttggaacagtttggagggctcagaagaagacaggaaaatggacttgctgaatggctttgacaaaaatgctgatagtgataagaacaataaggtccaggtctggggtagtctcagatggagatgaggaacttgctggggactggagcaaagcctggggacttagtgcccaggtcccagatgcttcagtcccagctgtggctaaaaggggacatgataaagctcgggccattgcctcagagggtccaagccccaagccttggcagcttactaatggtgttgggcgtgaaagtgcacagaaatcaagaagtgaggtttgggaacctctaaccaagatttcagaagatgtacagaaatgcctgaatgtccaggcagaagtttgctacaggggcagagccctcatggagaacctctgctaggggactgcagaagggaaatgtggggtggaaactgccacagagagtccccactggggcactgcctagtggagctgtgaggagagggccattgtcttccagaccccagaagggtagatccactgaaagcttgtaccgtgtgtctggaaaatccacagatactcaatgccagcctgtgaaaacagccaggaggtggggctgtaccctgcaaagccatgggggtggagcttcccaagaccacaggaacccacttgcatcagtatga

SEQ ID NO: 117036 - DNA, 452 bp, Homo sapiens
agaaagcctgggggtgaacacgccctgaggagtcagggaagccagagccagcggctgaagggcccttgcgtgcggctgcagcacaactgcaggttctcagagaaaaatctccagctcagacccggttctgcacaaagctcagaatggagcggccagcagggcatgtggctagaggaaggacatggccacccacccctccctcctggtgtgccaggtgggcttgctaggggcacaggtgcccagtgtcagggcagggatgccacagagccgcaggcagactgaaggggcccagggcatggtcaggaacgaagaaggagggagcctgaggctctcccaccaccaggcctgcaaagccactcacactcagcagtggacacttgaggtcacggcccaggtgggctgagggaccccaataccacctgccttgaatctcagcctgcagaagtcgttcc

SEQ ID NO: 117037 - DNA, 1104 bp, Homo sapiens
cattttaaaataaaatatgtaagagaaacatatgaaagacggccacatttagtcccttatcagatccacacttccccctgtgacctgggaaatcggggtgcgtctccagtctgtggggggcagggtctcgtccagacaggaggctgcatggtgctgcttgtagcaagtgactcgtttgtggttggcacgcccagtgcagctgaggatgaccccgtggcttggccccaggacaggacccaggccccacagaaaggcctggaaacagcagcaaaccttagagaaggaaacacccaccaccggggacccacgatcccctgctctccccggagaaggaaacacccaccgccggggacccacgatcccctgctctccctggagggcacccaggaagcagccgcagctggcaggctatgtggcaaccccgagaccagcggagatggcagtggcccaggtgacagagcaagaccctgtctcaaaaaacaacaaaaaaagtaccagccgcatggagactatctgctgcttgcatcttctctaaataattacggggatgaggagtccagtgatgttcctggtctctccccagaagtacagacaggttgggccacgttaacactggacttgatcatgattccaggagttttattctcaggacaggtgagaaagcctgggggtgaacacgccctgaggagtcagggaagccagagccagcggctgaagggcccttgcgtgcggctgcagcacaactgcaggttctcagagaaaaatctccagctcagacccggttctgcacaaagctcagaatggagcggccagcagggcatgtggctagaggaaggacatggccacccacccctccctcctcgtgtgccagagtatggtgtttgcgaaaacttgcggaagctggagatcacaggcgtgtcttgtcgggacgtctatgcgaagcgtataaaccctcgcgtgaagtcgggacgttttgtgaaaattctccctgattatgagcacatggcgtacagagacgtttacacctgccgtatgtacctcctgcgagctttggcttctgcggcagccagcacggccaagaactgcatggggagggccctctga

SEQ ID NO: 117038 - DNA, 1100 bp, Homo sapiens
tcaagaccttttaaaaatggaactgtcggctgcggctggaaggcgcaggcaggcgccctggagagaattcacagggaggcacaggacagaacgctcccaggaacgaggaagcacccccagaaaggagcgctctatgggctccaggcagccgaggaaacgcgaacgtgagccccgtgactgcactcccacgtgcaccaacgctgccagtgtgagcagaagcggagcccgcagagcgccaggctgcgccgggagatgcatcacgatgaaaaactgcgccagagcatggcgggaactttccgagagggcgtgttgtttccaggcggttccaccttctaatatgaaacagtcttggttgattttccttgatactactttatgctcggcctggttgttggcaagtagctgcccgcgtctgtacgcgcccttgattagtttccactgcatgtgttttaacacagtcctcctttttccacgtttatttgggccaaccctgtctgcaaagatccagtttaataacagatttgagtctaacgtgctatagccctggaaatgtactaaagacactacaacatattggctggaaagaatagaaatctttaattcctgaatgcaaagcggacacacacacacacatacacacacactgtgcggtcctccttaaggggacgaagggagtgctcatactgagcttccctcttggagaacgcacacagcacaacctccgatgggttttcctctcctgggggcagcgcactgccctgcgttgttggagatgctgtcacagttggttctggatgtgccactgaaatgccaccataccaagggctgaaactgtcaccagcaatgttgacacagctgcacagcttccattggcagaacttgaatggtgtctgggtgacagcagctctgagccagcccggtgctaggtgatgggcaactgcagtgcccatgccacaggctgggtcagattttcttgtggggacgcggtcatggggatgttgcttgtccagcttagctcccatgtgtcctggatgatggaggtgatgtgtgccttctagaccggggttgagtcctaattgctctaagtcagccatggccat

SEQ ID NO: 117039 - DNA, 367 bp, Homo sapiens
cgtgatcatttcttcttctcctgctgttttactttttgcttctatgtcccctgcttcattgcatctaataaagcagccatttgaggccaacaaagccattttccccttctttgtgtggagctcccagggtaaaaagaccattgtcgagtgcatgtatataggttccctcatccatttcaatggctatggttccaacatatcaaactgggtttcttcatcttcttctctttttctcttcttctctttgctctttttcttcttactcttcgtcttggttcccttgagcacaagcttggtagacttcgcataagattactcggccatggctccgggacacttctgcgcagagaggctgaagccggcgtaa

SEQ ID NO: 117040 - DNA, 395 bp, Homo sapiens
attgcatctgaacgccaacaacaagttcatctgaatttatactaagatattttccatagccaggtttcagggcgattcaacatatcaagctgggtttcttcatcttctctttttctcttcttatctttgctctttttcttcttactgccatttattctggcatcttcatgaggccagactcctcgagagggttctcaagggcagtggcttcagctcactccttgatactttctttccatctcgcctaacaatatcaaaacttctgtttatcacggaggccaggaggaaagctcaatatttgcatgtacagtcaacctcaggcaaatctcggttcccttgagcacaagcttggtagacttcacataagaatactaggccatggctccgggagactt

SEQ ID NO: 117041 - DNA, 407 bp, Homo sapiens
cctcaacatatcaagctgggtttcttcatcttctctttttctcttcttatctttgctctttttcttcttactgccatttattctggcatcttcatgaggccagactcctcgagagggttctcaagggcagtggcttcagctcactccttgatactttctttccatctcgcctaacaatatcaaaacttctgtttatcacggaggccaggaggaaagctcaatatttgcatgtacagtcaccctcaggcaaatctcggttcccttgagcacaagcttggtagacttcacataagaatactaggccatggctccgggagacttctgcgcggagaggctgaagccggctcaggaagagtatgtgacctggagcagcaccagggcggggaggaacagaagtggaggcgaag

SEQ ID NO: 117042 - DNA, 707 bp, Homo sapiens
agcaaatctgggtcagactggatgcaacctgtgattcccaacagagacaaacaaagcaaggttcaggatgctcagtactgcgatgaaatgccaagacacagaaaagccatgtgtcaagaagggtcgtccgcgcgggaggctgcccctctctgcacaggcgccaggaaccgcggtccagcctccgtccagcccagacagggtcagggcgaaacctgggaggccgcgaaacctgggaggccacgaagcctgctctccgcaccacggcttccaccggattcgcgggggtggagtgcatccgaaaagaactgaggaggctcccgctggagctgcaggacccagctcttcgccttggttcccttgagcacaagcttggtagacttcacataagagtactaggccatggctccgggagacttctgtgcggagaggctgaagccggctcaggacgagtgtgtgacctggagcagcaccagggcggggaggaaaagaagtggaggcaaagtaaacactccctgacagcggagctaccgcggccgcagagggccgaaaggtgtccgcacgcatctgctccctcgtttcctctcgaggagcccctgaggatttgtgcctcccagaagtggggaaagctcgcccaaggcgccggtgctgacggtggcgggactgccgggctcgctgtggaaccgcctcccgctagagctgcgggctga

SEQ ID NO: 117043 - DNA, 1086 bp, Homo sapiens
cccgtgtcgacccacgcgctccgggaaatctcgggcattcaccgtttgggtgaagacggaggcgggttctggacagacgtaggctgtcagcggagtgtttacttcgccttctacttctgttcctccccgccctggtgctgctccaggtcacatactcttcctgagccggcttcagcctctccgcgcagaagtctcccggagccatggcctagtattcttatgtgaagtctaccaagcttgtgctcaagggaaccgaggtgaagagctgggtcctgcagctccggcgggagcctcctcagttcttttcggacgcactccaccccccctcgaatccggtggaagccgtggcgcggagagccggctttgtggcctcccaggctttgccctggcccctgtccgggctggactgaggccggaccgcggttcctgggcgcctgtgcagagaggggcagcctcctgcgcgggacgaccctgggaaacaggattagacgggcgggtgacccgttgaccccgtaacccacgaattttggggttcctttgaaggcatctctgcaggcctctgcctgatttgcctgaggttgtttgtacatgcaaatattgagctttcctcctggcctccgtgataaacagaagttttgatattgttaggcgagatggaaagaaagtatcaaggagtgagctgaaagccactgcccttgagaaccctctcgaggagtctggcctcatgaagatgccagaataaacggcagtaagaagaaaaagagcaaagagaagaagagaaaaagagaagaagatgaagaaacccagcttgatattgttggaatctggtggacagtaacaaactttggtgaaatttcaggaaccatagccattgaaatggataagggaacctatatacatgcactcgacaatggtctttttaccctgggagctccacacaaagaagttgatgagggccctagtcctccagagcagtttacggctgtcaaattatctgattccagaatcgccctgaagtctggctatggaaaatatcttggtataaattcagatggacttggtggtgggcgttcagatgcaattggg

SEQ ID NO: 117044 - DNA, 746 bp, Homo sapiens
agcaccgacagccctgctctggaagcgcgggtctgcttagatgtcctaagcaacttcttgcaccaggcgccgccaatgaggagttcggtggatttctaaccaagtcccatttcaccgagagcggagtcccgcggggaccaggaggttccttctcgctccgggagagggcgctcctgcccggcgtttgtagcggcggcttcctggctgcttcccagcgtggatttgcacccggtcgatttcctgcgggcactctgtctcaacggcatcctttccatgagcccgcagatttaccctatgtcacaaacccgtgcaatgtcacactctctgtcacacactcatgcaatgtcagaccctctgtcacacacccaggcaatgtcgaccccaattctccagcttttctacttaatgccttgggccaaattagcaacgtgcacatcattttatacgttgcacatggtgacgtcatcatcatgagtggtgcaaagtggaaagaagtatacaggctgaatcacaatagagccatgaccgccgctattctccagataggaacctggtgtcaagatacaaatacgtgtgctgacgctgcgagtgtggtgtttaaagtgcactcgcgtacgcgcaggttcctgccgacccggaagcggatctcgcggggctactggcgctctcggcccacacaatatgacctcggggaggatgcgaggaagatgaactgtgatgatccacttcttcttaatgaatggtaa

SEQ ID NO: 117045 - DNA, 1010 bp, Homo sapiens
tttaaataagggcatgaaagctgacactcaggagggggttacctgtgggaggggcaaatggctgaagccccagaggcagctgttccggctttgggagaatgggtggatacctgagacaggcaggggcacgccaccgtccactctgtctttctcttttgccactgatacatacgttacacatactactttatactaagtactgcttaaagtgtttcaataaattaaaaaactttggtctcttggctgaaaatgggatgaatgcagggtggtgagatctgagcagccagtcccttagggagacacccaagccgagagagaacatcggcagaagagatggagagcaaggtgagattcaagatgcttttgggccaaagtcaattggctgcctgcttagacagattaccggacaaaagagagggaagaatagaagaatggtcacaggtttcaagcatgagaggccctgcaagatggggccacaaataaggaggaaggactggaagaagaacaggtttgagaagcagggcaagtttgacgtgactattagacatgcgtctggagaaatcaagcagcttccgtacttgcgcagaactcccctcgcggcgaccacgcactacgggttggcgccagagtcaaaaggcgtcggccctctggcaagatggctgctgcggaggcgttggagcgcggaaatctggaaccgggatggcgacgtctacactgagtcggaggcgaagtattttaaacaattagagatgttggaaagagattataccactaaatcagaaagcactgaatattttgccgagacctggacgctgcccggtggcctcggcgggggccctgtccttggccgctgcctctctgaatcccaggtgagaagaataaaacgtcctgacgctgtccggcttccggttcttggagaggacgggccgtctctgccgagagaactgtgcggaatcaggaagcgctggtgctccttcgctttcacgggactaagcgaaatccggctttaa

SEQ ID NO: 117046 - DNA, 258 bp, Homo sapiens
atggagttacctgcttttgggctgagagtaagaagtgaggtggcagaactggagcttgaggagaatgaaaaaccttcagtagagtacctgagaggagtggcccgggaagctgcccatcaacaagtagagggatctccaggtagcaccaagggtccagctgagagtgtgaccaagaattttagtgtcattaattgtgtggagttttctccagaagcctttaggctttatcctttattaagcacttacgattgtgcttag

SEQ ID NO: 117047 - DNA, 282 bp, Homo sapiens
atggagatgcaagattacctaaggctgtttgaggggctccctggagaggtgtgggaccctgtgcaaaatcagatctgcatgagatctcagggcctgagagtagagtacaacacacccctcagttcacgagaagaagaagaagaagaagaagaagaagaagaagaagaagaagaagaagaagaagaagaagaagaagaagaagaagaagaagaagaagaagaaagaaagaaagaatgctctaaggcccaatgtaaacatttccccctctcagaagttctctag

SEQ ID NO: 117048 - DNA, 767 bp, Homo sapiens
tgacagaagaagaagaagaagaagaagaagaagaagaagaagaagaagaagaagaagaagaagaagaagaagaagaagaaggagaagaagaagaaagaggaggaggaggaggcaaacctctgaacctcttttttacagatgagcacacgttacccattatttcagtgtcaggacatgtctccgtgtactgtattccctatgtaagaggcaatctggacctaaaagagtgtccaagagataagctagaagtagatctgcagatagtggttaagaaaagttttgcccttctcctgattacactctcttacccaacaaacctgtcagaaagccagcccgttggaaactccatgggctatgagattcagctgctcctccaagcaactttcaacattaaagaagagaagaaagccacattgactgagcctaaaacacaatgttggattaacatttataggggagggggtctctcaagtcagtgtaaaaacgacacttcccctaagaaggttcagagtcttcctttctcagcagtgaggaggtctagacgtcagcagttttggaacattgctgctgccaaagagtctatttgggattgtagagaacaattcgagagagtgattgaaagaggggatgagaaggcactcactaatggtgggggatttgctgcagggggtccaggggtgaatggtcctgctgggagtttgtttgccattacaaaacctggactgtttgttgagcacggaggaggtgatgattttggggggtcctga

SEQ ID NO: 117049 - DNA, 159 bp, Homo sapiens
atgaaggaagaaaggaggaggaggagagaagaagaaggagaaggagaagaagaagaagaagaagaagaagaagaagaagaagaagaagaagaagaagaagaagaagaagttgttttactcacaccagggacaggtgcagaggacttcaagaaacactga

SEQ ID NO: 117050 - DNA, 318 bp, Homo sapiens
atgggccccatccacaagatatctcattatgtatatgcaaatatttcaaaatccgaaaaggtcttaaagtcagaacacttccgctctcaggcatttcagcctgggcaacagagtgagaccgtctcggaaaaaaagaagaagacgaggaagaagaggaagaagaggaagaagaagaggaagaagaagaagaagaagaagaagaagaagaagaagaagaagaagaagaagaagaagaagaagaagaagaagaaatctgaatgtctttactcagggttatatagtcattataaacagaagctctataaccagactatttaa

SEQ ID NO: 117051 - DNA, 688 bp, Homo sapiens
aagccaaagaagaagaagaggaagaggaaagaagaagaagaggaagaggaagaagaagaagaagaagaagaagaagaagaagaagaagaagaagaagaagaagaagaagaaaagaagaagaagaagaagaggaagaagaagaagaatgcagcagtaggttgtttacagatcatgcaagcaatatgtacggggcaggctcgagcattgatctgcatggggggcaattttgcgctggcaatgccagatcgggaagcgagcgctgtaccgttaacgcaattagatttggcggtacacgtagccactaagcttaaccgctctcatctgttgaccgcacggcatagctatattctgccggtcctgggacgtagcgagattgacatgcaaaaaaacggtgcgcaggcggtaaccgttgaggattcaatgtcgatgattcatgcctcgcgtggcgtgttaaaacccgccggtgtaatgctgaaatcagagtgtgcagtggtcgcgggaatcgcgcaggcagcactaccccagagcgtggtagcctgggagtatctggtggaagattatgatcgcattcgcaatgacattgaagctgtgctgccagagttcgccgactataaccagcgcatccgtcatcccggtggttttcacctgataaatgcagctgctgaaaggcgctggatgacgccgtcag

SEQ ID NO: 117052 - DNA, 435 bp, Homo sapiens
atgggagaaattggccaaaacaaaggggctacaggcctcatccagatccaaaatccaataaagcagtcaaatcttaaagttctgaaatcatcattttggctccatgtctcacatccaggtcatgtgaatgcaagagggcatgctgatgcaagaggtgggctcccaaggctttggcagctctgttcctttggctctgcagagtacagtctctttggtgctttcactggctggtgtttagtgcctgtggcttttccaggaagaagaagaagaagaagaagaagaagaagaagaagattaagaagaagaagaagaagaaaagaagaagaagaagaagaagaagaagaagaagaagaagaagaagaagaagaagaagaagaagaagaagaagaagaagaagaagaaaaaatcttcctgggtcacagagttggcatatga

SEQ ID NO: 117053 - DNA, 1294 bp, Homo sapiens
aataataaggagggcggtcttccgttggttttggggttaaaggagttggggccttaatatgattagaccccaaaatactaaggactctaattctaattgtttggagaagactgatagcccttggtgtgaactgtttaaagagttatacaaaataaatgcctttgacactcctgattcattgctcatgagaggcaacgagtttagtgaccctatacatcatacctttgaccatatgtggagaactaaggaacataatgaagctggttggttgctcctaagttcagtggataaagtgatgaaagaaaatgatgaactcggggattctatctcccagcttcagaagcagatactgagcctcaaatctgccaagattgccctgagtgagagtctaatctcctgtagagaaagaactgaaattgtggaaaaatagacataagctcttatggcactgattagaaaagaatgggaccctgcaactggaatggggacatgtgggaggatcatgatgaagctggggacactgagtatgtcaactctgatgagtctttttgccagaaggaacagcttccctatccccagtagtggcaacatcccctccctgacccatgctgccatcagcctttccaactttcaggaaataaaccctgtgctgcctgaggcaacagtgatggcctcccctgaggtagttgccaggcaaaataatgttgattctcctcaggagccaccaccaacacccccatttgcttctagacctataactagactaaagtcctggtgggcccctagagatctaacagtggaaaccacagtcactcaactacacaacttaaatacagtgggaataattgagtcgcgaggtggcaggggccatgtggcagcactcaacagtcaaaggcaaggtgaatcacagcagaggcttctgggattttggagcaaggccctgccattttctgcagataactactcttcttttgagagacagctcttggcctgttactgggctttggtggaaactgaacatttaactatgggtcatcaagtcaccatgcagtctgaactgcctatcatgaactgggtgatttctgacccatctagccataaacacacaatgcttctgccgaaactaccatcagtggactcacagaatgccttatccaccgtcatggtattccacacagcattgcctctgaccaaggcactcactttatggctaaagaagtgtggcagtgggctcatgctcatggaattcactggtgttaccttgttccccatcatcctgaagcagctggattga

SEQ ID NO: 117054 - DNA, 495 bp, Homo sapiens
atggctgggaagcaaggtagatccgaaggtgctagcagctggaggttgtcatctgtcttgcagctgaacagccaatactttctccaaggtgcacagcagtgcaccttcctagcggccacagcatggaaaaaaagaaaagaagaagaagaagaagaagaagaagaagaagaagaagaagaagaagaagaagaagaagaagaagaagaagaagaagaagaagaagaagaagaagaagaagaagaagaagaagaagaagaagaagaagaagaagaagaagaagaagaagaagaagaagaaggagaaccctttctcttgcttttagtaaatggggtcttaattcctggtgtgagatcttgtcttgactctacctcgcaattcagcttgacagggatgcttcttcaagagaaatcagaaatatttggtctagcggtatgtagtccactcatcaaacggaaaggaggacatattccagtactcaacactgtccctggatga

SEQ ID NO: 117055 - DNA, 1416 bp, Homo sapiens
atgattattattaaaactcaaaaactaacagatgctgccaaggttgtggagaaaaagaaacacttatacactgttgttgggaggccaaatggttacaaataccaagaagaagaaggagaagaagaggaagaagaggaggaagaggaagaagaagaagaagaagaagaagaagaagaagaagaagaagaagaagaagaagaagaagaagaagaagaagaagaaaaagaagaagaggaagaagaggaagaagcagaagaaaagaagaagaagaaggaggaggaggaggagaggaagaagaaggaggaggaggagggggaaggggaagaaacagggaacaaggaattacagagtagagacagggatgatctaggtggagaagaaaaagtccagccagtttggccttatggaggacaattctcatatgaaaatctcaagccatgctctttgcaaattgtctgcacatttgtcatagctcacattctccctctgccaatcctgtttcttcccattcttttcacagcacgctcagatgtttttcatgtaaaacattgcaaccctgtctgctttgttgtattggtcaaatttgactcatccgttaaatcaagagttagaaatgggagacttcctcttgatgttgcagaagtgaacactccacatgaaagcaggactgcaatggactcttgcagacagcctattgtgggacctagtgattgtcttcagaagcagacactgagcctcaaatctgctaagattgccctgagtgagagtcttatctcctgtagagaaagagctgaaactgtgaaaaaacagacaagctcttatcatacgagtgagtggtgtacctgcaaggaaagatgcatgcacagccttgccaggagacggctctgcaacgggtacaggctgctgtgcaagctgctcccgcttgggccatatgacccagatccagcagatccaatggagcttgaggtgtcagtggaagatagggatgctgtttggagcctttggcaggcccccaaagccacccctgtcatcgcccaatgggcccatgaaaaacgtggccgtggtggcagagatggaggttacacatgggctcagcaacatgaacttccattcacaaaggctgacctggctatggcccctgctgagtgcccaatttgccagcaggagagaccaacactgagccctcgatatagcaccattccttggggtgatcagcaagccacctggtggcaggttgatcatattcaacttcttccatcatggaaagggcagagccttgtcctcactgaaatagactcttactctggatatgggtttgcctgtactgcatgcaatgcttctgccaagactgccattggtggactcatggaatgccttatccatacaatattgcctctgaccaaggcactcacttaa

SEQ ID NO: 117056 - DNA, 432 bp, Homo sapiens
atggggccccaaagtgtctatgaattgaccgaaaatgaggaggaaaatgttgacgtcatccaattagcagagattaaccagattaggttttctggcacttggcagaatgatcaagccacttacgagcagcatgctgaagaaagaggaccacaaggtcagtgccaagcgctaagcacaaggagaaatgctggtgccacatggaagccagtggcattgcattcgcaagcacagaccaatcggctctctgtaaaatggaccaatcagcaggatgtaggtggggccagatacgagagaaaaagcaggctgcccgagccagcagtggtaaccctctggggtccccttctacgctgtggaagctttgttctttcactctttgcaataaatcttgctgctgctcgctctttggggccacactgcctttatgagctgtaa

SEQ ID NO: 117057 - DNA, 378 bp, Homo sapiens
atggagccagattgccagggttcgagtcccgtacttggctgtgtgaccttggatcaagccacttacgagcagcatgctgaagaaagaggaccacaaggtcagtgccaagcgctaagcacaaggagaaatgctggtgccacatggaagccagtggcattgcattcgcaagcacagatgccaaattctgtgctgctgctacaatccattgagactttaacacccacatggaatacgcaattgggagagagtgaaggagtactgaaggcaaactcaggggctacacttcacaaaaataggagatttggaatttacaaagaagaagaggagaaagaggaggaggaggggaaggaggaagaaaaagaagaggaaaaagagtaa

SEQ ID NO: 117058 - DNA, 727 bp, Homo sapiens
atggagggaagacattcccgaccctacctcacagaggactgtgcagaaatctgccagctaactcagacagcagtcacagattcctgtacagaagagaaagagagtcatcaaatccaaataacttcaagccagctcccaaagcaagcctggcaaattgctcagctgacagcagcatcgtgtcaactgaactctttcttgactgcaatgccatgggctcagtggattgggcctgtgcgggaagaacccatcaggcagttacgaggacatccaactggcctggccaatgctgccagcctgacaatgagcccggatttgcacggccagcccggatttgcaggtctctccagcgcggccgcttgtggtctggcagtgggctatcatccgcgcctcccctccacacgccaggatgggcttgcttcccatctgccaggcaactcagggtccgcagctctgtgtggcaagcccatcagataaagagggattcctgctcttgtttgggaaagaaatagccagactcacaaacaagggaggggcaaggttatataaatgtgatattgttcaaggagtgtgctgtgaagatcccctagctaccttagactgggaactaagaccagatttggagcaaggagagaggcccaccccagagagacacaagccttttttgcttgggaagagtttctcagcaccactgattaaaatttgccgttatgaatggcaaatgttctag

SEQ ID NO: 117059 - DNA, 474 bp, Homo sapiens
atgcatgataagtgcttaattaagatggaattaaatttgagggttgaagaaatggacagaaacgttccgactgactgcaatcaggttcggtactctccaagttttaggcatccactggggttttcagaattcatccccagcggatgtgggggacacttgaatgtccctcggttcatcacagtgattaaaagtagcagccagcatgctacctggatcctcaaagctcagcccatcatgtccttcaggtcttggtctaaatgccaacttttcaccccaattcaacaatgtcctcggctttgcaaacaagctgttaacagtgaaaatggtactgcctctgacctgctgaagcagaataaacaagacactgaaaccactgaggttgaaaattctgctgttcagacaggaagtcgtcatataccacacactgcacaatacgagaatgctgggatagaagaacaagttgcagaggattag

SEQ ID NO: 117060 - DNA, 633 bp, Homo sapiens
atggtggcccggaacctgcgcttgagagcaagactgcctaagtttaaaacttgctctactgtggctgctcctgcaggcctcttatttggtgcctccacatcttcagctgaaaatgagaacagggcgtcgcaggtagtatgtagtcaaaacacttccagtatgatgtacacagcacgctgcccggagaagcccgcaggcatcagatcccagtgccttctgctcaaccctggagccctgtggacggggaaaaacgatctgcttctcataaagattcagcccgtctctgacccgccggtgaagcggcttcccgtcacctgtttccatctcccattcgcacagcaggtgattccacttccagaacttccgaagcacagcctacacagccacacgcagatgcgtgtgcaaaccagtacttctgcacacatgaatgcctgcacaggcttccctcagtctgtcccctacccggtcctcccacgctgttggaggagccgcttcccactctgtccttcgatggacacgctgatgcagctgggaatgagcttggaaacgctaactgaccagagtgatttctgggccctgagtgcattacagatggagaaagcttctgaattctctatggaactccaggcctga

SEQ ID NO: 117061 - DNA, 516 bp, Homo sapiens
gtaatgcttatctgcaatcttggcacgagggcgaagctgtcactgaaatgaacttgatcttgatctgctttgatatggggacagaatccccgactgcactattgagggagtttcagaagagaaggaagaggtgctggaaggatgcttttgcagttatgcagcaaggaaacgaccagggctgtgaagatctacagaggaagtactccagtgtgggggaggcaagggaagaggacgaaaatgatgagaatgacactgaggtcattgtttagagcagatctcaagcagccgtttggccacgccatatcctttgtggagcatagtgggttatctatctgtctgtctgtctatgtatctgactatctatctatatatatattcagcttctttactgctacctacacatttttctccaaattttattaatttcatagtgttttgatttgggtggcagatgacttttaagcagtgggtgtttgccggccagatctttcctggcatgcggactgtgaggcaaag

SEQ ID NO: 117062 - DNA, 565 bp, Homo sapiens
tcatcttggaaatgttgagttttgggcccctgtagaagacccagctgagatttgcaggtctgcatcaaatggagaattcatcagagaggcaatggtactcaaaaccatgacagtgaaaggtgcttccctggtcagtttctgccacgggcctgtttatagggcacgggtttaaatagctgtctcccccctgcctgcactgccagattcccacgagggccagagatcatgtccggctggtcgatcatcctctccctaggaaaaggctctgcaaagttttcctgtaaagggccacacaggaaatatttcaggccttttgggctgtgccatctctgttgctattcaactgcctttgtagcgtgaaagctgccttgatgatatgtaaacagatgggtgtggctgtgttccaataatactttatttatggatgcagaaatttgaatttcccatcattttcatgtgttgaagaatagtattcttgtgatcctttttccccaaccatttaaaattgcaagagccattttagcctgtgagccataccctcgtgccaagctaagcgtagagatgt

SEQ ID NO: 117063 - DNA, 346 bp, Homo sapiens
  misc_feature (1)...(346): n = a,t,c or g
ccacgtaaggccctgagtaggctccttagttgctgctttacctgatgagggccaaagagattaactctgcctcgttgccatgtctcagaaaagttgccatatttnacccagaaggggcttgttttcctcttactcttactttaaccatgtgcctggaggagccattctgggctcttgcacttgcccagcctttctttgccaggggcagagaagggaaagggggtagattgagtgtgccaagggccgtgcaaaggctttgtnataaagtcatctccagttaggatctgcacctgttttccttncgtaatagtgcctggcggccttttctnaagttacaggtggttgg

SEQ ID NO: 117064 - DNA, 369 bp, Homo sapiens
atgtatgaagagactgcttacggaactcaaagactaaacgtgaatactactgtggcccagacacggatcgaaaacacttctcccagtgcttctggtgctatgtctgctctcccgagagcgtccagcaaggtcttccagcagacaggcctgagtgagaagcagttggcccttggggagcggggagatgatggacgctgtcaccggccagaaaaccagttgccccttgggatcggggagatgatgaacgctgtcaccgtcagaagggagcccaagtggcccgtcaagccacaagaatgggcatataagggagcagctggaggggcctcggagagcagccaggctagtctggggatggaccacctgctctga

SEQ ID NO: 117065 - DNA, 2806 bp, Homo sapiens
ttgggtccttctgctcatgcattcagttcaagtgtcctttatcccaggttcagagatgctgcctttctgaagaagacatctgaccctagcaggttggccagtgttattgaacaacaaaaatgggataaattgctttcatgattagctcaccttcttctggttttagcccttctgttctctgtacacgtgaacattcatgacatcaccttctggcttggttgcctctgaaaggaggggaaagtctcttggtaaacctatctcttttgggcggtttgctgtttctttgctgccgcctttgcaggtctcctctcactggttgcaggctttcatagcaaggtttggcgagaaatgttccaaacatctcattttggattctaggctgccacccctcattctgtgaaacgtattagcatgtgttcgccccaagatgactattccttgtgagccagttaatgatgatattctacgcccttcccttctaagctgtagttcaggaatccagcccacatagacagactcttgctttccatggtgtagtcaatgccaagtgatgcatctaggcaggaaaatctactctttgcttttttgggggcaattagtacatttgtgaagtgcagcatccaagaaacagcctgttttttcatcccttgagaaaggagcagtcattgcagcttttctgtccttgtcggcctgcagttcctggggaaaagagtacatctgagctacttgtccaagcctctgtctgcaggtgacaggttttggggggaaatgagatgcattaagtagaacatcatctcgggtcagacattgccccttttgtttgccaatgccccagtcctagagacttgtcctgacagtgccgcacacctacttttgatctctcagagcaggtggctccatccccagactagcctggctgctctccgaggcccctccacctgctccccttattgccccattcttgtggcttgccgggccacttggcctcccttcttgccggtgacagcgttccatcatctccccggctccccaagggccaactgcttctcactcaggctggtgtcatttcaggaggaccaaagcctgcgtgagcttttttatttttcagtaaaatggtgcttttttccttacttcgagatactatatataaataataatgtaaatggacaccttttcgtacggagctgttttgagtattgctttacagagctcactaaatcagcttcaacaatcttgagctctgtggctcctcaccctgtctgcatggaaggaccttgctggacgctctcgggagagcaggacatagcaccagaagccactgggagaagtgttttcgatccgtgtctggggcacagtagtattcactgtttagtctttgagttccgtaagcagtctcttcatacatttcttacagtctgggagtgtactgactaaatctgtgtaagcaaattgaaatactctttcttttagggtaggcgtcacagtgggttttttttttcctcagggataatttctattacaatttccttactgtcagaggggaccagatctttccctcactgtgggcagggggccgtgcagggtgggataaagggaagagctgggtttcccggagagtgactgttaacagcgttgactcgaagctaggagatggaggggggtggccgtctcttaggacattgggcacctctcagagcctcctgaggggcttctttgtcttctagaatctctaccggtggtcctcctgcaggttctggctcacagacatcatcatgccttttttttccctccctgaggcgccttggcagaagagcgtgaccctgtgagccaggccccccttagctctgcttcagatcacagaacacagacagactcgcgagttgctggacctctttcggtattaagtgtttgaatccatggtgggccttttgcaagtagcgttagctctttttaaatgttgaactgagctaaggatgcactttcttgtggacatagaaggggcccacgtaaggccctgagtaggctccttagttgctgctttacctgatgagggccaaagagattaactctgcctcgttgccatgtctcaggaaaagttgccatattttcacccaggaaggggcttgttttcctctttacttctttactttaaccatgtgcctgggaaggagccattctggggctctttgcacttgccccagccttttcttttgccaggggcagagaaggaatgggaaaggggggtaggattgagtgttgcccaagggccgttgcaaggggcaggcttgcttttccacccatctgctgaggggagccctctcgctctcgctccttgcctctgttcacacctgttgtcttggaagaggatggtcccttttgtcttaaagctttgtgataaaagtcatctccaggttaggttctgcacctgtttccttcgtaatagtgcctggggggcctttcttgaagttacaggtggttggggagccctcttcgcatgcagaacatctggtagattgatctgccaggctgggtggttctactgctttctcaatttctaagaaccttttttttttcttaaagagttctgctgaattatttgacaatatttgtaagtaccatggttcccttgtgggggatgctctgttctggtttctgttttcaaatcaaatgcctgtttgggaggagatgaacgtatttagtctattagatttgcactgctggattttttttttttaaagtgtaaccttgaatagctgtcttattgtttatcctgtaagattagtcaatcgattaaagtttgataatt

SEQ ID NO: 117066 - DNA, 551 bp, Homo sapiens
ggccccagtcacttaggctcaggccacatgttctgaccgggggttttattgttagttccatttcaaagcctttgcaatggtatttggttctgttaagcatgatcagcagtcttggagctggcgaggtctatatcccttactcagtgcagttctcaaagtcctttgtatgtcgtacaggatcacatctgtacatacacaccttgtggggtaagcccagaagctcatacacagcttcatgggtttactttcccaagcacttcctccctccctgcaatctccccagcactttctgcttccctcagcttccccttttcaaccttgtaggccatggaaggtgttgctgtcgctttaggtgactcttctctgccacacgcttcctgtggcctttgccttcctctggtgtgattcggcaggaagaccaaagaggggaaaaagaagtcacggggacccctttgggaccctacaatcagagaggaaggttactttccttcagagctttaatcactgaaaggcctggcggctgcactggtcactgtcactgcctctgttaa

SEQ ID NO: 117067 - DNA, 478 bp, Homo sapiens; identical to SEQ ID NO: 115024

SEQ ID NO: 117068 - DNA, 1191 bp, Homo sapiens
acagtttgcccagcagcaattaaggtgaggctgtgatgatgccaaaaatgactggctgtttgctgccttatcactgcctgatgtggatatggagctgggcagagctgctcagcctctgcaaggcaattcagtggccctgggtggcacagcatgggctctgccatctgcttggaagccctctgtaagttcccacagcaccttcacctataccccgactagtacgctcttcaacctttgcagtcactttgcacaacaggtacggttttcggatggcagcttcagcatctcactccctggtccttttccagggacctcgatgcctgaactttcatcagggccaactcatgcaccagggacaggagggacagtcgggtctggcactgatcactcaccaatcgtggagacagcagtgaagaaacaggtcagctacattacccccggagatgccatcgcctggtgctgatttgaaaagagccagattatctactcacttgttctcatgaaggcattatgggaagttaaaggtaaccttcccaggtaaaggtaacggccgtgctcctggagggagaaatttgatgagcgaatgagcttgcaggctggaggcccgagagccagtactcgcctatccctggctgatgcgtttggggctgggggtaggatggtatccacagggctgttgtgcacaactgcagggggcgccagtcatccagaactcacagtgaaaggccccctggagcaccagacacattgtactctctgtgagtgatgcgcaaaaggagcccctgctggtgagattttcggcatctctcctgagtctctcgagaagctactcttcagggaaatgagacctacgtccttggtattgcctctatctgctggggttaccacagagaagagggttatcagcaaacaaaggtcagcaggacccatgagggcaggaccgtgtctgcttttgatcaatcaagtgctggatattccatgggctctcaatcgataccgtaaggtgaacgaaggagaagggacaatggcaggggatgtcagggaactttccacaggtagatgatgtacattctggcagctcaaggtcctcttttcaggtggtcaccctcagacatcaactgttaaggccttttcaatgtcagccaagtggtgcctgctcctgtcatccagtctccactgagccctcccatg

SEQ ID NO: 117069 - DNA, 375 bp, Homo sapiens
gtttttgcagcccacatgaaggtaaacattgaagaggaagggtgccccaagcaggagaagcagcttgaacaaaggcaggaccgtgcaagccaaatccaaggaattgctgcaggtcattcaatttggctgcagcaaggggttcctcatgtgggagactttttcagaaatgatcctggtggaagtacaattcaattcctgaagagccttggatgtaacagcaagcagtttggactctttcctgagggtgatagcagtgaaagaatgcaaaacgggatttttacccaaatttgtagattagaggggaaagatcccagatcccaagtaatgaggagctgcaatgatccatctgagtgctgaccagtggcctgaattaag

SEQ ID NO: 117070 - DNA, 541 bp, Homo sapiens
aatttgtcaatgcagttacccagccctgagccggttaatgtttgtgacaagctcctcttcctctgcagccttgctttggtggctggaggatgagtccttctaatggtcaggtggactttccctgggctgggccatctgctgccacccgtgttgaactgggaaggactgggagacacctaaagactgattacaaaggattctctggaatggtccaggtctacagtgacctcatggagtgatgggaacccactactgtgcatctggctacaaaagctacctgcagaaaactgtcttcatcccagctggttccaaaatgctcccctgcgaacactggcagcagaaccggactcaactagagcaggggccgcctctgcagcccagcgaggatgaagccagggctggtgtctttggaaagctcctgtcacctgaactgcccggcactgggagccatcgctgtacctcacggcgcccgcgagacgggtggtccagtgccctttccacggccgcccgcggcttggatggcagtgtgaatggtgcttga

SEQ ID NO: 117071 - DNA, 345 bp, Homo sapiens
gcattcacaggactaagctaatcagaagtcaaacctagggatgcatccaaaatggagttgctcttgtctctacagctaggatttagaacctggacctggacgcctcactgcttcctgcttccttagtgccttggggcctggagtcagaataatctagctcaaacttgggagtcaaatgctccagggtcttgaactggtcagagctctcaatgccgcaaagacactttcagaagaggaacgaaggcctggaaggaaaagcatcaggggaacgacgcttacgtctctcctcctccctccagtctcccaccagtgctcccattggctgaagccaaccagaagccacag

SEQ ID NO: 117072 - DNA, 2238 bp, Homo sapiens
atgagtttcctgtatgaattattaagacttttaaagtttgcgtttttaaagaagtttaaaggcatttatatgcagtatattgagtatggacagcagtctagagatcctcctgtgaaaatgcaaggctctatcacaacccctggaagtattgcactggctcaggcccaggctcaggcccaggttccagcaaaagctcctcttgctggtcaagttagcactatggtaaccacctcaacaactaccactgttgctaaaacggttacggtcaccaggccaactggagtcagctttaagaaagatgtgccaccttctattaatactacaaatatagatacgttgcttgtggccacagatcaaactgagagaattgtggagcccccagaaaatatccaggagaaaattgcttttattttcaataatctctcacagtcaaatatgacacaaaaggaggagctggtgaacaacacagagttggtgcagagctaccggcagcagattgggaacgtggtgaaccaggccaacctgcagctcttctggaacatgtacaacagccgcagagacctggacattaaccggcctggaacggtgcccaatgccaagacgctccgctgccccgtgatgctggtggttggggataatgcacccgctgaggacggggtggtggagtgcaactccaaactggacccgaccactacgaccttcctgaagatggcagactctggagggctgccccaggtcacacagccagggaagctgactgaagccttcaaatacttcctgcaaggcatgggctacatgccctcagccagcatgacccgcctggcacgctcccgcactgcatccctcaccagtgccagctcggtggatggcagccgcccacaggcctgcacccactcggagagcagcgaggggctgggccagttaaacttgaagtttgaaatcgaggttctctgcaagaaccttgcattagacatcaatgagctaaaacctggaaacctcctaaaggataaagatcgcctgaagaatttagatgagcaactctctgctccaaagaaagatgtcaagcagccagaagaactccctcccatcacaaccacaacaacttctactacaccagctaccaacagcacttgtacagccacggttccaccacagccacagtacagctaccacgacatcaatgtctattcccttgcgggcttggtaccacacattactctaaatccaacagcccatccacagttgaagcagtgtgtgcgtcaggcaattgaacgggctgtccaggagctggtccatcctgtggtggatcgatcaattaagattgccatgactacttgtgagcaaatagtcaggaaggattttgccctggattcggaggaatctcgaatgcgaatagcagctcatcacatgatgcgtaacttgacagctggaatggctatgattacatgcaggaaccttgctcatgagcatatctaccaacttaaaaaacagttttgcctcagcccttcgtactgcttccccactacaaagagaaatgatggatcaggcagctgctcaaatttaagctcaggacaattgttttcttctttcaaggttggtggtgtggacccaaagcagttggctgtttacgaagagtttgcacgcaatgttcctggcttcttacctacaaatgacttaagtcagcccacgggatttttagcccagcccatgaagcaagcttgggcaacagatgatgtagctcagatttatgataagtgtattacagaactggagcaacatctacatgccatcccaccaactttggccatgaaccctcaagctcaggctcttcgaagtctcttggaggttgtagttttatctcgaaactctcgggatgccatagctgctcttggattgctccaaaagtcaatggagaatggcttaaactacatggctgtggcatttgctatgcagttagtaaaaatcctgctggtggatgaaaggagtgttgctcatgttactgaggcagatctgttccacaccattgaaaccctcatgaggattaatgctcattccagaggcaatgctccagaaggaatggatataacaactaggcagaaggtcaacaagaaaagagaaggcttcaacgataccataaatcaaccagctacacctaatagacaatctatagaacacttgacccaacaagagcagaatatgcagtcttctcaaatgcacatggaacattctccagagtag

SEQ ID NO: 117073 - DNA, 579 bp, Homo sapiens
cggtacccaaaaagccccactcactacttcagttgcaccatgctgtacctttttgcagagggcaatacggaagccatccaagaacagatcacaagagttctcttggaacggttgattgtaaataggccacatccttggggtcttcttattacctcaattgagctgattaaaaacccagcgtttaagttctggaaccatgaatttgtacactgtgccccagaaatcgaaaagttattccagtcggtcgcacagtgctgcatgggacagaagcaggcccagcaagtaatggaagggacaggtgccagttagacgaaactgcatctctgttgtacgtgtcagtctagaggtctcactgcaccgagttcataaactgactgaagaatcctttcagctcttcctgactttcccagccctttggtttgtgggtatctgccccaactactgttgggatcagcctcctgtcttatgtgggcacgttccaaagtttaaatgcatttttttgactcttggccaaaatttagaagatgctgtgaatatcattttgaacttgtgtcaatacatgaaagagaaaaaaaaaaa

SEQ ID NO: 117074 - DNA, 835 bp, Homo sapiens
ggggcgtcgcagtttcctcaggggtaccagtttccctccatggagcagctggctgacatgctccccagcgtggtgcagcatgtcgggttcaaagtatgtgattggcatcggagtgggcgccggagcctatgtgctggccaagtttgcactcatcttccccgacctggtggaggggctggtgctggtgaacatcgaccccaatggcaaaggctggatagactgggctgccaccaagctctccggcctaactagcactttacccgacacggtgctctcccacctcttcagccaggaggagctggtgaacaacacagagttggtgcagagctaccggcagcagattgggaacgtggtgaaccaggccaacctgcagctcttctggaacatgtacaacagccgcagagacctggacattaaccggcctggaacggtgcccaatgccaagacgctccgctgccccgtgatgctggtggttggggataatgcacccgctgaggacggggtggtggagtgcaactccaaactggacccgaccactacaaccttcctgaagatggcagactctggagggctgccccaggtcacacagccagggaagctgactgaagccttcaaatacttcctgcaaggcatgggctacattgcgtacttgaaggaccgaaggctgagtggaggagcagtgccctcagccagcatgacccgcctggcacgctcccgcactgcatccctcaccagtgccagctcggtggatggcagccgcccacaggcctgcacccactcggagagcagcgaggggctgggccaggtcaaccacaccatggaggtgtcctgttga

SEQ ID NO: 117075 - DNA, 741 bp, Homo sapiens
atggatgccagccaaagatacaagattcctgggtcagagacaaaggacttcatcactcacagcaaaagcactagccagagctgcataggattgcttcggttctccgacatcacccaagtcccacaaagacaatgcaaagggcccatgatggagagtaacactgagcttggaacatttgccacttctctagcgagtggaaagaaacctggtcttttcctggtgggaggtgttactgcatctctcatggctgctcatggcaaatacagccctgcgaaacagcccggtgaggagcaagaaatgaaagccagcatctgcgtgtcacctgcagagcgccctgcagctggtcctctcatttgccctccaacagtgctgcaggctggtgtgaagagagtgacccgggaagctccaagacccagatttaaactcagttatgacgtttccatgagtgtcatgactgagcaagaaggtgaagagcccgcgcctgtttcctcatctgcggaacggagcgaacacgccacctacttcatgagacttaacagacgatggaagtggagcattcagcacagagcctggcacatgaactcttcctctgcacccccacccagccctagcaccgaatactccactcccttccagcagaccctccagcagggaccctgtggcattgcacaaatgctctctgacaaacacctacaagtccctggtgcctcagcctttggggcaaaacccaaccctgaataa

SEQ ID NO: 117076 - DNA, 1005 bp, Homo sapiens
atggccattggctgcccctcagggaaggcctcatcattggctgcacaaggctttagctttggtgccccaaagcctatcacgcagagatatggaggtaagaacacaccagatcagccagtaacagaggacaacatgctgctccccagccctgagcacgccagtcttcaggtcctgccagagcctctgtttcctaaactgaccaatggagacaaatacacctaccccaaaatacggctgtacggattcaacgaggtgaagtgcatgcaagggcttggcacacgaagcccagagagtgaggacagctgtgagcgacctccagtctgctggagtggagccagcattccacacacggcaacagccaaaaggaatttatgggaagagggagagcgggagctggaaccagtgggccgcaagactacctccaacaacttcacccacagccgagccaaactcaagtgcccctctcctgagagcccttacctctacaccctgcggaacagccgattgctcccagaccaggctgaagaagcccccgaggtgctctactgggctgtcccagtggcagcgggagtcggcccttgggagaacccggaggacctatacccagttccgtgttcttctgggcttcagtgtctgtttctatacaatgggaacagcatgcattcccctgctttttcctatagactggaaaacgtggtgaccaagtcacacatcccagcttatgctcccggcttaagacagtgtaacgacaaaggtaacccttacactcctggtttgagacagtataacgacaaaggagctgagtcgagagtaggagaaaaatgcataaataattaccaggtgagagaacgccgagccgtcgccgcagcctccgccgccgagaagcccttgttcccgctgctgggaaggagagtctgtgccgacaagatggcggacggggagctgaacgtggacagcctcatcacccggctgctggaggatgtgaaagccatccagcagtcttaa

SEQ ID NO: 117077 - DNA, 4041 bp, Homo sapiens
  misc_feature (1)...(4041): n = a,t,c or g
tttcgtgtggcggcctgggtctgacgcggtcctgttcgtgggggcctctcttggttatttatttattttccgcgggtgcctccgagtgtgcgcgcgctctcgctacccggcggggagggggtggggggagggcccgggaaaagggggagttgtagccggggtcgaaacgccgcgtgacttgtaggtgagagaacgccgagccgtctacgcagacttcgccgccgagaagcccttgttaccgctgctgggaaggagagtctgtgccgacaagatggcggacggagagctgaacgtggacagcctcatcacccggctgctggaggtacgaggatgtcggccaggagagattgtgcagatgactgaggcagaggttcgaggcttatgtatcaagtctcgggagatctttctcagccagcctattcttttggaattggaagcaccgctgaaaatttgtggagatattcatggacaatatacagatttactgagattatttgaatatggaggtttcccaccagaagccaactatcttttcttaggagattatgtggacagaggaaagcagtctttggaaaccatttgtttgctattggcttataaaatcaaatatccagagaacttctttctcttaagaggaaaccatgagtgtgctagcatcaatcgcatttatggattctatgatgaatgcaaacgaagatttaatattaaattgtggaagaccttcactgattgttttaactgtctgcctatagcagccattgtggatgagaagatcttctgttgtcatggaggattgtcaccagacctgcaatctaatggagcagattcggagaattatgagacctactgatgtccctgatacaggtttgctctgtgatttgctatggtctgatccagataaggatgtgcaaggctggggagaaaatgatcgtggtgtttcctttacttttggagctgatgtagtcagtaaatttctgaatcgtcatgatttaccatttcgattcgtcgagctcatcaggagctggaagatggatatgaatcttttgctaaacgactgccggcaaccttattttcagccccaaattacctgtggcgagtttgataatgctggggaaatgatgagtgtggatgaaactttgatgtgttcatttcagatattgaaaccatctgaaaagaaagctaaataccagtatggtggactgaattctggacgtcctgtcactccacctcgaacagctaatccgccgaaggnaaaggtgaagaaaggaattctgtaaaagaaacccattagattttgttaaggacatacttcataatatataagtgtgcactgtaaaaccatccagccatttgacaccctttatgatgtcacacctttaacttaaggagacgggtaaaggatcttaaattttttttctaatagaaagatgtgctacactgtattgtaataagtatactctgttatagtcaacaaagttaaatccaaattcaaaattatccattaaagttacatcttcatgtatcacaatttttaaagttgaaaagcatcccagttaaactagatgtgatagttaaaccagatgaaagcatgatgatccatctgtgtaatgtggttctagtgttgcttggttgtttaattattttgagcttgttttgtttttgtttgttttcactaggaataatggcaaatacttctaatttttttccctaaacatttttaaaagtggaaatatgggaagaggctttacagacattcaccaactaattattttcccttgtttatctacttaggatatctgtttaatcttactaaggaaaactttcgcctcattacattaaaaaagggaattttaggaggattggattgttttaaaaaaaaaaatacggcacattgtccaatccagtgattttaatcatacagtttgactgggcaaactttacagctgatagtgaatattttgctttatacaggaattgacactgatttggatttgtgcactctaatttttaacttattgatgctctattgtgcagtagcatttcatttaagataaggctcatatagtattacccaactagttggtaatgtgattatgtggtaccttggctttaggttttcattcgcacggaacaccttttggcatgcttaacttcctggtaacaccttcacctgcattggttttctttttcttttttctttctttttttttttttttttttttttgagttgttgtttgtttttagatccacagtacatgagaatccttttttgacaagccttggaaagctgacactgtctctttttcctccctctatacgaaggatgtatttaaatgaatgctggtcagtgggacattttgtcaactatgggtattgttgtgcttaactgtctaatattgccatgtgaatgttgtatacgattgtaaggcttatgtcactaaagatttttattctggtttttttcataatcaaagggtcatatggatactgtataggacaaggctttgtaggtgaagtataggtaggccaataatttctgtgacctgatccaagtttattgcagcctttcttttcctatttctttttttttaagggttagtattaacaaatggccaatgagtagaaaagttaaccatgaagattttagaaggagagaacttacaggacaccagatttgtgattctttgactgtgacactattggatgtgattctaaaagcttttattgagcattgtcaaatttgtaaagcctccatagggatgggaccatccatatcctataatgccccttcctatatgtgcctacccatagatgtgacatttttgacccttaatatccgtctttggaaaatgttaaaattgaggaaacctgtttaacttacattttatgggattgggccacattgttatttacttactgcaagagatatttcattttcagcacagtggccaaagttctttaaaatgcatatgtctttttttctaattcctgttttgtttttgagcttattttaaatgtagttttctcatttagtaaaagttgtctaattgatatgaagcctgactgattttttttttccttacagtgagacatttaagcacacattttattcacatagatactatgtccttgacatattgaaatgattcttttctgaaagtattcatgatctgcatatgatgtattaggttaggtcaccaaaggttttatctgaggtgatttaaataacttccctggattgggagtgtgtaaggctggggcggatttctaataaaaattttaggttgtaccacttttaggtagtccatagtgaagcaggtctaggaaaataagccctttggcagggaaaaagggcaatgttgattaatctcagtattaaaccacattaatctgtatcccattgtctggcttttgtaaattcatccaggtcaagactaagtatgttggttaataggaatcctttttttttttttttaaagactaaatgtgaaaaaataatcactacttaagctaattaatattggtcattaaatttaaaggatggaaatttatcatgtttaaaaattattcaagcactcttaaaaccacttaaacagcctccagtcataaaaatgtgttctttacaaatatttgcttggcaacacgacttgaaataaataaaactttgtttcttaggagaaaatgattctgtaattccagtgtcactaatttatattgttctttcctctgatttttttcaggttagtgatttttttgtatacaatttaatccaaatgttatggacattcaggaaatcatggaaacacagtaggatatctgttataatgtggggtgtatcacatgggattataaagcaaagttatggtcgatttctattcttgaaaggaatcaactacagtgaatcctttgcatttgaagccttaacatgcattgctttaattttgcccgggggacaaattttaataatcagcaagactggtttgtgcaaagcggttgagtccatcagggtatttagagcctagccagctacccagtatccat

SEQ ID NO: 117078 - DNA, 1539 bp, Homo sapiens
atggtggtgggactggactttggcttccgtcccctctggacattggcccccacactctgggtggcaccaggccttgcccagccatgtgaggacgcctgctcctcctttgccttctgccactactgtaagtttcctgaggcctccccagccatgcttcctgtacagcctgcagaactggtgagtgtggcactgaaccccagcaccatttgtgctttctgtccccctggatcttgggcccggctgccccccaatgcagggatgcccaccacggccgtcctcctggatgcaatccttcccagccctcaggcatctgccagcctcctccttctctggccttcccacatctcagcctggttcctggacacagatgccgtgatctcagaaggggacgatgtcaccggcagcaggtttggtgtccatgtcctcagatctcagaaggagacgatgtcactggcaggtggtttggtgtccatgtcctcagatctcagaagggaacgatgtcaccagcagcagatctcagaaggggacgatgtcactggcaggtggtttggtgttcatgtcctcagatctcagaaggagacaatgtcaccagcaggtggtttggtgtccatgtcctcagatctcagaaggagacaatgtcaccggcaggtggttggatatccacgtcctcagatctcagaaggggacgatatcaccggcaggtggttgggtgttcatgtcctcagatctcagaaggagacgatgtcaccggcaggtggtttggtgtccatgtcctcagatctcagaaggagacgatgtcaccggcaggtggttgggtgtccatgtcctcagatctcagaagaagatgatgtcaccggcaggtggttgggtatccatgtcctcagatctcagaaggggacgatgtcactggcaggtggtttggtgttcatgtcctcagatctcagaaggagacaatgtcaccggcaggtggtttggtgtccatgtcctcagatctcagaaggagacaatgtcaccggcaggtggttggatatccacgtcctcagatctcagaaggggacgatatcaccggcaggtggttgggtgttcatgtcctcagatctcagaaggagacgatgtcaccggcaggtggttgggtgtccatgtcctcagatctcagaaggagacgatgtcaccggcaggtggttgggtatccatgtcctcagatctcagaaggggacgatgtcactggcaggtggtttggtgttcatgtcctcagatctcagaaggagacaatgtcaccggcaggtggtttggtgtccatgtcctcagatctcagaaggagacaatgtcaccggcaggtggttggatatccacgtcctcagatctcagaaggggacgatatcaccggcaggtggttgggtgttcatgtcctcagatctcagaaggagacgatgtcaccggcaggtggttgggtatccatgtcctcagatctcagaaggggacgatgtcaccggcagctggttgggtgttcatgtcagtgcttgttttcactctcaatag

SEQ ID NO: 117079 - DNA, 1197 bp, Homo sapiens
atgtctccgccagcaggtttggtgtccaggtcccccagatctccaaaaggagacgatgtcacgggcaggtggtttggggtccacgtccccagatcttcagaagggaacgatgtcacccagcagcaggtttgggtgtccatgtcctcagatctcagaaggagacgatgtcaccggcaggtggttgggtatccatgtcctcagatctcagaagggcacgatgtcaccggcaggtggttgggtgttcatgtcctcagatctcagaaggagacgatgtcaccgccaggtggtttggtgtccatatcctcagatctcagaaggagacgatgtcaccggcaggtggctgggtatcaatgtcctcagatctcagaaggggacgatgtcaccggcaggtggttgggtgttcatgtcctcagatctcagaaggagacgatgtcaccggcaggtggtttggtgtccatgtcctcagatctcagaaggagacgatgtcaccggcaggtggttgggtgtccatgtcctcagatctcagaagaagatgatgtcaccggcaggtggttgggtatccatgtcctcagatctcagaaggggacgatgtcactggcaggtggtttggtgttcatgtcctcagatctcagaaggagacaatgtcaccagcaggtggtttggtgtccatgtcctcagatctcagaaggagacaatgtcaccggcaggtggttggatatccacgtcctcagatctcagaaggggacgatatcaccggcagaagccgccatcgtggttgtggtttgcgtgccaatttccaacgagagagcatctgaggctgttggagaagactggagccaatcacagcacatgctgaatggagggctcatattcgggcaggcagctgaggggaaggtacagcagacactttctgggcccatggcctcttacccctgttgtccaataagtaaaggaccagtttaccttcaggcaggctttcaccaacaggcttacgacagaatccggcccaaggctaacacccatggcagcatacaaacaaacaagaagccagttatgatggaagagaggctcacatggcaaggactgaagcttcctgccaacagccacacatatgagtcaccttggaagcagatcttcctgcaccagtcaaatcttcggatgactgcagccccagcctccacctcgaccacctcatga

SEQ ID NO: 117080 - DNA, 1523 bp, Homo sapiens
  misc_feature (1)...(1523): n = a,t,c or g
agctttatttagattttttttaatattttatatttgcatccatgccattcgagaaacctttcccacgggaacaggtctattttcgcctaatgttacccataactcattcgctatttgacgtagttctcttaaataaatcatcctttagtaactcttagaattatctcctaatttacaaaaactgaaatgaaaagggactactaaatcattagcaggagtgggttgcaatcttattttcttgtaaggtaaaggggaaaatgaataaaaatcaaccaggaaaaggaaattcatgggggcaaggaaaaggtattttcttaaaatctgtctcccgtggngggnaaggatgcccagcttgggggccgctcccccggtcaccccctagggctcgggggttaaacagtttgggtcaaagggagggacaggaaaagtccttttggaggggcctctggctggcttgctgtttgctggacttttggaccaggtcagaaggaaagtgttgtttgttcttgagactttggacacaatgtcctatgccttctgatagagatactctagcatttgaaaatctccttgcttctttttaagagctgaaaatgtccaccgtttagccaaaaaagcacgaactaactgttgtcctaaaaggtgtgggttgaaactgttagttgttcaaggacgaaccagaagcaaaagaataaggaaattgaagttttaaggcccttgggcagaccttgctgaacagctcacacatcctccgtcccctggcattaaaatacacacagttcctttgctggtgaagcctctttggggccaacgccaccccccatataggcagatgttcctgccagctcttgtctcctggggtgggtaggctcaggctgctgtgacaagttgggggacggagtccaagggatcctgggagattctaagtgtggctgatggaaccaaccagaatggggagggtggagggctcaggtgctggactctgtgtccccactgtggccctccttttgaaagtgggtgcctcccctaacaacacctgcctggcccacctgcatcctaaaccccaggacaagaaagacacagctgcagggaggaacagaagctgctggaggcccctcggagaacagactcaggccagggtcccactggtccgtaccccttggaatgtgtggccaggcctgtcttgcccctgaactcaacctctcctcaaaagacagaccccaaagaaggggacccatgactgtccagcactctgcctcactaaagtcgtgttctgtatgtcagataaataaatatatagagaaaggccctggagggagctctgggtgggaagaaggtggaggatcctttcatgcatgggcaggagaatgggagagacagagagagaaggagagagaagaaccaacagaaaaagcaagctttgaaatccaatggtccctgggttctggccaccctaaactactttgcacagttgggtagcagcatggtaacagaacagacaagtcaacagagacacccacctc

SEQ ID NO: 117081 - DNA, 1646 bp, Homo sapiens
cggacgcgtggggaccaccgttatgtattaggagattttagttaggatatttagaaagaaaaagagaatctgccattccttttcttctctcttcaacctcagtacctccaaatcttggctgcatggaagtatctttggtgacatcaactcttctccaagtgaagacaactggttgaaggggaccaggaggttggacacagaccattgcaatggaaatgcagatgatttagactgttcttctctgactgatgactgggagtcagggaagatgaatgcagagtctgtgatcacctcctcttccagccacatcatatctcagcctcctggaggaaactcccatagcttgtctcttcagtcccagttgacagcttctgaacgtttccaagagaatagttcggatcattcagaaaccaggttgttgcaagaggtcttctttcaggcaatcctgcttgctgtgtgcttaatcatttctgcatgtgcaagatggtttatgggagaaatattagccagtgtcttcacatgctcattgatgataactgtagcttatgtgaaatcattgtttctcagccttgccagctatttcaaaaccactgcctgtgctcggtttgtcaaaatttgacaaccatttaggaatgccttcgatgaatgtcctccatctgaatatctggaaattgtccaacttgcagtctacttggaatcaagtgttttattggaagggagtaagcgagtaatggagaaaaagccattttagtttgactatgtgattttaaaatgatctcaggtttttccatcaaaattataatatgctcatgaaaataatattaatttgccttccctttgcaaacaccggcagttgaaaggaaaaggacggggaatgtgatggaaaagagaccgcctggaataaatgtccccctatgattctttaaggcagtggttctcgagcttgaattttcattaggaaattctgtgaggagcttgtaaccagatttctgggtctgccacatgcacctatctcttgctgaattgctttaatagaataatgagagcaagtttgtctaactaataccaacctgacaacttgaataacaataaatgcaatttggtacataaattataatgctgcaaaagtttgtcattcacctcagtggagtgacttgatattaggtggtaacccgtagatgatggttaatatgaaaatggacaggaaagaagcattttctgaaagttatattcttttgaaccacgttctaaacccaagtttttaatcttcttggggctcgtaattacctttcactttaatgtcacttaaagatataacacagaaaaatgccttgagggcaaaatataggcaaaacaccaatgcgctttcaaatgcatgaaaatggtgcagttgtacccttgagccttgactcaagggctgtagatgttccctttccaccccccacacttggtgcgtgttcacaaagcaaatatggcctgtaattcaaatttgttctatgtgatactctctgagtaaaaactcatacatgcagaaaattgtctttgctcgaaatgataatgccaaaatataactttatatataatttgcatttagtacatttttggttaaaaaataaactaataaataagtgaagtcatcagcaaaa

SEQ ID NO: 117082 - DNA, 213 bp, Homo sapiens
atggtggctcggcacctcctgctccagtgcccatgtccagtgctgacggtggtgatgcaggctctggcatcctcacactgggagtacggtgacctctgtggggacacaactgagtccttcatctctatcctcagctccttgagtaatgcttggcacacggtgggtgcttgggaaggtttggatgaatgggccaaggaaccaacaaagagatga

SEQ ID NO: 117083 - DNA, 642 bp, Homo sapiens
atgccacctgcagtggcagccgtggctggaaccttctttcctgtggacccgggtctcacgcccgcccccaggtgcagcacggagctaaggggcttcctgccctccacagcccatgcgcagctgaccagacggctgagctcagagaatatcccatgtggaggaaatctgagtgtcgaagagaaaccacagcctatggaagggacccctgagtgtcgaagagaaatcacaggcggcagtgattgtggcttccttcgtcgttgtgtgtacgccagcggtcacctgtctttgcaccccactctgaagcctgcaatgggacagcgattgcagcttccttcgtcgttgtgtagatgtgcacaggccacatgggagacctccgtgggctctccggccttcactcagccagagataattcccctgcccaaaggcagcccctctgcaaacaaagtcttattctttgaaacaggaaccctcaggggccgcctggggactggtgccgactgtcaaacccagcagatgggcttcatccaggcctcaactgtcagccgggacgaccccagatcacacgggcgtgggccgtggtcagccgggagcgtccacgtggtcagccagcctgatgtgttcggtgactcagccaaagcttaa

SEQ ID NO: 117084 - DNA, 424 bp, Homo sapiens
cctattagagccttcaggttctgcatcagcattccggttaaaactattatcttcccaagttatctcccaaccaatgactaagcacagctgtaatactaaggcgtggtcatttctgcttaacatgggactccttcgatatgcaatcttactcttggtctccctactgggctggctgagactgtcagctctgcatcatggggaggagactcccctggccctatgttgttttcattaatccttcacagtcattgttcctcaatcaacctcaagcactcctaactccacctcagcatgttcttcccaaaggacctaacagatataatgatttaatactgacacatcagtattattcttcaaagatccagattaaaaattataattgtaatgcaaatatctatttctctcggacgcgtgggtcgaccgg

SEQ ID NO: 117085 - DNA, 525 bp, Homo sapiens
ttaactggtggctactctgacttttcaggctcaagaaagccacacatcttaatctgaccattatatcaatgtgtagccactcggctacacgtaagactgagaagtcttatggggtcttttttgctcaaagccttcttaaaatccatcttttatttttgagagtttaaaaacagtcattttttccaattctgaatttctggttattattttctttcactcctgtaaaccaaacaatagtttcctaaactcatctcttccttgactacatttggcaaggtaatcaattacaatgaacacccactactaacaacttcttttcttaaaccttcaatcttggtagaaacatgaaatggcctccaagttgccaaagatagtcatccaaaaccttggaacaactctgaaggtccctcatatggattccttgcttcccagctccctttacaactggatgtgaaaggtgctgtcttctgtactttctcttgagagccacaaagaaataaccaatggctaattcagacctaaaaa

SEQ ID NO: 117086 - DNA, 1494 bp, Homo sapiens
atgaaactcatggaaacacttaaccagtgcataaacgctggtcatgaaatgacgaaggctatcgccattgcacagtttaatgatgacagcccggaagcgaggaaaataacccggcgctggagaataggtgaagcagcggatttagttggggtttcttctcaggctatcagagatgccgagaaagcagggcgactaccgcacccggatatggaaattcgaggacgggttgagcaacgtgttggttatacaattgaacaaattaatcatatgcgtgatgtgtttggtacgcgattgcgacgtgctgaagacgtatttccaccggtgatcggggttgctgcccataaaggtggcgtttacaaaacctcagtttctgttcatcttgctcaggatctggctctgaaggggctacgtgttttgctcgtggaaggtaacgacccccagggaacagcctcaatgtatcacggatgggtaccagatcttcatattcatgcagaagacactctcctgcctttctatcttggggaaaaggacgatgtcacttatgcaataaagcccacttgctggccggggcttgacattattccttcctgtctggctctgcaccgtattgaaactgagttaatgggcaaatttgatgaaggtaaactgcccaccgatccacacctgatgctccgactggccattgaaactgttgctcatgactatgatgtcatagttattgacagcgcgcctaacctgggtatcggcacgattaatgtcgtatgtgctgctgatgtgctgattgttcccacgcctgctgagttgtttgactacacctccgcactgcagtttttcgatatgcttcgtgatctgctcaagaacgttgatcttaaagggttcgagcctgatacctctgtgtccacggtcacactgccttctctgactttgactctgaatcttttgcctccctcttataaggacccttgtgattacatcgggcccacatggacaatccaggataatctccccatctccagatccttaacattaaccacatctccaaagttcttcttgccatcagagagactttcaagcagctggctggatgttcgtcatattgaaaagtatgtagaccaaggtaaaagtggaacaagagaattactttggtcctgggcacagaaaaacaagaccatcggtgaccttttacaggtcctccaggagatgggacatcgtcgagctattcatttaattacaaactatgtacgacatgctgttactaaaagtgctacagcaacagccacgggatatcaagaagttcttaattctgaacaaattttggatcttacaaaagctccagaagtctttgctatccctatacagggaaacaggcttaggggggttgtgctagttgtgggtagatttggagtttcacaattaaaggaggaacacccattactgggcctttgcaccgagtgcctagactcagaaggcaccaacaagcaaaaacaagcttga

SEQ ID NO: 117087 - DNA, 336 bp, Homo sapiens
atgccaagaggcatatttgtagtacgacatgctgttactaaaagtgctacagcaacagccacgggatatcaagaagttcttaattctgaacaaattttggatcttacaaaagctccagaagtctttgctatccctatacaggttgactcttcaatggatcagatcaagtctgaggctcctggagatgccctgagggtttcagagtcctgggggcatttgaatgcaggagtttgccggtgggccaggaggcgagataattcctttaacagaatgatcattggttgtacactgaggaagtatggagaatcctacacagatgatgagtttgtaacctga

SEQ ID NO: 117088 - DNA, 495 bp, Homo sapiens
gatgacctgaggcccgggtgtctcacctcaggaagagaggtgacagttcacagaaagcagtcagtggaagttttctagcagggaaacctttctaaagaagcagcatgatctgagctttcacaaacaggggggacgtagacctactaaccgatgttgtaggtaaatggaatggatggagatctgcaagggcccaggattccgaggcgttcagttctggtggttcatgaaacaggcttgaggactctcatcatggaccacacagctcgtggggacactgggaatccactgctcttgggttctggtggcagaggagagtggcagccaccccaagctcctttcatcgcacaggtccccagaaacaaactgagcagcaagaagaagggagacaccgtggaagggaaacttcccccaacacagccctgatccagactcctgaaaaacaagttggagattcttttaatctaagaaagaatatggtctgctaagaaatgccac

SEQ ID NO: 117089 - DNA, 1367 bp, Homo sapiens
acagtagccgtccggattttggggaacgacccacgcgtccggacggcgcggatcgtttggagttcggtccgccgccggaacgggagcctgggggtgcgggtggagtccggactcgtgggagactatctcgatgaacacggtgctgtcgcgggcgaactcactgttcgccttctcgctgagcgtgatggcggcgcctcaccttcggctgcttcatcaccaccgccttcaaagaccaggagcgtccccgggcggctggcacgtctcgcggatcatgctaaaaaatgtagaagatttcactggaccctagagaaagaagtggatctggggatttatcacatttgatataactgctgatctagagaatatatttgattggaatgttaagcagttgtttctttatttatcagcagaatattcaacaaaaaataatgctctgaaccaagttgtcctatgggacaaggattgtttttgagaaggtgataatcccgaagcctgctgcttgaaagatatgaaaaccaaataatttttttcctttgacgatggaaatgggtctcaagggaaacaggaatgtcactttgaccctgtcttggaacgtcgtaccaaatgctggaattctacctcttgtgacaggatcaggacacgtatctgtcccatttccagatacatatgaaataacgaagagccattaaagttattctgaatttgaaacaccatatttttatacttaatgaatggtatctcgttaatctcttcccttacatcttcatgtattgttggtttgttttttggttttgggttttttttttttttttttttttggtataagaactaacatcaaaaggcctgtttaaagggaaaggttaatgggctacttaatattatgaacaaaacaaaaaaacaaggctgccacagtggaatattatcttacaagaataagaactacataaaacagatttgtaaaaaatacatatttgaagtattccccgtatttccattattctttatgggatataaagtaagcatgaaaggtagttaaaactttcaggtgcctgtagagtcataataactgtattttataccttgcattcacacaaatacacattggatgtgatttaaaagtagacattctccttttcctcttttaggatatgtttgattactggaaaaataatatggttatttgttagaagtctggtttataaaaaagccaaaagtgatggaatttattccatttgtcttaggaaggcccataatacctgtttttcttacatgtgactagcaactttctccacttaaagactaaatacctctttatatgatgtaaattattctacttcattttaaaaatcttttagggcagcagaatg

SEQ ID NO: 117090 - DNA, 423 bp, Homo sapiens
gatatctccgcattccggtcgaccaccgccggtgatggagttaataacagggattgccttttttttatagcactataatatgcacaaatctacaaattctgatacttccgcggaaacactgaattctacccgccaaggcacaggagctgtgcaaatgagaatcaaaaatgccaacagccaccatgacaggctcagccaaagtaaatccatgatcctcaccgatgtcgggaaggtcactgaacctatatccagacacagaaggaatcattcacagcatatcttgaaagatgtcattcctccattggaacaactgatgggtgaaaaagaagggtatctgcaaaaagctaaaattgcagatggaggaaagaaactaaggaaaaactggtctacttcctggattgttctttctagtcgaagaaatgg

SEQ ID NO: 117091 - DNA, 663 bp, Homo sapiens
atggattctttgaaatggccagttaacttgagattttgcaagattgatggagtttgccaagcaaagaactggaagaagaatgttgaagcagaaagaaacaagtgcaagggtcgccagatggttgaaaaagaaggttatctgcaaaaagctaaaattgcagatggaggaaagaaactaagaaaactgggcacaaaccagaaagtgtggatttgtgtggagcacacattgaatgggccaaggaaaaatcgagcagaaagaatgtctttcaggaaaaactggtctacttcctggattgttctttctagtcgaagaattgaattttacaaagaatccaagcaacaggctctgtccaatatgcaagggctgaaaaatgaagcgtctactctgctggctacgcttgagatgctcccatgctatcaggacactcagcatattgactttggaagcaaggaagccacctccaattcacagagctggtgcctctgcctcattcatgaaaggacccaccaaaacctgatccagttatcaggttcatcaggccttgggagggttgcattagaacttcagaaaacacagcccagagccacgccgccatctgagcatctggggaaaaggcaggtgttcatcatgctcgtcgaacacaccctgtggcatttgctgtga

SEQ ID NO: 117092 - DNA, 1448 bp, Homo sapiens
ttaactttgcaataatatgcagccagctaattgaaaattctagtgccataaatgtttttaattgcttactatgtgtcaggcgttgtactaggcactggggaaaactgtaaataaaagagacccagttccttcctttttttcaggttgcagtctatcaggaaaggcagacatttaaaaagggtcttgtgaggactgttatgaaacaggaagtacgagtgccatttctataccttagtacaatcactcgttttaattcacatcttccatggtggcaagtttgcctcagtgtcagccggtcaattgccactcaaggggatcagaacatttatgtatctggaatgcttgaatatttaagagaaaacctttttggccgctttgataatgataatttttgtctattgaatggtgatgctgtgattttcaggatgtatgtatcatggaaactggtagagaaagaaagaactgagatcatgctgaagtatactggggcccaccaagaggtagagctgagtgcaccaattgtcaccaaaatggcaacccaatatttaagagaaaacctttttggccgctttgataatgataatttttgtctattgaatggtgatgctgtgattttcaggatgtatgtatcatggaaactggtagagaaagaaagaactgagatcatgctgaagtacactggggcccaccaagagacttggttaaaagaccttgaggaatcccccctttacgaagccttatccatgagaggacaagataaggagacccttggtttgtggattcagcttccatggtgcccttggggtaaagctgtccagatgcacatgaacccctcctcttttcagctggacaccaagccaggaaaaggagagcttgctggccgccttatcattccacaccaggaagccagcatccttgagttgtccttacttcttatgacctgctgtgtagaaagagaggggaaaaccagtgtccgagtggctgctgtgggtgagtgcacagccagcgagacacccaatcagggagcaggaaggctgtccctgtggcagcagttaaccagtaagaaagagaccataatggagaaagaacacactgactgtgtttcacagactgttgccctcatctccacttgtgttaaagaaggagggtcccgacctgcggataaagacctagaggaagggggaggccttgaggcggagtcccccaagcagagccccaacttgtgtgtgatcctgcgccacaacttggccagccggcctggacagctggctctggttactgtgggaacaatgcaaggaaggccgttgtcacattcctctgaggtcaaaggcacaaccttcgtcacacactcagtccctgctggcaaagagaaagacgaggagcgtggaatcggagacctggagcatgcgagggacttgagaaattcaccaactcccttgttttactga

SEQ ID NO: 117093 - DNA, 1068 bp, Homo sapiens
cgaaacagaaacacgcttgtcctggaaggctgcccacctaagctcagctgtcagctgcagtccttacttcctcgtaagggaagagcagatctctgtgcttcagtttcactgttggtgaaatgggaagactggatttgatgacttgaaagtgcctttccacatctagcctgatgattctaataagctcttggactcatttcctctagtgacaggtgaagaggcaaaacctagccgttttagttagcagggttgccaagagagagctgggatgcagagaaccaagtgtgttttcaaggaatcctctcaaggaggcgagaagccctgttttccttcccagaaagggagccactttctggctgagcatcctgataaaaggctgatgacagtgggaagagacaagcagagacacaggagtggcacagagggaccagcttactcccatattccagagccttcaccacagtgaatgcagaagaaggttgacctcacagatgccttggttactgcaatgtgctcttctgttttaagttaatgttgctttttaaaaatcattatttggtttgatgattcctgagtttcaaaattaaatgcacaatcatttttcgatcatgaggaacaatgagtgacaagctcttatcccaacactcttcaagttctctcattcgcattggcaaccagatgcaggcctttccagccacggtgatgaggctggctcccagtcacctcatagggtggcagggggtagcagggggagtctgtgggacccggaagacttcatctctggagacctttccagaaggaaaagaacctcccctggcagggcctttccctttacagagcaaaatgctcatctcagaggagcttgaatttcttcaaatgcagggaaaaatcctagcaaatataatagggtatacggcaaggggagagaggatggctaagaaaagcatttggccccagaatattttgaagacaacaagctttgaaaacaagttgaaagctctgtataaattgcagggcgtgactcacatgcctgtgcgggacccatgttcacaaggtgctacctggtga

SEQ ID NO: 117094 - DNA, 518 bp, Homo sapiens
atgctgactctcctcagggtacctcggctgaataaaaattcaaaaaacagcaatggacaggaactagagaagacgctggaagaaagcaaagaaatggatatcaaacgtaaagaaaataaaggcaatgatacccctttggccctagagagtacaaacactgaaaaggagacaagcctggaggaaacaaaaatcggggagatcctgatccaggtcttgacagaagatatggtgactgttttaatccgggcctgcgtgagcatgctgggagtccctgtggacccagatactttgcatgccacccttcgtctctgtctgaggctcacccgggaccacaaatatgccatgatgtttgcagaactgaagagtacccgcatgatcttgaatttgacccagagctcaggctttcaaatgggtttactcccctggtcacccttctcttaagacacatcattgaggaccccatgtacccttcgtcataccatggaaaagaaaagaagaccaagatgaaccacacctga

SEQ ID NO: 117095 - DNA, 500 bp, Homo sapiens
atgagaaggcgcgatgttgacggggtcctaagatggctgctgggcgaccacttcctgacagaagaaaagatgtggagtgggctgctacctcctggcctaaatgaaagtgacgctgagtcaaactcggaagatgaagctacgttggagaactctggacttaacttacaggaagataaagaggatgagagcatcagaaaaacagaaatcatagatttctcaacagatgaaccaaaaactgaaacagagtcaaatgtaaatgcctatgaagagtgtccttctggaattcccatagatatgtggaattcaggccttgaaaagaggatagaccaggctgtggaggagtggaatattgagaaggctgaggaactcagcaaccagctagctactcgagagcttggtgtaaaaattgccaaagcagttgcctgccacaactttgtaaaagccaaaaaggaggttgaaaattcacaggctgcccgaaaaaagaagaaacttgcatgggg

SEQ ID NO: 117096 - DNA, 668 bp, Homo sapiens
  misc_feature (1)...(668): n = a,t,c or g
ccgttgaatgtttatccagattataaatatagaggcatttccntccatccctgtttaatgtttattttgtaatcattggagtatgtgaaaaatttttgtttgttttgctttggtctctaagtaaacatgttcagcaaagtatttttttttttaagaaataaattgagatttgtatgttcttccttttaggtttgaagcaaagaagagatgggaaaccaaaagcaacatgggatacatgtaacttgccagagtgcttcaagacatttgtagactcacatgctcaatttactgagaatgttctcctgcctatgttaatatgtcagaaaattgatagcactaaaacaaaaataagcataaaatttgggattttgattatcagctcttttcagcctttctttaaggactttggcctattgaagcgaataaaatgaagcattctgttatttgtataagaaatgtacgaaaaacaatatagaacgaagaggataggattttgtttatttgtatggatggacccttggtataaaatcacttttggcgctttccattcatttgggttagcacagacagtgagcttctcgaactgtctttcctttttttgcttttgttgaagagagcccatactgtgcccgtgcaccccggccaaagtgacaaagcacgacttcggc

SEQ ID NO: 117097 - DNA, 1228 bp, Homo sapiens
gctgctgggcgaccacttcctgacagctccagttaatgggactgccagcaggctagacatccttcgccggaatgtgcagcgcttagttctgtgcccgggaggggcttctctctcttttgggattggagtgtggcattgccgccagaaagcctgcagaattccgggttgtgcagccaagcaggaacggtgtacctttctagacccatcctcttgcaatcttggaccctaagaaaagatgtggagtgggctgctacctcctggcctaaatgaaagtgacgctgagtcaaactcgggaagatggaagctacgttggagaactctggacttaacttacaggaagataaagaggatgagagcatcagaaaaacagaaatcatatatttcttatacagatgaaccaaaaactgaaacagagtcaaatgtaaatgcctatgaagagtgtccttctggaactcccatagatatgtggaataaatttcaagaattgcataaaaaacattctgaacagaaaagcacatcctcaagattcagagggaagagaagaacacgctccagaaaagataaattgaagaatgtaaaagaattacatagtgaaccgtcctcaaatgaaacccagtggaaagagcttactcagtattttggagtccacgatagatttgacccgcctgttaaaaggaaaaaagttgagaagtcaggccttgaatagaggatagaccagggctgtgggaggagtggaatattgagaaggctgagggaactcagcaaaccagcttagctacttcgaggagctttgggtgttaaaatttgccaaaagcagtttgcctgccacaactttgttaaaagccaaaaagggaggttggaaatttcacaggctgcccgaaaaaagaagaaacttgcatgggggttttgaagcaaagaagagatggggaaaccaaaagcaacatggggatacatgttaacttgccagagtgcttcaagacatttgtagactcaaatgctcaatttactgagaatgttttcctgcctatgttaatatgtcagaaaattgatagcactaaaacaaaaataagcataaaatttgggattttgattatcagctcttttcagtctttctttaaggactttgtcctattgaagtgaataaaatgaagcattctgttatttgtataagaaatgtaagaaaaaaaatatagaaagaagaggataggattttgttatttgtatggag

SEQ ID NO: 117098 - DNA, 362 bp, Homo sapiens
ctaacagactctggaagacactgtcaaagtggcagctccacttcacacgggccctggcagcacataagaacacccacttacccccagtgctgtcagacatgagtgagctggtgtctgcctgctgggtgaggagcaagtggtgctcatttgaatttttctatcaatgcagtaggatgatcttttcaggcactggtggcatttgcctttttttctgaaagtttttgctaatttttggttgagtattttttctattgatgattagctctttatacattctggacaaaaaaatctcttatatgttggaaatacttttccttcaatctgttgcctttttttcccaacattttattgtgaaaacttcc

SEQ ID NO: 117099 - DNA, 675 bp, Homo sapiens
atgcctgacatcctgaaagtttccccttcatcagcctttgtgcttctccaccagggcttcctacagcagttcctccctctggtttattcacagactgcagataactctggaggggatcgccccctcattggtgtcctgatgattgtggacacccagtcagccccattttctggccacaccaagcatggcaatgacaccaggttggcacaaaacaactctgcctggattgattacttagcccatcatagcgtacactttcttcattttaggaggtggaagatcagcctcaacagactctggaagacactgtcaaagtggcagctccacttcacacgggccctggcagcacataagaacacccacttacccccagtgctgtcagacatgagtgagctggtgtctgcctgctggggcccgtcggaccaggagcaggaacagggggctgagaccagccagccagggtctgccccagacaggatgcctgtcctgcagccttgcttctgcatagctgccagcattctggggactcatgactccatgacctggtcccccaagggtgctcagaggtccctcaaggcccttctaacaggaaagggggctatctccgctcatggagtaggttccgatgagtctctaactcagtcagaaactcttcccagtgttactcgaccatga

SEQ ID NO: 117100 - DNA, 600 bp, Homo sapiens
atgtttgcggtctaccacgggcaagggcgactacggcgatcaacccactgtcgcacccagtatcggcaccgaatggtgccccggcgattacgcgcaaaatccttcggggtcaaatggacgacgcttaaagggcataccgggctcgtcaatatttataaagaatttctattaagagtggttgatttggagcagtatgaacaagaggcaagaacgaccctggactcaccaaagcccacatgcctctgcatcctacgcccagtgccatgtcccaccaccatcactgccaccaccatgcccaagagaaaggctgaagggatgctaaaggagataaagccaagtcattggttaccagtgtgtcaggcaatctggacttttcgggatgccactgagatggcacctgtcaaaagagcagtggttccgtttctgattgtggatcttcagataaattctgccgttttcatttcacttcctgatgtcaggttagttttgaccacagtagtgcatgcttgtgaaagagcctcggtgtcaaggccaacaagtagtaagaaacaaggaattcaagttttggaaatgcccagccacttgatagccagcccataa

SEQ ID NO: 117101 - DNA, 493 bp, Homo sapiens
tttttttttttaaagctatgttgttagcacacagaacacttcattgttgtttttgggggaaggggcatatgtcactaatagaatgtctccaaagctggattgatgtggagaaaacacctttcccttctagttttgagagacttcctcttggctcccaggaggagggattccctgactttgacacacatggccaccttggcacaaaagccttgtggtatagaaaaacaaatttgtttttatgtcctcttctccctttccatctttcagcatagacttaactcccttaagcccagacatctgttgagacctgacccctagtcattggttaccagtgtgtcaggcaatctggactttccagtgatgccactgagatggcacctgtcaaaagagcagtggttccatttctagattgtggagtcttcgataaattctgccattttcatttcacttcctgaaggcaggcgccggttgtgaaaagctgctaaacaacatg

SEQ ID NO: 117102 - DNA, 1097 bp, Homo sapiens
  misc_feature (1)...(1097): n = a,t,c or g
ttttaatgtgtcatagttgtttattattcattattgttgttaatctcttattgtgcctaatttataaataaaactttatcacaggtatgtatgtataggaaaaaacatactatatatagggttcagtactaaccgacatctctggcatctactgggggtcttgaaacgtatcccccgcgaagaagggaggactactgtatagctccaataacacagcctactttaaattgaaagtcatgtaggtatactgggttgcatagcatccccccaaaatttatgtccctnccctagaccctcagaatgtgactttatttaagaaataggattcattgcagatgtcattagttaaggattgagggcattgctggagaggggtgggccccttaatcccaatatgacttggtgttcttataagaaaagaagagacaaagaggcacagagagaagaatgccatgttaagacacagatgcacaaaagcaaaatggccatgtgacaatggaagcagagactggagtcaagcagcttccagcaaaagaacgccaaggactgccaacagccagcagaagcttagcgagggacacagaccagactcttcgcccggagcccggaccaggctctccccaggagtccccaagaagtaaccaatcctgctgacaccctgactttggacttctggcctcgggaagtggttttgccaccacgacaccagataatcaacaacttcccagagttagtgggatgtgacagggtagaagggaatgtggagtcagagcccccacacagagtctctactggggcaatgcctagtggagctatgagaagagggccaccatcctccagatcccagaatggtagacccactgacagcttgtaccgtgagcctggaaaagccacagacactcaatgccagccagtgaaagcaactgagagggaggctgtaccctgcaaagccacaggggtggagctgcccaagaccatgggaacccacctcttgcatcagtgtgacctggatgtgagacctggagtcaaaggagatcattctggagctttaaaatttgactgccctgctggatttcagacttgcatggggcctgtaa

SEQ ID NO: 117103 - DNA, 262 bp, Homo sapiens
atgagcaaggctgagaagattcacatctcagacaccaacctggcaaagtcagccagatctaatttaaaatatggtcctggtcacatacctgtcaccaggcacctctgcaaatgtggctgtgatccagcatctgcaaatcttattggcctttatgtttacatgtctgagttggtgttgtgggacttttccttagttcagctaaagacaggggtccttatcacatggccatgaaagattaggctcgcagacaattcaaaggtaa

SEQ ID NO: 117104 - DNA, 777 bp, Homo sapiens
atgcatgggaatgatgaacaccaatttctggataatataaatccatctaaaatggattttgacgatggagacggggaaataggatctaagagggattttctccggctctttgggaatctttgccagaagcaaaagcagtttgctgatagtgtcaatgcttatagtggtttgggggagctaaagccccttcatagtctccatctggcccccccaagccataaacaggaaattgaaataaaaacacagcttcaaagcaaagctcctactccctcaacaccttttagccagatttctgtggctaagccccttctatctggcaactctggagcagcccttggcctaatattaactgagggagggaaaacaatatctatatctatatccacacacatatatttgaatttacaaaaacataaggcaacgatggaattctcatggtgtcctgcaaaacatgctggcaccctttaccgagctacagatgcacttggcttaggacttgaagaagccataggaggagatctggtgggagcaggaggaactgtgagtcttgctgccccatgccagcaagaagaaggagcagcttgtttcccttctctgagtacttactctgcaggcatctggcaactggatatacaaagcaaattgcagagagcgcaaagggtagtcatcttcagtttgcttatgttgggacaagagcaggaaggtttggcagccataggtgtttacgccggagaatcttggcatagggaatggagaaaagatttggcagatgagtaa

SEQ ID NO: 117105 - DNA, 373 bp, Homo sapiens
acgccaaacatggcgtgttcctataagccgctttcggcatcagtaggcggcggcgtggggtctggcagcgtggggagagggaccaaccgacgccacttcgtgttgggaagtgggagcgggagggccgggcaattcccgaccgaaccaaacggtttccatggatctcaatagtgccagcactgttgttcttcaggtgttaacacaggccaccagtcaggatactgctgtgttaaaaccagctgaggagcagttgaagcagtgggagacacagccaggtttctattcagtgttgctgaatattttcaccaaccacactttggatataaatgtaaggtggcttgctgtactgtattttaaacatggaattgatcgt

SEQ ID NO: 117106 - DNA, 633 bp, Homo sapiens
atgggtagccagccagccagtatttctcatacaccccagctatatgctgcagaaattctgtaccaggcaaacacagctagaggtctagggctctcttcttccatccaggcaccactcctgcggcagaagctctaccacagggcagcaggcaaagaatatgctgggattacagacgtgagccaccacgaccagccgcctcagacaggtccttcaggagataattcagaagaagtcattgctatcatagaagatgacagctccatgaatgttattgcccccgaagaccttccagtgagacaagatgtggaggtggaagacagagatattgatgatcctgaccttgttgcgcaaacagccaagtctgcaggccgcccttgcctcgctaccgttatccctcatctcctggtagccccactttcctccctcgcctctcgggactcgggtgcccaacccactcccttccactcccgcgcgctcggtggctctcgggccggggcctcaccgtttggttcggtcgggaattgcccggccctcccgctcccacttcccaacacgaagtggcgtcggttggtccctctccccacgctgccagaccccacgccgccgcctactgatgccgaaagcggcttctag

SEQ ID NO: 117107 - DNA, 838 bp, Homo sapiens
ttaggtgaggaagagtttagttattattttccaggaaggcaatgaaaggcacagactgcatatccaaaacccagtggactgtataagacaatatcctccagggcccagtgaagcgtaatagctccgagacagctactgataattcaaatgacaaaagccatagcatgaaatacaggccttgggcagcagcatctaaaaataggaggtcctcaggcatctcgggcaagatggccacacttctgttggcggtggtcactccccatctacattcccataacatgggcacatgcgggtactacacccacactgctaccttgtggagttctgtttcttcccctggggcactgggttcttacagggggacattggattgctcagcaactcctgttactagcactggtcctcattaatattttgcatctctggatgtatgctgctccacgtaggaaccactgcacacgtggctgtcgagcacttgataggtggtgtccaggatgatgaggacttagaaatgaccataggatgtcatggtgaagagatgattggtgaccttgataagaacagttttggcgctggtggtttgtgcatcggagagagagtaggagggcctgggtgctgtgaagtcctaattagaatgactccaacagaggatgtgggagaagagaggtctgacatgaagggaatacaactgagcatgcaagagaggaccagatgtagacaatttcctgaaggaaggagacatcagctgggccacctgcttcagggaggcctgggaagaggggaggcttggaaatatcaccagatttgggaagaaggtcactggctattgagggagcag

SEQ ID NO: 117108 - DNA, 450 bp, Homo sapiens
atgggacggacgagctgcacccctgggaaagagaacagaggaaggccggttatcaacgtcctcctgtgcctcagtttccagaaacaagccagactcagtgcctcagggagaccccgtgtggcctccggagagcacgggacccgccctttgtgcagctgcagggcctaccctcgccgggggctgctccctgcttacctccctcgcccgtgcaatgcctctacttcccgcaaggcctaccgggagatgttacaggtcacggtcatatttgagcatgagaagctcacgcagagaacattctggctgagggagaggactgcaactggcgtctccatctactggtaccgaggcgaggaggaaaaagcaggggggcccggagacggcccctctaagtctgtaactccagagctgctgctcagtccccagaacgtcacctccgagcagagcctgtga

SEQ ID NO: 117109 - DNA, 3261 bp, Homo sapiens
ttttttttttttttttgatatttaaaaaatcattttacttattaaaactttctcatttcccaaggcacttcagtagctttcacaaaaacatgtttgttcttttttaaccaggtgaggcatatgctttaaggagtaccatggtaacataatcagcaaagagaagacaattacactgaacacaaaatatcacccaataaagttacagggactaaagtgaggctactctgaaagactatgaacacaatttaaattggggttttgtaatatcctccccatgactaagtatcaaaaaaggaacacacacaatgaccctgtttttggcacttagagaaagtgctagaggcttagggctggtaaggccttgcacccagtggcagctgcagacaattgccagagtgattctgtgtttaaaaaaaaaaaaaaaaaaagacacaaaccaggaggctaaggaaccagcctttcccaagtgcattctgaagggcaaataacaaggagaaaaggatacaacaacaaacaaataaacagtaaaacaaaacccacattacagctttgagagaaaagacaacgttgctcatctctctcacctgataaatttcctttaaaccatacataagacgctatagtagcaaggaggtttccacagcagtggaaaacaagaatagtagattcaatggagcatttattatgagcctggacaagcccagtgctttgatcagatgtaaacaagtctactcagtcgtcatgctgagtggtcttaagagctcacacatcagtgcactttgctggtgatctgcatctgctcattctgctccatcttcattacctttcactttccctagctctgcgctctcctgccctggggaagcaatgatccagttaatgtcctctgtaactgagaaaaggtaagaatcaaactccttgtgcaattacttccttttcctctaaagttcaccactagaggggagtggggaaaggggtgggggacttagacctctagccttattaggggccttttcaagtagtctaaaattaaaatgtacatttagcatatgcttctcacattcctccagatctcactggttctagtgaaaaattaactgctttggaggtgctgagtccatcattgtaatagttaggacttagatgaagttgtctgtaggtagccccagtgtccctagaggaaggtggtgctctagggccatatgtagcctctgagtgtgggtgcccatccaggagcaagtcagacacaggtcaagaggacaaacagcaaaggcctttgtcactgaaggactcggagtctgcacaagctggccatttctggcaagacagtctttcctcttcagtttctcccttactggaagcgatgttagaaggctgtgcttttaaggattgtgggcctttcttgaccatcttttaacatccttgtgtgacttggagtttttctgtgtttcattcctttgactcttagcatctggtcaatggtgtctgggagtggggtaccgaagctctctgggagaaacaaggtgaggatggctgtcaggatggtcagacttcccatgagaatgtagggcaggaagcggtcgtaggcaccaaggtaaacgaagtagggagacaggatgctgcccaggcgggatgctgtggagctgactcccacacccatgtttctcaccactgtgggatacagctcggctgtgtacacgtagaccatggaaaaggcagccgtgactccaaacttgcccaccatcaccaggactgtagccaaataatacaagtctgggggtaccagctgcatgaagagaaggacactgccacccaggaagagggcagtggccatggaatagcgccggggcaaatattgcagcagcagccaggccaacacatatgctgggacttcaaccatcgctgaaaggaagcagttcacaaagatgtccccatgcaagttaggagtatcaagcgaaagcccaaaatagcccactgatatggtcatccacagcattatggacatgatggtgaccatccggatattccaggttcgaagcagatccagaatgttgtgggactgctgcttcttggaacttaggtcttgtaactcactcgggtcaaagatagtggaaggcacaacaatcccattggctttggcagccttgcggatgatcacctctgcctcttcaaatcgtccctgagagatgagccatcggggggactcagggatgaaccaccagagtgccacgcacagcacccccggcatcgtcagcgccaccagcagcatccgccagtctcggatgaagtaagcaaacagtggcagcaccatgtagccaaatgcataaaatatgcacactcctaacgtagagaatattatacgaactgacttgccaagaatttctgtccccaggacaaatgctgccacatagttggagatctggcccatgcctacaaggacaaacagcacgacaaacatctcaaaattcttcgagaagatctgcaggaagctgaagcctgtctgcatgcccatggtcacgaacagcacattcttccggccaaacctgtctgacagctgccctgaaatgaaggagcccaacagcacacccacgaagaacaaggagattgtgagtggggccttccagtcgtcctcacacaccaggttccactcggtcacaatggtggacaggtagacgtcctgactgaactcccagccatccagacagctctcctgctccagctgccccaggtccacgtcgcgccccggctccagcccgagcgccgagaagttggcgatggtggcgagccggtagcggcggcagctgtggggcacctcgcggccgtcccgcagccgcagtgggacagtgtggttgcgccaggcgctgctcaggttcgcggcgtccggcacccggcagcggtgctccggggtcgctatcaggaacacggaggacaggccggtgaagccattggggatgatgctggcgctgagcaggaagaagatgaggcgctggaagggcccccactcgcccaggaaggcggtcacctcgtcgtagtcccgcatgccgccctcagaggcccacagagcgcggcctggggtctgggaacgcggcgggctttgcgcgtgcgcgcggggcacccgccgccgaccaggcaagccaggcagcaggcgacccaagaccgtccgcggagggtaggctcgcgagctgacaccgccgccttggtcctgccgcggctggccttacatatggcgcacgaccagggaaggttccgggcctgggccgc

SEQ ID NO: 117110 - DNA, 481 bp, Homo sapiens
  misc_feature (1)...(481): n = a,t,c or g
cgcccccccttagatcaccgtccagataggagcaccntgtctggacgcggcaagcaaggcggtaaagctcgcgccaaggccaagacccgctcttctcgggctgttcttcagttccccgtgggccgagtgcaccgcctgctccgcaagggtaattatgccgagcgggttggagccggcgcgccagtgtacctggctgcggtgctggagtacctgaccgctgagatcctggagctggctggcaatgcggcccgcgacaacaagaagacccgtatcatcccgcgtcacctccaactggccatccgcaacgacgaggagctcaacaagctgctgggcaaagtcaccatcgcgcagggtggtgtcttgcccaatatccaggccgtgctgctgcctaagaagactgagagccaccataaggccaaataaggagcgaggttgtgaaaactggaaaacaaaggctcttttcagagccattctaaaaaaa

SEQ ID NO: 117111 - DNA, 420 bp, Homo sapiens
agttcctccatttatcgtttcttcgtcatgtcgggacgcggcaagcagggaggcaaagctcgcgccaaagccaagacccgctcttctcgtgccggtctccagttccccgtgggccgagtgcaccgactgctccgcaagggcaactatgctgagcgggtcggggccggcgcgccggtgtacctggcggcggtgctggagtacctgactgccgagatcctggagctggcgggcaacgccgcccgcgacaacaagaagacccgcattatcccgcgccacttgcagctggccatccgcaacgacgaggagctcaacaagctgctgggcaaagtaaccatcgctcagggtggtgtcctgcccaacatccaggctgtgctactgcccaagaagaccgagagtcaccacaaggccaaaggcaaataa

SEQ ID NO: 117112 - DNA, 758 bp, Homo sapiens
  misc_feature (1)...(758): n = a,t,c or g
tttttaccaaaaacgcaggggatttatttgaggtttgggtgaaaaataatcttgtgggtggtggtaggccgacagatggggacaggaagctgtggacgaaagccccaggtcccgtgggagaggtgacagcagcaggggcacgcagccacgtgggtccccaagggaatgtgaaggcggagggctccaggcgaactggggattaaacaaatatttacaggcagcagggaagtgcccagcgcacgtgacgggggcggggcgggactttggggagggcggggcctaacggtatcgagcgagccggttgtagacgtggtccaggtttctgcacaggaatatcgagagcgtcatgaacccgagctcgcggtaaatgtggctctctgcagggacagcgcatatggtctgcactgtgtctggaccgcgccaggtgtccaagcctgctgagctggggcaagatcaccttatctaggattgtggagtcgttggtcgccgacaagttgtagcaggagcagggcacgcggtgcgcctncgacccgttacctcttcagatgaggacttggnaccagtccttgcggtagtgccagccgcagcagcgcagcttgaactgcacatagtcccagctcttctcggggcgngtctnnnctcggggtggtgccgtactttttggatgtttctctttcacgtcccgcaagctttgctccagctgggccngctgagtgtgggatagatctcccaggtgactgggtggcaacagagcagca

SEQ ID NO: 117113 - DNA, 1335 bp, Homo sapiens
atggagacctgggagggactgccccatgagtccttggtgcccacaaattccaaggcccctcaggtgaagatgtcagcccaggagagctgcctcagcctcatcaagtacttcctcttcgttttcaacctcttcttcttcgtcctcggcagcctgatcttctgcttcggcatctggatcctcattgacaagaccagcttcgtgtcctttgtggggaggtttaaggagccaagccaatgtcacagaacaagtgatagggctgaaactactggggacgaggaggagctgaaggaggaaggagagggcttggccttcgtgcctctgcagatctggtccaaagtcctggccatctcaggaatcttcaccatgggcatcgccctcctgggttgtgtgggggccctcaaggagctccgctgcctcctgggcctgtattttgggatgctgctgctcctgtttgccacacagatcaccctgggaatcctcatctccactcagcgggcccagctggagcgaagcttgcgggacgtcgtagagaaaaccatccaaaagtacggcaccaaccccgaggagaccgcggccgaggagagctgggactatgtgcagttccagctgcgctgctgcggctggcactacccgcaggactggttccaagtcctcatcctgagaggtaacgggtcggaggcgcaccgcgtgccctgctcctgctacaacttgtcggcgaccaacgactccacaatcctagataaggtgatcttgccccagctcagcaggcttggacacctggcgcggtccagacacagtgcagacatctgcgctgtccctgcagagagccacatctaccgcgagatgactgtcatggtgctgagcgtacagctacagcgcagggcactccgccggaaatgcgagccgcacgtgccgggcgctggggattcgagccccgggcccagcctgatcgctgacggcggcggcgggcacagcggcagtctgtggggtggctggggcatggcgggtgcctgccccaactggggagacaaggcaccgcagggcaagctgcccatggccctggggctctggccgctgtgggttcaagacgaggaccagcctgacactggaacctctacccccacttgtagcagctattcccgcctcatcagccagccctgcggcagttcccgtcgagccccgcccttttctacctatccccttctccagccccttcccgcccaattcacggccccacccctgacctttctcgcccggctcgggttcatgacgctctcgatattcctgtgcagaaacctggaccacgtctacaaccggctcgctcgataccgttag

SEQ ID NO: 117114 - DNA, 1449 bp, Homo sapiens
accgctccggaattcccgggtggatacgcgcgtccgcggacgcgtgggtttctctctcagctctccgactctctttctctctcagcctctttctttctccctggctcccccactgtctgcacctcttctgtgtggcgagtggaccgcttaccccactaggtgaagatgtcagcccaagagagctgcctcagactcataaaggacttcctcttcgttttcaacctcttcttcttcgccctcggcagcctgatcttctgccttcggcatctggatcctgatcgacaaaaccagcttcttgtcctttgtggggcttgggctttcgtgcctctgcagatctgggtccaaagtcctgggccatctcagggaatctttcaccatggggcatcgccctcctggggttgtgttggggggccctcaagggagctccgctgcctcctggggcctgtattttggggatgctgctgctcctgtttgccacacagatcacccttgagaaatcctcatcttccaatcagcggggcccagttggagcgaagcttgcgggaacgtcgtaggaaaaaccatccataaagtacggcatcaaccccgaaggagaccgcgccagaagaaaatctgggactatgtgcagtccaacttgcgctggtgcggctggcactacggcagggactggttcaaagtcttcatcctgagaggtaacgggtcggaggcgcacccgcgtcactcgctcttgatacaactttatggcgacatagaactccacaatcctaaataaggtgatcgtgcaccagctcagcaggctggacaacttggggcgttccagaaaacgtgcaagacattgggctgttcctgagagagagcacacatttacccgggaaggctgcgccaagggccctccgaaagtggctgcaccaacaaccttatttttccatagtgggcatattgcctgggcgtcggcctactcgaagctcgggtttcatgacgctctcgaatattcctgtggaagaaacctggaccacgtctaccaacgggctcggctcgataccgtttaggccccgcccctccccaaagtcccgccccgcccccgtcacgtggcgtgggcacttccccctctgcctgtaaatatttgtttaatcccccagttcgcctggagccctccgccttcacatttcccctggggacaccacgtggctgcgtgcccctgctgctgtcacctcctcccacgggacctggggctttcgtccacagcttcctgtccccatctgtcggcctaccaccacccacaagattatttttcacccaaacctcaaataaatcccctgcgtttttggtaaatgaccacaaaaagggcggccgttctaaaaaagccctggaggggcccaatgttacccgtgcttgaccacgaatacctctttgcctatagcgacctcaatgactccctatctggctagt

SEQ ID NO: 117115 - DNA, 1563 bp, Homo sapiens
atgaaatatattgaacacaaatcgagcaaatatgacttggtcgttaacatccctctgattaaacaggagtgctgctatgagaacgggctgtgccattctgcaggcacacgagagtcgctgggttttagggtagtctctgtggagaatggtgactggaccacgtgggagaggggcttgaggcaggaagggattcaacaccagcctgttggcagtggacctgaccctgaccagtcacggaagccaactgggaaccaacgagggcaacagttagctgctctcagtgccacaacggacgaggatatggggactaatgctgaaaagccacagggcgttgataaggcactagcgataatcactgacctgagcccgttcttattcaaattcaagtgggcgaatcgcatggcgttgttgcaagcatcgtctgagaaccaagggtccttcctgagcatttcagacctgggtgcatcccgcactcacactcagttcctaccttgtgccgggccctgccatcagcccagagagccatgggctaaggggaaaaagcagcagggcccccatggacctatccaaaaggagattaatccagggtactcaggaaaatctgtgttggaaatccctgaaaaaacatggaagcagcatggctgcatgggacatagcctgatcccggatcctggctgtgaagtaagccgcgtggcttcggcggcacaccatcgtggccgtgggctggctgagcgctcagctcctcagcaccttggagacaccttggccctgctcgtggtcctgctgtggggcactggtcagatgacagtcttccccctgatctccacacccagctccctcactcccagctccacacttgcttcctggttggtcctggtgggccattattgggtctatgggactcagcaggcacctgtgctgatggtttctgggttcctggatgtttgctgctggaagttgggtggaagcagcgcggacccacggcgcatcgaacgcactccaacagaacccgacgcagacacgcgctttcaaccggcggagacactggcagggccagaaacgcgcgcagcgggggcgggaggtcggccctacgtctccgcaaaccccacgcttcggggtggccgcctcagacaggaccctgagtccgagactggggtaggggacctgcccgatcctgtaacaaccctcgtgcttctgcacaatcgcctcccactagcggtgactgttgggtgtctaccttcccggtgtcccactgagaagcgggctcttccttggcaggggcttcttcattgcctcgctgtggatgtcgaggtggggcaggagagtgaggagaaaacagagaggagggaggggtcagcagattatgatccagaggccaagcccagcccgtctgcttttgtgtataaagttctcatggaacagagctgtgagcctgccgtgtgtggtctacggctccccctggacacagctgcagagctgattcccgcacagacctcggggcccgcagagggaggcgccttccctccatcatccccactgagcaccagccgccgcagccgctaa

SEQ ID NO: 117116 - DNA, 903 bp, Homo sapiens
atgtctccacctacccaagagtgggcgaatcgcatggcgttgttgcaagcatcgtctgagaaccaaggccctgccatcagcccagagagccatgatgccatcctctccctgtgtcttcacacgatcatccctctgtatgtgtctgtgtcctcatgtcctcttaggaggatgccagattgcatcagggccaacctggtgacctcactttatgctaatcacctccctaaaggccctgtctccaaatctagtcccatcaggggctgcatgggacatagcctgatcccggatcctggctgtgaagtaagccgcgtggcttcggcggcacaccatcgtggccgtgggctggctgagcgctcagctcctcagcaccttggagacaccttggccctgctcgtggtcctgctgtggggcactggtcagggctcagggacgcaagttcgtgtcctaatcccagtgagcttgtgctccacagtggagaaaaaactacgtgggcaaagaaaaccaacgatcggcaataatttttaccaagaacccggggttaggggggatatggaggatggagggtggctaatgccagaacgagagcttttggaagaaaggagaccaatgaggaaaaccttcatggaggagctcgaacaatcgaatgctctgcccaagtgccagttgggtgatgaagatgacagggctggggagcaagcccagaagaatcgggcctggggaagcaaagggttggcctgggaatctgatatcctgtgctacatgactgctatgggaaaatgtatcccaacctgcgagaaacttctggaacaagctgcttctaggctggtgccagcccaggcgctgtgggcctcagtggaagtgtggccttgccggttcatcctctgcgggactgaaggctcctag

SEQ ID NO: 117117 - DNA, 683 bp, Homo sapiens
atgtctccacctacccaagagtgggcgaatcgcatggcgttgttgcaagcatcgtctgagaaccaagggtccttcctgagcatttcagacctgggtgcatcccgcactcacactcagttcctaccttgtgccgggccctgccatcagcccagagagccatgggctaaggggaaaaagcagcagggcccccatggacctatccaaaaggagattaatcccagggtactcaggaaaatctgtgttggaaatccctgaaaaaacatggaagcagcatggctgcatgggacatagcctgatcccggatcctggctgtgaagtaagccgcgtggcttcggcggcacaccatcgtggccgtgggctggctgaacgctcagctcctcagcaccttggagacaccttggccctgctcgtggtcctgctgtggggcactggtcagttcacccccacacagcagggacctgtctcctgcaagcctcgctgtcaccgcatcctggacgtacatgagggcctgtgtctttcacagcgaagtccagacctcctgatgtgggatgatgcagcaagaagacccttaccagatgcaggcccctcaaccttggacttcctaacatccagaactgttaagaaataaaatttattcctttcctttccttttcttcctcctttcccttctcttccctcgtgcc

SEQ ID NO: 117118 - DNA, 534 bp, Homo sapiens
atggtggaagtacaagtgagtgaaacagaagtaagtgttcagaaagacagtttgggcagagtagacagtgtcaaatcaatgaatatcatatttaatggaagaaaacaccccagggggcagagaatgcaggaaattgtgtgtcactgtgatgaaaagcaaatgaaaggctttacagcagaaatgttggtctctgatcatctaacacgtccatcacaacttgcagatgtgttgtgtagacaccagccaactgagcatccaaaaacagattcttctcattctcttgttcaccacgtccttcactggaactctcagagatcagtaggaagcagtagatgttgtgagaaaaataatatccccacaatagaggacgatacagcttacaatgtccataatgctaatattgagaaactctgcccagaaagggaagatgaatctcaagagaacagaattggcatcatgtggcccagatgtttcctacttccagaagattttcctttcaatgctacctctggaggttctgggttttcattgtga

SEQ ID NO: 117119 - DNA, 1134 bp, Homo sapiens
atgcaccagcacagaagtggaattgaatttgctctaaaggagaccaagggatttttggacaaactccataatgaaattactaggactttggaaaagatcagcagccgagaaaagtacatcaacaatcagcttgagaatttggttcaagaatatcgtgcagctcaagcccagctgagtgaggcaaaggagcgataccagcagggaaatggaggagtgacggaaagaaccagactcctctctgaggttatggaagaattagaaaaggtaaaacaagaaatggaagaaaagggcagcagcatgactgatggtgctctagagcctggaagaggactcactcctatatttttcactggagaagagactcctacaattgcgcctgccctacctgggacctccatcttctcaggtgccgtgccagtctggccaagagtggacaccttagtcaaggtatttattcgcgataagctcatggagcggcgtaaccgtcgcacaggaaggacagagaaagcgcggatctgggaagtgacggacagaacggtcaggacctggattgatgaggcaggtgccgccgctgctgctgacggtgtgacgttctctgtttcggtcacaccagatacgttccgacattcctatgcgatgcacatgctagatgccgacataccgctgaaaggtctgcatagcctggagggacataagtacatcagttcaacggaaggctacacgaaagatcttgcgctagatgaggctgccccgcaccgattgcacacactctctcttcagattcctctggagacaggggtttctgcctcttaccccatccccttcacctgggagagaactgtcactaaactcagcaaggaagactttctcaccttgggttttcagttaatgggggtagacacaaaacaactaaggacattgactgcggttgctttgagcaaggcagttagaggcgaggtttcgcagagcgcattttacccaccacagccctgctctcctcggatgcccatgccgatgggcgagtgcactcacctggctgtgaccgtggaacgccgcttttctcagtgtgaagacacctggcccaaacagggcactttaaaccctttgaggaataagatggagtcatataaataa

SEQ ID NO: 117120 - DNA, 1248 bp, Homo sapiens
atgacagcagagcatgaaaccaaggacaggaaccttctgcgttcaggccctctgtaccctgaggtcacaggacttgagcctggtcaatcagcatccctggtctcccttgccacattgactcttcagggaggactcctctctcccagggaagtttctgttagaattgatggaggagggtctccatggcatcgcatgtgggaaccagaggcctgggaccaagaaaccaagactttaccagcagcagctgtctctgcctctaattcagtcagtcctgatgaagtggtagctctctggcaattccagaccatgcctcagggcctgcagatgccaaagaaaggaccactcctcaggcaccaccacatcatggcaacatctcagcagctcaaagacgtggcagctcctcatcctgaggcacttgaatctgtgacctctgttgtacacaaagccagggatatagggaaaggggagaggaaatatcctcctcaacacactgcaaaagaacaactctgcactgctgctgtgtttcctggcacactggaggcctttggccaacttccccgaaccctgtctcagcagcttctggctcattgctcgctgacacggccacctctgctcctgccaaggaaatctgctggcctttgcttcccctccccacctccatctcactcagttcctcctcaggccacaggcatgcctgagtggcaaatggcagcaaagaggaaggtgaaaaaggcaggaagaacgggaggaagggagcccgagagaaaacattcagaggagggagtttatgtacattatccaaatggatgtcaggtccctgtcgacaaagtttttaattgtgtgtggaaccacacgatcgtctcaatagatgcagaaaaaccttttactaaattccaacatcctttcatgagagaaatgctcaataaactaggcatcaaaggaacatacctcaaaataataagagctgtctatgacaaatccacagcaagcatcatactgaacaggcaaaagctggaagcattctccttaagaactgaacaccagagaggtcagtggtgctcggagaagactttagctttgccaccccctatgctgggtatcgttgtgaaggactcagatgcagcaactgttggtggtttagctcagattacttcttctgtcaagcttcctccaatccttctctcaccttctacctacccagctgccatccagggaagagttgctccctacctgtgctgtggcccctag

SEQ ID NO: 117121 - DNA, 1479 bp, Homo sapiens
atgatctcctggcccacccctgccctcttcccagccagagtcagagtcatcagggaatctctcttagatcttcaccaggagaatctggtagagtccctggagcacagaactgtactcaacctgattgaactcccacggaggggtaggcttccaaacgcaactgaatttcattttggtgcagcacctttctgcctcaaggccttagctttgatagctttagaaaataatggatatggtaacactatgcagggtttaaagtgccctgtttgggccaggtgtcttcacactgagaaaagcggcgttccacggtcacagccaggtgagtgcactcgcccatcggcatgggcatccgaggagagcagggctgtggggagcagccccttcactggcagtgagaaaggtgctcatttgaatatcaagcaacggaccagtgaaaattggcaaaggccagaaaagcgaccttcagaaggagccagcaccccagctcctgcctcagggcgatatgaagaccccaggaaggaaattatgctgagaaaaggagatcacacctctgtccagcctgcaccggccccttggcatgccctgaagacacaaggcctaaatcaaggtcaaagacacagccctcctggttgtgaagattccaaaggctcccagctgcatgaggagggttacccagaatgtcagatttggagcaattcagcgagaacccttcaaaattcagtgtggtatgtggaagagggtcaccctcatctagcagatgtgggcaggaagagaagtccacttgtgcttgctgccagaggagatggccactgccaattgaggctgatcatgaagagtgggttcctggagtcctcagcagagcactggctattcatggacaaggacaggaagactgtgccgaagatacctttttggtctcagattgttgaattttccttgactcctgggaaacagtttaaagcagccgcaaacatggtttccacaactgcattcctgaagcgcatacccagagttacttcttgtaacagcactttcttccagatgactgagatgcgtctgctgaaactgaaaggatcagcattcccagcttttaaagtagatgcttcctgtgagacccagcgcccagaagccactcacagacccttgcgggtgtctcttcacatgctgttcagtgccattgtagagatgaggcatccagaaacgtttgaccttgtgcaagaacttggcatccacttctgtcctccttcttccctagaagggaagcgctggactgggatcattagcatgagcaggcagtgctgccagctgcccgcctgtgtcctctgggctccggctggttatctgacattttgccaatcagttctctttcaattggtgctttcacatataaccaaaataataactgaagactatgatgataacactgagattcttcgcagtcactgtgtcattacagataaaactgtgttttcagcatag

SEQ ID NO: 117122 - DNA, 1780 bp, Homo sapiens
atgcctcagggcctgcagatgccaaagaaaggaccactcctcaggcaccaccacatcatggcaacatctcagcagctcaaagacgtggcagctcctcatcctgaggcacttgaatctgtgacctctgttgtacacaaagccagggatatagggaaaggggagaggaaatatcctcctcaacacactgcaaaagaacaactctgcactgctgctgtgtttcctggcacactggaggcctttggccaacttccccgaaccctgtctcagcagcttctggctcattgctcgctgacacggccacctctgctcctgccaaggaaatctgctggcctttgcttcccctccccacctccatctcactcagttcctcctcaggccacaggcatgcctgagtggcaaatggcagcaaagaggaaggtgaaaaaggaaggaagaacgggaggaagggagcccgagagaaaacattcagaggagggagtttatgtacattatccaaatggatgtcaggtccctgtcgacaaagattttaattgtgtgtggccctttctccttataacttatggaactggtccaaatgaggctgacttggtagccaatctggcatccgctattgaacctgcatacctaaggaagttactgcttaactcaactctcctgcttctgcctggagggaacactgcccatcctgtacactgccggaggctggaaaaggtgtcaagagatttgtgcctggccaagaccttggaggatgatggtgttgcacttcgtctagttattcagcacagaactgtactcaacctgattgaactcccacggaggggtaggcttccaaacgcaactgaatttcattttggtgcagcacctttctgcctcaaggccttagctttgatagctttagaaaataatggatatggtaacactacgcagggtttaaagtgccctgtttgggccaggtgtcttcacactgagaaaagcggcgttccacggtcacagccaggtgagtgcactcgcccatcggcatgggcatccgaggagagcagggctgtggggagcagccccttcactggcagtgagaaaggtgctcatttgaatatcaagcaacggaccagtgaaaattggcaaaggcccagaaaagcggaccttcagaaggagccagcacccccagctcctgcctcagggcgatatgaagaccccaggaaggaaattatgctgagaaaaggagatcacacctctgtccagcctgcaccggccccttggcatgccctgaagacacaaggcctaaatcaaggtcaaagacacagccctcctggttgtgaagattccaaaggctcccagctgcatgaggagggttacccagaatgtcagattttggagcaattcagcgagaacccttcaaaattcagtgtggtatgtggaagagggtcaccctcatctagcagatgtgggcaggaagagaagtccacttgtgcttgctgccagaggagatggccactgccaattgaggctgatcatgaagagtgggttcctggagtcctcagcagagcactggctattcatggacaaggacagaaacagaagaaaaaaagacccagagaaggcaagaaggtcatatggagacagagatcggatttgtagagccacaaaccaaggaacgcctggagccaccgaagctgggagaggcaaggaaggatgctcccttagagcctttaaaggaaacgcagccctgctgaacactgatttcaaacttctggcctctggaactgtacagaatacattatag

SEQ ID NO: 117123 - DNA, 447 bp, Homo sapiens
gctgacctggctacggccactgatgtgtgctcaattttccagcagcagagaccaacactgagccctcaatatggcaccattcctgggggtgatcagccagctacctggtggcaggttgattatactcgacttcttccatcatggaaaggacagaggtttgtcctcactggaatagacacttactctggatatgggtttgcctatcctgcatgcaatgcttctgccaagactaccatctgtggactcacagaatgccttatccactgtgatgatattccacacagcattgcctctgatcaaggcactcactttaccgctaaagaaatgtggcagtggcttcatgctcatggaattcgctggtcttaccatgttctccatcatcctgaagcagccagattaatagaacagtggaatggcctgttgaagcccaattacaacaccaactaa

SEQ ID NO: 117124 - DNA, 624 bp, Homo sapiens
atgatgaatgaggggtctggtgtctcattgtctggatacgatgatctgaagaaacagggaacacaacatggtcgaaagggtaaaataattcaccggctcacaatacatttcctagtgaatagatgcctggcgatggggccaataacaggccactcgccttcacgggaaaggtggcacctcgatcgaatactcctctttacagttacacagtgtcggtcaaaagaagagtcagtcttatcctcatatagaacctggaacatagaaatgcttatagtcattctggaagatacaagcaagcatcttctacgttccaatttctgggaaaacgaaggtaaatctgactatggttttgtgttcccatggtcaggaagaccaacaggtacccgggtcagcctcagggcctgctgccacgtgggtataactgagaactgtggatgctctccattgggagcaatagatgattatccgtattgtgctcaatttgagggggaggctaagggctggggaagctggtgtgaggtctctgggatcatgaagacattgaaaaagaaaaaagaaaatgatgaaaggcgggactcatggacattttgttacaaagtggtccagatttgtgtcacaggatga

SEQ ID NO: 117125 - DNA, 417 bp, Homo sapiens
  misc_feature (1)...(417): n = a,t,c or g
gactatattggcatcctgttctaaatgtcaagtgaagaaaaggttcnnnnnnnnnnnnnnnnnnnnnnnnnnnnnnnnnnnnnnnnnnnnnnnnnnnnnnnnnnnnnnnnnnnnnnnnnnnnnnnnnnnnnnnnnnnnnnnnnnnnnnnnnnnnnnnnnnnnnnnnnnnnnnnnnnnnnnnnnnnnnnnnnnnnnnnnnnnnnnnnnnnnnnnnnnnnnnnnnnnnnnnnnnnnnnnnnnnnnnnnnnnnnntttaagagggaactcctctgggtctcactgcttgagctgagacactggctcacctggctctcgtgccttcggacttgaactggaacttaccctgtcagctatctcgggattccagattgccagctgcagattttgggacttcctggccttcacagtcatacgaaa

SEQ ID NO: 117126 - DNA, 253 bp, Homo sapiens
gtgcacacggatgtcctggctgacattctcaagagcatcaacaatgccgaaaagaggcaaacgctaggtgctttttaagctgtgctccaaggtcattgcccgtttctcactgtgatgatgcagcacggattatgcggggtggagttggggggactttctgggccgggggacttttgcaagagaccccggtgactcaggattttgagttcttaaccagtcgagtgaaggattcaaaattaaccactccaagggg

SEQ ID NO: 117127 - DNA, 1011 bp, Homo sapiens
atgatggcatgtttaaatgccaatgggaaggacagagaaatggatggtgtggggaaaaaccaagaacttgagtggaccaagggcacagagcagccttccagaggaacaaggagatttctggcagagggctcctttaggtcagcaacaacgtctgactcaacactagattcccacatgcaaaacagtcccaagcccaaaggggctcataaaatggtttatgttttgcttgtccaacagaccctgagcacctctaaatgtgatatccacaaccaaagggcaggctccaaaggcatggctggcggaggccacctggcccgctttgtgttggaccgtcacgctgccgtgtatcggaggcgtcagggtctgcagggctttgcggcagctgcagcccactcttgccactgtgatgggagctgctctgaaggatacgtctcatccatcctgcacctgagctcaagtgctcatcgacccttcctggctgctgttggactgggtcggggctgttgttcaagcttgctaacgaggaacagccaagataaacatcaagaaaagaaaaggaaagaaatcaccctcttgggaaacaaagaaacaaaccccaaacctctaacccaaatccctgagcttttgcggagacagacacagcttactccagaaagaagggtgcagctcagcatccctaaacactcccaggtgcgtgctctgcgacagagtgcgcaggacacggagctgcttaatggaaaccaatcctgcaacacttgctgtggtgatgcagccttgggccccgccagcagcggcttgctggctggcgcggggtcctctcccgggtccgctgcgttgcgcgggcaggacagtcaggataaagtggagaagactgagcaagaaagagctgcttcagaacaacgggcacatctggaggaagacagaggcctgacagtgcacacggatgtcctggctgacattctcaagagcatcaacaatgccgaaaagaggcaaacgctaggtgctttttaa

SEQ ID NO: 117128 - DNA, 814 bp, Homo sapiens
aaaaaactctcaaagagcatgtaatatgggaatacgaagttgacaagatgttattaaagacgaataaaattataccaatacctagacacctgatcccaacattaaacatgaaatacactaaaccagagttattttctggaggagtatttaaaatgatggggatgttattacttgggtcgcaatgaacctgaaaaccaattttctacagaatatacagcagcagggaagcaaggggaccagcagacccctttttaagtacgcatgtgataagcaatgaacacgaactgcccagagcagtctccaacactgacacgattcgcttccccaccacgacgccctagcgctactgtgcaacgaagacctcccaagcactggttccaatgcggagaccatgggctcccagactctgggaactccaacacgactgcgaaacgaactccgagcgaggactccccgagagctccccgcaacacggacctcacgcgctagcgaacaacagaaaaaaaaaagcgcgctctccctgcccctgaaacattcccagaagcccacgcagaccagaccgatgacctgtctccactgctggaggcgagtcagggacccgaagtctctaaacactcgcctctacccgccgccccgcgaaccccacacactgcagacgcgacactcgcaagtttcggggatggcggccggcgagggccatactgcgtctttccggagacacggaatacggcaccagccgtccctttatgatgcaatatgtctgcgcccaggggacgcttgctgggagcagccattttcaaccctactgccgtag

SEQ ID NO: 117129 - DNA, 568 bp, Homo sapiens
  misc_feature (1)...(568): n = a,t,c or g
caaaaagcactcccactgagcaccttgcgacccccactcctacccgccagagaacaaccccctttgactacgcgcatgaaatttggtgccgtgacttggatcgggggacctcccttgggagctcaatcccctgtcctcctgttctttgctcggtgagaaagatccacctacgacctcaggtcctcagactgacccagccaaggaacatctcaccaattttaaatcagaaggcaggaatgtcaggctctgagccaaancaaggcatcgcatccccctgtgacttgcanctatacggccagatggcctgaagtaactgaagaatcacaaaaagaagtgaatatggcctngcccggcttaacttgatgacattccaccacaaaagaagtgtaaatggcaggtccttggcttaagtgatgacattacctgtgaaagtccttttcctggctcatcctgggctcgaaaacaccgccacttgngcaccttgcgacccccanttctggccgccagagaacaaaccccctttgactgtaattttcctttactacccaatcctgtaaatggnccaccc

SEQ ID NO: 117130 - DNA, 410 bp, Homo sapiens
  misc_feature (1)...(410): n = a,t,c or g
gtgcacccaggtgaaataaacagccatgtagctcacacaacgcctgtttggtggtctcttcacacggacgcacatgaaatttggtgccctgactcggatcgggggacctcccttgggagaatcaatcccctgtcctccntgttctttgctccctgagaaagatccacctatgacttcaggtcctcagactgaccagcccaaggaacatctcaccaattttaaatcagcggccaggcgttcctccagaacctcctcccacaggaacttgctacacgtgctggaaatctggcaactggaccaaggaatgcccgcagcccgggatttctaagccgcatcccatctgtgtgggaccccacggaaaatcggactgttcaactcacctggcagccanttccagagccctggaactc

SEQ ID NO: 117131 - DNA, 678 bp, Homo sapiens
atggctgaggaggactcaggaaacttacaaccagaaggtgaaggggaagcaggcacctcttcacatggtggagcaggagagagagtgaaggggaaggtgctacaaacttttaaacaaccagatctcacaaagcagacacgttttatccgtggacccaaaactccggcgccggtcacggactgggaaggcagccttcccttggtgtttaatcattgcagagatgcctctctgattatacacccacatttcaagggtgtcagaccacgcagggacgcctgccttggtccttcacccttagcggcaagtcccgcttttctggggaaggggcaacacgctttaaaaagattaaagcctattatcactcgcctgctacagcatggccttttaaagcctataaactctccttacaattcccccattttacctgtcctaaaaccagacaagccttacaagttagttcaggatctgtgccttatcaaccaaattgttttgcctatccaccccatggtgccaaacccatatactctcctatcctcaatacctgcctctacaacccattattctgttctagatctcaaacgtgctttctttactattcctttgcacccttcatcccagcctctcttcgctttcacttggactgaccctgacacccatcaagctcagcaaattacctag

SEQ ID NO: 117132 - DNA, 5130 bp, Homo sapiens; identical to SEQ ID NO: 116418

SEQ ID NO: 117133 - DNA, 1404 bp, Homo sapiens
atgggagactttaacaccccactgtcaatattagacagatcaacaagagagaaaatcaacaaggatattcaggacttgaactcagctctggaccaagtggacctaatagacatctacagaactctccacctccaatcaacagaatatacattcttctcagcacgacatcacactttttctaaaattaaccacatgattagaaggaaccaaaaaagagcccgtatagccaaggcactcctaagcaaaaagaacaaagctggaggcatcatgctacctgacttcaaactacactacaaggctatggtaaccaaaacagcatgtgacatggatgaagctggaaaccatcattctcagcaaactaacacagaaacagaaacccaaacaccacgtgttctcactcataagtgggaattggacaatgagatcacatggacacagggaggggaacatcacacaccagggcctgtgccacagttgcatggctgtgcactatatcactcctggggattaccatccatttggactgcagaatcagaggagactctagagttgtacgccgtgctggcatctcacaggcaggctctggggtattactgcagtgagacaaaagagacacgttttatccgtggacccaaaactccggcaccagtcacggactgggaaggcagccttcccttggtgtttaatcattgcagggacgcctctctgattatacacccacgtttcaagggtgtcagaccacgcagggatgcctgccttggtccttcaccctttgcagcaagtcccgcttttctggggaaggggaaacacgctttaaaaggattaaagcctgttatcactcgcctgctacagcatggccttttaaagcctataaactctccttacaattcccccattttacctgtcgtaaaaccagacaagccttacaagttagttcagaatctgcgccttatcaaccaaattgttttgcctatccaccccgtgggtgaggctcctgtacctttggaaacaggagggaagagtgggaaggactgcatcttatggtttgagtgccatcttagccacaatacaatagaacaccaggtctcatccagtacattcagaatagtggtggccacaggggtgcttgtgtcactccacccacaactttatatggctcagaatagagagagacatgctgaatgtttgggtgaaagtaagggaagagaacaagagtctctgtcgggtaatccagagaattcaagattttctctactaacatcaaggaggtacctctacaagtcaacaagaactatagtattactaggcttggcaggccccctgaagcagaaaaagcttagatcacagcacccaagcctttacaaatatctgcaaagctttcgcaacaaggacagctacagataa

SEQ ID NO: 117134 - DNA, 1671 bp, Homo sapiens; identical to SEQ ID NO: 114304

SEQ ID NO: 117135 - DNA, 696 bp, Homo sapiens; identical to SEQ ID NO: 116192

SEQ ID NO: 117136 - DNA, 732 bp, Homo sapiens; identical to SEQ ID NO: 116621

SEQ ID NO: 117137 - DNA, 753 bp, Homo sapiens
atgaacagccatgttgctcacacaaagcctgtttggtggtctctttacacggacacgcatgaaatttggtgctgtgactcagatcgggggacctcccttgggagatcaatcccctgtcctcctgttctttgctccatgagaacgatccacctacgacctcaggtcctcagacccaccagcccaaggaacatctcaccatttttaaatcagaccatctgggatgccaagcttcgggtaactctcacagtggaaggatcaggcaatggaaactgtgctacccagcagcagtcctctcgggaaagtgaaatgcaatggggtgaagcagtggaagatcttgaggaaggatgctggggtaggcttgctctgagtggggttttggattctgctgcaccaagcccagagctgagaatctcattcccagatatcaaggtcatggtggccaaagaagcaaacaaagccacaaaaatagcaaaaatgtccaaaatcaaaatggtagaaggtgactcagagggtcattcaatggagatacacactggcaccagtgttagcatgtccaggtcagtcgatttatggtcctccaagtggcttacagcagtggcagttgtgggctatggatggcatgtgcagatgcacaacagtccagttgctggggacagtgaggtcattgccagtaaccctcagccctggcagcagcagtcagcagcagtagcagctcaggcagaggatgtcaatgcagctccagtgatgttgtga

SEQ ID NO: 117138 - DNA, 1566 bp, Homo sapiens
atgaggaccagagaagtcagcataactggagcagattttacagctctactggtagatatcattggcaattctaccagctacctcacagagatttttaagtcaacctccatcctctcagtgaatcaaagcaatgaatcagattgcatcttcatctgtgtgatgacaggaaagtcaggaaggaatctttctgacttctgggagatagaagaaaaatatcccattatcaattacacatttaccagcggcttgtctggtgttctggctttattgctcacacaaagcctgtttggtggtctcttcacacggacgcgcatgaaatttggtgccgtcactcggatcgggggacctcccttgggaaatcaatccccgtcctcctgttctttgctccatgagaaagatccacctacgacctcaggtcctcagacagaccagcccaagaaacatctcaccaatttcaaatccgggaccgaggaagccatgaacactacaagccttttggcgcctgctgctgagataatggccacacctggcagcccatcccaggccagccctacctcgggagcattcacccatggcacacagactccgagtccaaccaaggcaacagcccccagatatccacaaacaggagcgcagagtcgacggccccgccgcttccgccggccccctgcgggggccgcccccaaagcagccgccccacggcacccgcacccgcggggcaccgccccccccccccggcggatatcacctgaatctattcgcccacacccccccccccccctagaccgcggcccccgcccccccgtcacgccgttcctgattgtcctggggtgcttgattctggctgtcctgaccacattcaaggagtatgagactgtctcgggagactggcttctgttactggagacatttgctattttcatctttggagccgagtttgctttgaggatctgggctgctggatgttgctgccgatacaaaggctggcggggccgactgaagtttgccaggaagcccctgtgcatgttggacatctttgtgctgattgcctctgtgccagtggttgctgtgggaaaccaaggcaatgttctggccacctccctgcgaagcctgcgcttcctgcagatcctgcgcatgctgcggatggaccggagaggtggcacctggaagcttctgggctcagccatctgtgcccacagcaaagaactcatcacggcctggtacatcggtttcctgacactcatcctttcttcatttcttgtctacctggttgagaaagacgtcccagaggtggatgcacaaggagaggagatgaaagaggagtttgagacctatgcagatgccctgtggtggggcctgatcacactggccaccattggctatggagacaagacacccaaaacgtgggaaggccgtctgattgccgccaccttttccttaattggcgtctccttttttgcccttccagcgggcatcctggggtccgggctggccctcaaggtgcaggagcaacaccgtcagaagcactttgagaaaaggaggaagccagctgctgagctcattcag

SEQ ID NO: 117139 - DNA, 2678 bp, Homo sapiens
agacaaaggagacatgttttatccgtggacccaaaactccggtgccggtcacggactgggaaggcagccttcccttggtgtttaatcactgcagggacacctctgtgattattcacccacgtttcaaaggtgtcagaccacgcagggacgcctgccttggtccttcacccttagcggcaagtcctgcttttctggggaaggggcaagccgagctaggtcccaattcttcctcagcctctgctcctccaccctataatctttttatcgcctcccctcctcacacctggtccggcttacagtttcgttcggtgactagccctcccccacctgcccagcaatttactcttaaaaaggtggctggagccaaaggcatagtcaagcggctgaagactgacactgcccgatcgccttggaagacccctagaccatcacggacgccgagcttcagaaaagcagaacggactaaaggtcttttaaaaatacacctcaccaagctcagccaccaacttaaaaaggactggacaatacttttaccactttcccttctcagaattcaggcctgtcctcggaatgctacaagactggctactggccaattgggatatccttttatcagtcaaagctatgtcctggtcaatggatttcaaactgttgaggatctatgtgaagctgcagaccttcgagtgagtgttgcagaccttcgagtgagtgttacagctcttaaggtggcgcgtctggagttgttcgttcctcccggtgggctcgtggtctcgctggcttcagcagtgaagctgcagaccttcgcggtgttacagctcataaaagcaaaaagatgggactggggcaccttggagcagggggcggcgctcatcggggaggctcgggacgcacaggagcccacggagggggtgggaggctcaggcatggcgggctgcaggtccagagacctgccccgcgggaaggcagctaaggcccggcgagaaatcgagcgcagcgccgggctgacgatcaagaaggaaagatgcatacgaaatggatacagcaaagaaaaaatgaaactcatagttgtttctcatggcctccatgtaaatgacttgcagcataaactgacgcttttcaccaaggaaacatacacatacctagccagggattcagagaagcagaagcaggggtatctagcaggacttgaaggagcccatgccaacagggtgaaccagcagatcagtgacaacttagtagttaaaacaggggccttaccccctccttatagaaccaagggagaaaagctctatttttatatgtccagacagaactgccttttcagcgtatcagggcaactcctccaaggtttctttcctaatggaggacaagctgcacctaacccttatgctctgctttcccaaataccagaagaagcagaatggtttacagtcctggaccttaaggatgactttttctgcatcccttacatcctgactctcaattcttctttgcctttgaagatccttcgaacccaacgtctcaactcacctggactgttttaccccaaggtttcaggccatctatttggccaagcattagcccaagacttgagccagttctcatacttggacactctcgtcctttgtggggtgttaaagtctcccattattattgtgtgggagttgaatcaaatagacacaataaaaaatgataaaggggatatcaccaccgatcccacagaaatacaaactaccatcagagaatactataaacatctctacacaaataaactagaaaatctagaagaaatggataaattcctcaacacatacaccctcccaagactaaaccaggaagaagttgaatctctgaatagaccaataacaggagctgaaattgaggcaataattaatagcttaccaaccaaaaaaagtccaggaccagatggattcacagccgaattctaccagagggttgctgatgtaaaactgagagaagaaaaagatgaaaatatgctgttggtgcccctctcagatcttctttaccaggtccatgctcccatcccccagctgccagaggtgttggctgctaacagccccacctgccacttggatcctcccactatcacagaatccaagagcaatgaagccaccacaggacgacaagcttcactcaaatgtgaggcctcggcagtgcctgcacctgactttgagtggtaccgggatgacactaggataaatagtgccaatggccttgagattaagagcacggagggccagtcttccctgacggtgaccaacgtcactgaggagcactacggcaactacacctgtgtggctgccaacaagctgggggtcaccaatgccagcctagtccttttcacggggtgctctgctgaccaagccaatccagagaagaacaggcagctcgtgagcctctgccagccagcggcagcagcaggtagagacccagagccagagcccctgaagagttggcgattattcatcttcattgacaaaaccaaagaaaaggttttgatagtattgacattcacttctaaacactggttactagccatgcaagcaccaccaagcccttatcccacctatctggagaaagctttgacttctgaagaggcaagatacaaattaagcttagttaacaatttcccttatacagtcattgcagcctcatga

SEQ ID NO: 117140 - DNA, 1221 bp, Homo sapiens
atggctcagaccagctcatacttcatgctgatctcctgcctgatgtttctgtctcagagccaaggccaagaggcccagacagagttgccccaggcccggatcagctgcccagaaggcaccaatgcctatcgctcctactgctactactttaatgaagaccgtgagacctgggttgatgcagatctctattgccagaacatgaattcgggcaacctggtgtctgtgctcacccaggccgagggtgcctttgtggcctcactgattaaggagagtggcactgatgacttcaatgtctggattggcctccatgaccccaaaaaggatcacaactcctcatcagcaaggaaacaaaactggatagacaatgagtttgatgaattgacagaagtaggcttcagaaggtgggtaataacaaacccctctgagctgaaagagcatgttctaacccaatgcaagaaagctaagaatcttgataaaaggttacaggaactgtttcacgtgactcagaaagagagagactctgtttgcttgggcgaaagtaaggaaaaagaacaagagctgctacctggtaatacagagaattcttccagatcctgtccaagaacatcaaggcagtacctctatgagtatgcaagaaccacagtattactgggcttggagacaaaggagacacgttttatccgtggacccaaaactccggcgccggtcacagactgggaaggcagccttcccttggtgtttaatcattgcagggacacctctctgattattcacccaggtttcagaggtgccagaccacacagggacacctgccttggtccttcacccttagcggcaagtcccgcttttctggggaaggggcaagctgctccttgccaggcggagctaggtcccaattcttcctcagcctctgctcctccaccctataatccttttatcacctcccctcctcacacctggtccggcttacagtttcgttcggtgactagccctcccccacctgcccagcaatttactcttaaaaaggtgcctggagctaaaggcatagtcaaggagcttgctacaagtgccagaaatctggcagccaggccaaggaatgcctgcagcccagaattcctcctaagctgcgtcccatctggggaccccactggaaatcagactgttcaactcatctggcagccactccaagagcccctggaactctggcccaaggctctctga

SEQ ID NO: 117141 - DNA, 1287 bp, Homo sapiens; identical to SEQ ID NO: 114506

SEQ ID NO: 117142 - DNA, 933 bp, Homo sapiens
atggaggagaaggaggagaggaaaaggagaaggaagaggaagaggaggagggaagagggaagagatggggaaagaaaaagaatggagaagcaaaaggagaaccaggatcctaaagatccacctacgacctcaggtcctcagaccgaccagcccaagaaacatctcaccaatttcaaatccgagacaaaggagacacgttttatccgtggacccaaaactccggcgccagtcacggactgggaaggcagccttcccttggtgtttaatcattccagggacacctctctgattattcacccaggcttcagaggtgtcagaccacgcagggacgcctgccttggtccttcacccttagcggcaagtcccacttttctggggaaggggccagctgctcctcgccagaccgagctaggtcccaattcttcctcagcctccgctcctccaccctataatccttttatcgcctcccctcctcacacctggtccggcttacagtttccttccatgactagccctccccctcctgcccagcaatttactcttaaaaaggtggctggagctaaaggcatagtcaaggatttaattaacctcaccttcaaggtgtacaataatagaaaaaagttgcagttccttgcctccactgtgagacaaaccccagccacatctccagcacacaagaacttccaaacgcctgaactgcagcagccaggtgttcctccagaacctcctccccgaggagcttgctacaagttccagaaatctggccaccgggccaaggaatgcctgcagcccaggattcctcctaagccacatcccatctgtgtgggaccccactggaaatcggactgtccaactcacctggcagccactcccagagcccctggaactctggcccaaggctctctgactccttcccagatcttcttggcttag

SEQ ID NO: 117143 - DNA, 1317 bp, Homo sapiens
atgagtgaactcccattcacaattgcttcaaagagaataaaatacctaggaatccaacttacaagggatgtgaaggacctcttcaaggagaactacaaaccactgctcaaggaaatcaaagaggatacaaacaaatggaagaatattccatgctcatgggtaggaagaaccaatatcatgaaaatggccatactgcccaaggtaatttacagattcaatggcatccccatcaagctaccaatgcctttcttcacagaattggaaaaaaatactttaaagttcatatggaaccaaaaaagagcccgcatcgccaagtcaatcctaagccaaaagaacaaagctggaggcatcacactacctgacttcaaactatactacaaggctacagtaaccaaaacagcatggtactggtaccaaaacagagatatagatcaatggaacagaacagagccctcagaaataatgccgcgtatctacaactatctgatctttgacaaacctgagaaaaacaagcaatggggaaaggattccctatttaataaatggtgctgggaaaactggctagccatatgtagaaagctgaagctggatcccttccttaaaccttatacaaaaatcaattcaagatggattaaagacttaaacgttagacctaaaaccataaaaaccctagaagaaaacctaggcaatactattcaggacataggcatgggcaaggacttcatgtctaaaacaccaaaagccaaaattgacaaatgggatctaattaaactaaagagcttctgcacagcaaaagaaactaccatcagagtgaacagcttatactgctttacctcggagagggtacagtcaacatcagctccaagggaagaaaatgatcaggaggaagagaataaagagaaggaagaaaaggaagaggaggaagaagaatatcacaacccatctgacctctcccctcctccccaggctgctcctcgccaggccaagctaggttccaattcttcctcagcctccgctcctccaccctataatccttttatcacctctgctcctcacacctggtccggcttacagtttcgttctgtgactagccctcccccacctgcccagcgatttactcttacaaaggcggctggagctaaaggcatagtcaagcccgggattcctcctaagccgtgtcccatctgtgcgggaccccactggaaatcggactcttcaactcacctggcagccactcccagagatgctggaactctggcccaaggctctctgactgactccttcccagaccttctcggcttagcagctaaagactga

SEQ ID NO: 117144 - DNA, 771 bp, Homo sapiens; identical to SEQ ID NO: 114661

SEQ ID NO: 117145 - DNA, 2241 bp, Homo sapiens
atggcagaggcaatggcaaaattgggatctgagagaaaaaaagagcagggattaattcaggaactgaaacaaaatcagtctctggaactctggtatgagaacaggaaaggcaaaatcaagactggagaatcaggtgatggagagcctgacgcgagtgaaatttggtgccatgactcagatcgggggacctcccttgggagatcaatcccctgtcctcctgctctttgctccatgagaaagatccacctacaacctcaggtcctcagaccgaccagcccaagaaacatctcaccaatttcaaatccgagacaaaggagacacattttatccatggacccaaaactccggcgccggtcatggacttgggtaggcagccttcccttggtgtttaatcattgcagggacgcctctctgattattcacccaggtttcagaggtgtcagaccacgcagggacgtctgccttggtccttcacccttagcgaccatcacagatgccgagctttatgtaactctcacagtggaggggaagtccatccccttcttaatcgatacagaggctacccactccacgttaccatcttttaaagggcctgttgcccttgcctccatacatgtgcagaatgtgcagatcaaaagagacaaagaaggccattacataatggtaaagggatcaattcaacaagaagagctaactatcctaaatatgtatgcacccaatacaggagcacccagattcataaagcaagtccttaatgacctgcaaagagacttagactcccacacaataataatgggagactttaacaccccactgtcaacattagacagatcaacgagacagaaagttaacaaggatatccaggacttgaactcagctctgcaccaagcagatctaatagacatctacagaactctccacaccaaatcaacagaatgtacatttttttcagcaccacaccgcacctattccaaaattgaccacatagttggaagtaaagcactcctcagcaaatgtaaaagaacagaaattataataaattgtctctcagaccacagtgcaatcaaactagaactcaggattaagaaactcactcaaaaccactcaactacatggaaactgaacaacctgctcctgaatgactactgggtacataaagaaatgaaggcagaaataaagatgttctttgaaatcaacgagaacaaaaacacaacataccagaatctctgggacacattcaaagcagtgtgtagagggaaatttatagcactaaatgcctacaagagaaagcaagaaagatccaaaattgataccctaacatcacaattagaagaactagaaaagcaagagcaaacacgttcaaaagctagcagaagggaagaaataactaaaatcagagcagaactgaaggaaatagagacacaaaaaacccttcaaaaaattaatgaatccaggagctggttttttgagaagatcaacaaaattgatatactgctagcaagactaataaagaagaaaagagagaagaatcaaatagacgcaataaaaaatgataaaggggatatcgccaccgatcccacagaaatacaaactaccatcagagaatactacaaacacctctgcccaaataaactagaaaatctagaagaaatggataaattcctcgacacatacaccctcccaagactaaaccaggaagaagatgaatctctgaatagaccaataacaggctctgaaattgtggcaataatcaatagcttaccaaccaaaaaaagtccaggaccagatggattcacagcaaaattctaccagaggtacaaggaggagctggtaccattccttcagaagtacaaggaggagctggtaccattccttctgaaactattccaatcaatagaaaaagagggaatcctccctaactcattttctgaggccagcatcatcctgataccaaagcctggcagagacacaaccaaaaaagagaattttagaccaatatccttgatgaacattgatgcaaaaatcctgaataaaatattggcaaaccaaatccagcagcacatcaaaaagcttatccaccatgatcaagtgggcttcatccctgggatgcaaggctggttcaacatacgcaaatcaataaatgtaatccagcatataaacagaaccaaagacaaaaaccacatgattatctcaatagatgcagaaaaggcctttgacaaaattcaacaaccttcatgctaa

SEQ ID NO: 117146 - DNA, 642 bp, Homo sapiens; identical to SEQ ID NO: 115470

SEQ ID NO: 117147 - DNA, 2664 bp, Homo sapiens
atggacccgctgagcatgagcattcatcaggtggtgctcaggcctgatgaacagggcccaggccaggaacaacagcctcccctttatgtgatggagcctggtgaaataaacagctttattgctcacacaaagcctgtttggtggtctcttcacacggacgcgcatgaaatttggtgccatgactcggatcgggggacctcccttgggagatcaatcccctgtcctcctgctctttgctctgtgagaaacatccgcctacgacctcaggtcctcagaccgaccagcccaagaaacatctcaccaatttcaaatccgagacaaaagagacatgttttatccatgaacccaaaactctggcgccggtcacggactgggaaggcagccttcccttggtgtttaatcattgcagggacggcctctctgatcattcagccacatttcaagggtgtcagaccatgcagggatgcctgccttggtccttcacccttagcggcaagtcccgcttttctggggaaggagcaaaccatcacggacaccgagcttcgggtaactctcacagtggaagctgataacactttggccctgggagctgcatcccccatcacagggcctacatggaggaagtccaagatcaaggcactggcagattcagtgtctggtgagggcctgctttccagctcagagacagctgccttttgctgtagctcttcagtttctcaaacatgctatgccccttctcagatctggttctttgcacaagctgtccccctgcctgggaataatgacaagaaaaaaaaggtcggtacatgttcaacacagacaaaaccatcctgttttttccaaacattttccattcccatttggttgaatccacgaatgcagaacccatggagacagagggctgacagtatttcactctgtggcacaggatcggcccagtttgctgtttctgcctattctgctctaagactttttcatgaccaaaaaaatgaaagctatatggataccttgatccgacgtctacagctatattctcgaaacctggaacatctggtagaggaaaggacacagctgtacaaggcagagagggacagggctgacagacttaactttatgttgcttccaaggctagtggtaaagtctctgaaggagaaaggctttgtggagccggaactatatgaggaagttacaatctacttcagtgacattgtaggtttcactactatctgcaaatacagcacccccatggaagtggtggacatgcttaatgacatctataagagttttgaccacattgttgatcatcatgatgtctacaaggtggaaaccatcggtgatgcgtacatggtggctagtggtttgcctaagagaaatggcaatcggcatgcaatagacattgccaagatggccttggaaatcctcagcttcatggggacctttgagctggagcatcttcctggcctcccaatatggattcgcattggagttcactctggtccctgtgctgctggagttgtgggaatcaagatgcctcgttattgtctatttggagatacggtcaacacagcctctaggatggaatccactggcctccctttgagaattcacgtgagtggctccaccatagccatcctgaagagaactgagtgccagttcctttatgaagtgagaggagaaacatacttaaagtacaaggttcttttgacctatgatacccacgtaaataagacctatcctgtggatatgagccccacattcacttggaagaactctaaacttcctaatgatattacaggccggggccctcagatcctgatgattgcagtcttcaccctcactggagctgtggtgctgctcctgctcgtcgctctcctgatgctcagaaaatatagaaaagattatgaacttcgtcagaaaaaatggtcccacattcctcctgaaaatatctttcctctggagaccaatgagaccaatcatgttagcctcaagatcgatgatgacaaaagacgagatacaatccagagactacgacagtgcaaatacgacaaaaagcgagtgattctcaaagatctcaagcacaatgatggtaatttcactgaaaaacagaagatagaattgaacaaggtatgtagcccttacttcaaacccttgagaaataacttcacttcatttcctctaatcactgaggttgctggtggattgcttcagattgactattacaacctgaccaagttctacggcacagtgaaacttgataccatgatcttcggggtgatagaatactgtgagagaggatccctccgggaagttttaaatgacacaatttcctaccctgatggcacattcatggattgggagtttaagatctctgtcttgtatgacattgctaagaggacagcactgagactcagatttgtccaagaagacctgtggacagctccagagcacctccgccaagccaacatctctcagaaaggagatgtgtacagctatgggatcatcgcacaggagatcatcctgcggaaagaaaccttctacactttgagctgtcgggaccggaatgagaagattttcagagtggaaaattccaatggaatgaaacccttccgcccagatttattcttggaaacagcagaggaaaaagagctagaattttttacttaa

SEQ ID NO: 117148 - DNA, 513 bp, Homo sapiens
atgaatcttaatagaaatgcacttgtgctgactctgttttcggactcagcccgcctgcacccaggtgaaataaacagccatgttgctcacacaaagcctgtttggtggtctcttcacatggacacgcatgaaatttggtgccgtgactcggatcgggggacctcccttgggagatcaatcccctgtactcctgttctttgctctcacgctttaaaaagattaaagcctgttatcactcgcctgctacatcatggccttttaaaacctataaactctccttacaattaccccattttacctgtcctaaaaccagacaagccttacaagttagttcaggagctgtgccttatcaaccaaattgttttgcctatccaccctgtggtgcccaacccgtaccctcttttgtcctcaataccttcctccacaactcactatgccgtgcttgatcttaaagatgcttttttcactattcccctgcacccctcatcccagcctctctttgctttcacttag

SEQ ID NO: 117149 - DNA, 667 bp, Homo sapiens
  misc_feature (1)...(667): n = a,t,c or g
gcacccgcccggttttgccggctccacccacgcgtccggtgctctctagttatgtctctggaatttattaggaaaggatgcaaatatgaccaatggaaagcaagttctactgtatttcattcaatttttaatatctatgtatgtatttcaggataccatggatttcaaaattaaaatgtaatttacatgttaatcataatttgaagatattttaggaggataaaccatgaacctctgcattaatgtcttaggagtgaaataaatttttccctgtttatgtctcagggctaagttttcacacgtagaacataccacgagggatctttcttcttgaaggaattacannnnnnnnnnnnnnnnnnnnnnnnnnnnnnnnnnnnnnnnnnnnnnnnnnnnnnnnnnnnnnnnnnnnnnnnnnnnnnnnnnnnnnnnnnntttggtaccgtgacttggatcgggggacctcccttgggagatcaatacccagtcctcctgctctttgctctgtgagaaagatccccctacgacctcaggtcctcagaccaaccagcccaagaaacatctcgccaatttcaaatccggaccccactggaaatcgcactgtccaactcacctggcagccagtcccagagcccctggaactctggcccaaggctctctgactcct

SEQ ID NO: 117150 - DNA, 428 bp, Homo sapiens
  misc_feature (1)...(428): n = a,t,c or g
tcccctgtactcctgttctttgctccgtgagaaagatccacctatgacctcaggtcctcagaccgaccagcccaaggaacatctcaccaattttaaatcagaaggcaggaannnnnnnnnnnnnnnnnnnnnnnnnnnnnnnnnnnnnnnnnnnnnnnnnnnnnnnnnnnnnnnnnnnnnnnnnnnnnnnnnnnnnnnnnnnnnnnnnnnnnnnnnnnnnnnnnnnnnnnnnnnnnnnnnnnnnnnnnnnnnnnnnnnnnnnnnnnnnnnnnnnnnnnnnnnnnnnnnnnnnnnnnnnnnnnnnnnnnnnnnnnnnnnnnnnnnnnnnnnnnnnnnnnnnnnnnnnnnnnnnnnnnnnnnnnnnnnnnnnnnnnnnnnnnnnnnnnnnnnnnnnnnnnnnnnnnnntctcgtgccgaattcgtcaggg

SEQ ID NO: 117151 - DNA, 437 bp, Homo sapiens; identical to SEQ ID NO: 114503
  misc_feature (1)...(437): n = a,t,c or g

SEQ ID NO: 117152 - DNA, 576 bp, Homo sapiens; identical to SEQ ID NO: 115923

SEQ ID NO: 117153 - DNA, 864 bp, Homo sapiens; identical to SEQ ID NO: 115468

SEQ ID NO: 117154 - DNA, 801 bp, Homo sapiens; identical to SEQ ID NO: 114663

SEQ ID NO: 117155 - DNA, 480 bp, Homo sapiens
tgtctaagaattgggaggacctaggacatctgattagagagtgcataaggaggttcagcatagccctgccagcaaagatgatttatttacttttaagagttgagaatggcggtttggggatagcaccccggagatatccagctgtggtggcttggagaaacagtgtaaaccggcagtgtaaacaagagcagggcatgtatgagtagttgagaccggtgaataggagtatgactagacagaagatagtagggatgccaagtttttgggggcgcagtccaagttggtctggtgtctggaatgagactggggcctaataaaaaggagcatctatacaggagctcaaatgggctgtatcctgtcgcattccgaagacaggcccgaattctgagaagggcaagtggtaaaagtattatccagtcctttttaagttggtggctgagcttggtgaggtgtgtttttaaaagaccagtagtccgttct

SEQ ID NO: 117156 - DNA, 756 bp, Homo sapiens
atgggttcatggctacaaggactaagggctatggtttttgcactgaactacatggttaccagagttagaaacaaaaaagatccacctacaacctcaggtcctcagacccaccagcccaagaaacatctcaccaatttcaaatccgagacaaaggagacacgttttatctgtggacccaaaactccggcgccgctcatggactgggaaggcagccttcccttgatgtttaatcattgcagggacacctctctgattattcacccatgtttccaaggtgtcagaccatgcagggacgcctgccttagtccttcacccttagcggcaagtcccgcttttctggggaaggggcaagtacccctcaaccccttcttcacccttagtggcaagtcccgcttttctgggggaggagcaagtaccccaaccccttctttccatgtctctacgccttctctgcttttctggggaaggggcaagtacccctcaaccccttcttcacccttagtggcaagtcccgcttttctggggaaggggcaagtacccctcaaccccttcttcacccttagtggcaagtcccgcttttctggggaaggggcaaaagcccccgagaccatcacggatgccgagcttcgggtaactctcacagtggaggctgctgtatgttcaaccatcgccttaagcctagggtgggaaattcttcctcgacactggggtaaagaggaggtaaccaaaacaatttattatcctgtgattccataa

SEQ ID NO: 117157 - DNA, 756 bp, Homo sapiens
atgggggcaactcacccttttgagctgttgacaaagatgacttcccagggaagtgacatatcgggggacctcccttgggagatcaatcccctgtcctcctgttctttgctccatgagaaagatccacctacaacctcaggtcctcagaccgaccagcccaagaaacatctcaccaacttcaaatccgagacaaaggagacacattttatccgtggacccaaaactccagtgctggtcacggactgggagggcagacttcccttggtgtttaatcatagcagggatgcctctctgattattcacccacgtttcagaggtgtcagaccacgcagggatgcctgccttggtccttcacccttagcagcaagtcctgcttttctggaggaggggcaagtaccccaaccccttctctccatgtctcttaccccttctctgcttttctggaggagaggcaagaagccctcaaccccttcttcacccttagcagcaagtcccgcttttctggaggaagggcaagtaccccaacctcatatctctgtgccccgatcccttatttctacaccccaacctcttataactttgcaccccgacccctttcccgcttttctggaagacagtaaggaagtactcaagcaacaaccaaaagggagaataaaacactgtgctgatggaggtatgtccaaggagcccaagaaccaactgaaaggactcccagtgaccaaagctggaaacattcatggaataaacgacatttga

SEQ ID NO: 117158 - DNA, 1189 bp, Homo sapiens
atgatcgggtcagagaaaaagcacaaggcagctcagaggtattacttctcagtatggcatccccatttgaaacagctgcaaaacaagccacagcttgggaatgtggcaaggtttcagcagcgtggaggtgaaaggcaagagttgcatggacagattctctgcaaggtgctgagcaaggtagcagacatgccaggtcttgagtgcattgtgtctagaggtagagcacagaggaggaaaagggggattctgaggcgatcgggcagcttcagtcttcagctgctaagccaagaaggtctgggaaggagtcagagagccttgggccagagttccaggggctctgggagtggctgccaaggtgagtgggacagtccgatttccagcggggtcccgcacagatgggacacagcttaggaggaatcctgggctgcaggcattccttggcctggtggccagatttctggcacttgtagcaagctcttgccccttcccccagaaaagtgggacttgctgctaagggtgaaggaccaaggcaggtgtccctgcgtggtctgacacctctgaaacctgggtgaataatcagagaggcatccctgcaaaggttaaacaccaagggaaggctgccttccctagtccatgaccggtgccggagttttgggtccacggataaaacgtgtctcctttttctccgatttaaaattggtgagatgttccttgggctggtcggtctgaggacctgagcttgtaggtggatctttctcatggagcaaagaacaggaggacaggggattgatctcccaagggaggtccgccgatctgagtcacggcaccaaatttcatgcgcgtctgtgtgaagagaccaccgaacaggctttgtgtgagcaacatggctgtttatttcacccaccaccaccacttgccagctctcgaaaactttactagtgccattgaactttctggagaaacaatatctaacatttcttcttttcctggaatttccaaccttctctttgttcttccgacatactgaagaccacctcatgagatctggttgtttaaaagtgtgtagcatctctcctctctctctcttcctcctagctccagccatgtgagacatctcaccccctctttgccttttgctatgattgtaagtttcctgagagctccccagaagctgagcagatgatgccat

SEQ ID NO: 117159 - DNA, 1143 bp, Homo sapiens
atggacccgctgagcatgagcattcatcaggtggtgctcaggcctgatgaacagggcccaggccaggaacaacagcctcccctttatgtgatggagcctggtgaaataaacagctttattgctcacacaaagcctgtttggtggtctcttcacacggacgcgcatgaaatttggtgccatgactcggatcgggggacctcccttgggagatcaatcccctgtcctcctgctctttgctctgtgagaaacatccgcctacgacctcaggtcctcagaccgaccagcccaagaaacatctcaccaattttaaatcaggagagacaaaggagatgcattttattcgtggacccaaaactccggtgccagtcacggactgggaaggcagccttctcttggtgtttaatcattgcagggacggcctctctgatcattcagccacatttcaagggtgtcagaccatgcagggatgcctgccttggtccttcacccttagcggcaagtcccgcttttctggggaaggagcaagctgctccttgccaggctgagctaggtcccaattcttcctcagcctctgctcctccaccctataatccttttatcacctcccctcctcacacccggtccggcttacagtttcgttccgtgactagccctccccctcctgcccagcaatttactctgaaaaaggtggctggagctaaagacatagtcaaggcttctttggcaccagccttggctcaaggggtcccaggtacacctcaggccactgcttcagagggtgcaagccttaaatcttgggagtgtctatgtggtgttaaccttgcaactgcacagagtgcaagggtgaaggaagcttgtcaggaagcttgtcagtctctacctagatttcagaggatgtatgagaaagcctgggtgcccaagcagaagactactgcagaagtggagctctcacagagagcctctactagagtagttctaagaggaaatgtggggttggagtccccaagcagagtcttctctatagcactgtctagtggagctgtgggaggggttcactgtccttcagaccacagaatgatagagccagcagctttcaacctcagtatgaaaaatccacagaggcaaagctgcctaagggcttag

SEQ ID NO: 117160 - DNA, 2256 bp, Homo sapiens
atgtggccacaagccaagggacacaggcagccgccagcgctgagagaggcaagaacagattctcctttagagcccttgaagggagggtgccctactgagtttcagacttctagcccccagaactatagcaagaagttcttctccttgctgagtgtcacttcctacagttccttcgccttccacaagttttctgtagctgtttacaacatttctaacctgaagacagtggaccccgccaaattccccacaaggtattgctactgtttaaacaatcggaccaatgacttatcagattttacagctctactggtagatatcattggcaattctaccagctacctcacagagatttttaagtcaacctccatcctctcagataatcagtgtggtccagtttccacaccagtaaatgcaccaatatttaagtcttcatatttctgggatccacaaagttggaggaagaatccaaagctcaaaagtttaaggaacgtaggcagactcaagaaaacatctggaaggaatctttctgacttctgggagatagaagaaaaatatcccattatcaattacacatttaccagcggcttgtctggtgttttggctttattgctcacacaaagcctgtttggtggtctcttcacacggacgcgcatgaaatttggtgccgtcactcggatcgggggacctcccttgggaaatcaatccccgtcctcctgttctttgctccatgagaaagatccacctacgacctcaggtcctcagacagaccagcccaagaaacatctcaccaatttcaaatccgaggcaaaggagatatgttttatccgtgaacccaaaactccagcgccggtcacggactgggaaggcagccttcccttggtgtttaatcattgcagggatgcctctctgattatacactcacgtttcaagggtgtcagaccacgcagggatgcctgccttggtccttcacccttagcggcaagtcccatttttctggggaaaaggcaacacgctttaaaaagattaaagcctgttatcactcacctgctacagcatggccttttaaagcctaaaaactctccttacaattcccccattttacctgtcctaaaaccagacaagccttacaagtttgttcaggatctgtgccttatcaaccaaattgttttgcctatccaccccatgctgtactcactctttgttgagtctcccacaattaccattgtttctggcccggacttcaatccggcctcccacattattccggataccacacctgaccctcatgactgcatctctctgatccacctgatgctctccccatttccccacatttccttcttccccatttctcaccctgatcacacttggtttattgatggcagttccaccaggcctaatcgccactcaccagcaaaggcaggctatgctatagtacaagccactagcccgcctcttagaacctctcatttcctttccatcgtggaaatctatcctcaaggaaatcacttctcagtgttccatctgctattctactacccctcagagattgttcaggccccctcccttccctacacatcaaactcggggatttgccccacccaggactggcaaattgatattactcacatgccccaagtcagaaaactaaaatacctcttagtcttggtagacacagggtctaagaaggcgaccgtggtcatttcttcccttctgtcagacataattcctcggtttggccttcccacctctatacagtctgataacggaccagcctttattagtcaaatcacccaggcaatttctctagctcttggtattcagcgaactcatggtcttttaaaaactcacctcaccaacctcagccaccaacttaaaaaggactggacaatacttttaccactttctcttctcagaattcaggcctgtcctcggaatgctacaggactgcacagtgatggagaggcccgaagctccttccaggctcaccatttcaacttcatcacacatgggacagtccctgatgtttttgttccaattttacaactcctgaatgaggactttgaagatccatgcttgggttacttgcctagccctgagatcagtatttgtctagaaccaactagttggagtaaggacaggagctgttcttcaggagaggagggaagtgctgggcagacagtaacgggtgacctccacaaagctcagactcctgaattggaccagccagcctccttgaactgccctgatttataa

SEQ ID NO: 117161 - DNA, 966 bp, Homo sapiens
  misc_feature (1)...(966): n = a,t,c or g
gaattcggcacgagaatagccaganaacggcactttcaatttttccatcctgcaagatctaaataattcttgttgtaaaatgggcaaatggtctgaggtgcctgacgtccaggcattcttttacacatcagtcccctcctagtctctgtgcccagtgcaactcctcccaaatcttctttctttccctcccgcctgtcccctcagtaccaaccccaagtgtcgctgagtctttctaatcttccttttctacagacccatctgacctctcccctcctcgacaggctgagctaggtcccaattcttcctcagcctccactcctccaccctataatctttttatcgcctcccctcctcacacctgttccggcttacagtttcattccgtgactagccctcccccaacttgctcagcaatttactcttaaaaaggtggctggagccaaaggcatagtcaaggttaatgctcctttttctttatcccaaatcagatagcatttaggctctttttcatcaaatataaaaatccagcccagttcatgactcctttggcaacaaccctgagacactttacagccctagaccctaaaaggtcaaaaggccgtcttattctcaaaatacgttttattacccaatctgctcctgacattaggaaaaaacttcaaaaattagaatctggccctcaaaccccacaacaggaattaatcaaccttgccttcaaggtgtacaataatagagaggaagcagccagacggcaatgcatttctgagttacaattacttgcctccactgtgagacaaaccccagccacatctccagcacacgagaacttccaaacgcctgaaccgcagcagccaggcgttcctccagaacctcctcccccaggagattgctacaagtgccagaaatctagccaccaggccaaggaatgcccgcagcccgggattccttctaagccacgtcccatct

SEQ ID NO: 117162 - DNA, 2009 bp, Homo sapiens
atgatgaaggagaccaacaactcctttctgaagtttcagcccacttcccgcagggaagagacaaaggagacatgttttatccgtggacccaaaactccggtgccggtcacggactgggaaggcagccttcccttggtgtttaatcattgcagggatgcctctctgattattcacccacatttcaaagcctgtattcttaagaacttaaaacctcttcaactctcacctgacctaaaatctaagcgtcttttttcttctgcaatgccgcttgaccccagtacaaactcgacagtagttacaaattgccagaaaaacggcactttcaatttttccatcctacaagacctaaataattcttgtcgtaaaacgggcaaatggtctgagcatgctttgaaaggattaaagcctgttatcactcgcctgctacagcatggccttttaaagcctataaactctccttacaattcccccattttacctgtcctaaaaccagacaagccttacaagttagctcaggatctatgccttatcaaccaaattattttgcctatccaccccatgatgttactaggggagatatcagtcaccaaggccttggctggctccctgataaaagcccttgcagtattccacactgcagaatccccaggctatgctctcctggattcttactacctgctccagaaagggagtgtttgcatctccatcctccaagaagaggaagcattttcttggccggggaaaggagagtgtcgagataagtcctgggcctctctgggcctaatacccgcatttccccagggaggacagtggaaacaggccctggggcttctggaccacagctgcctctgctttggggaattaggcaccaggttggcagccccagcatccttcagcaccttcccaataacaaaccgagagcgggagagaaaaactgacaagctgattccaaaattcatgtggaaatgcaagggacccagaataaccaaaacaatcttggaaaagaatgaagttggagaatttacacttcttgatttcaaaacttaccacaaatttgcagtaatcaaaactatgtggtactggcataaggacagatacattgatcaacagaatgacattgaaagtccagaaataaattcatatgtttatggtcaactgatttttgacaaagactcagcccgcctgcacccaggtgaaataaacagtcttgttgctcacacaaagcctgtttggtggtctcttcatatggacgcgcatgaaatttggtgccgtgactcggattgggggacctcccttgggagatcaatcccctgtcctcctgctctttgctccatgagaaagatccacctacgacctcgggtcctcagaccgaccagcccaaggaacatctcaccaattttaaatcgggtttcagaggtgtcagaccacgcagggacgcctgccttggtccttcacccttagcggcaagtcccgcttttctggggaaggggcaagtaccccaaccccttctctctgtgtctctaccccttctccgcctttctggggggcaagaaacacccaaccccttctccttcaccctgagtggcaagtccgcttttctagaggagcaagtaccccaacctcgtatctctgtgccccagtcccttatttccacgccccgacctcttatctctgtggcccaatcccttatttctgcaccccaacctcttatatctctgtgccccaatcccttatttccatgccccgacctcttatctctgcaccccaaccccttatttccacgacccaacccctttcccgcttttctggaaggagcttgctacaagtgccagaaatctggccaccaggccaaggaatgcctgcagcccgggattcctcctaagctgcgtcccatctgtgcgggaccccactggaaatcggactgtccaactcacctggcagccactcccagagcccctggaactctggcccaaggctctctgactgcttcccagatcttcttggcttag

SEQ ID NO: 117163 - DNA, 3123 bp, Homo sapiens
atgactaatgcagagcattataagcatagtctccatgcttatggagcatgggccattatggcccagtgggaaatggagaattgtaaacatgaagagggaacttttccagtaagctcggggagggagcggcagagagggggagaagttactagaacccaatgctgcaatggcccccagcatatcctaagagtgtccaggttcttcacagaacctgacggtcttaatatcattggtgattattctgggcctgctcaagcagccacacaactacctatgagttggatgctgttgcatttgggctacccggaaaggaaagagatgcccttgggcaaagcagctgtctatggcaagcacactctgaaggagctgacagctggaggcaagtccttccctccagaaagggcatttgggcagtgcatctcctgtcctaccactttcttcatctgcaaaatggggatcatgatagtaccagcttgcagggttaaatgttcttccacactgactctgggcctagccatgtgtcctgttttggtccatgtgacatcagctaacataacccaagcagagacttgctgcccattttctctgaatggtggcccagcacctggagggacagagtacaaaggactctggcatgttgaattcctcaagcaacctgctggtaagcatggactctatgatgcgccagcaacacgttttgctttatccaacacatgtcctgttaagtcacggactagtgtggtctatgggctggcagaggtgaaaagatctcccttttcatgtagcttgcccacctacttacagcgttgcatcacagggtcaagtgtttctcctccacttcacgcagctcgggagccctcttgtctggaaaggctcttccctgctggtgcctccaggctgggctggttgttgctcctctatgctcccgaggtcctcagtgcctgcctttatcagaacagaggccacagcgcaccttggttaaatgtacagtctctgggaccagactgcctggactcacaactctggctccgccatttacagcccacctgcacccaggtgaaacaaccagccatgttgctcacacaaagcctgtttggtggtctcttcacacagacgcgcatgaaatttggtggatcaggggacctcccttgggagatcaatcccctgtcctcctgctctttgctccatgagaaagctccacctaccacctcaggtcctcagactgaccagcccaagaaacatctcaccaatttcaaatccgaagcgtttaggctgtttttcatcaaatataaaaatccagcccagttcacggctcgtttggcagcaaccctgagacgctttacagccctagaccctaaaagagaacaaccccctttgactgtaattttccattaccttcccaaatcctataaaacggccccacccccatctcccttcgctgactctcttttcggactcagcccacctgcacccaatgaaataaacagccatgttgctcacacaaagcctgtttggtggtctcttcacacggacgcgtatgaaatttggtgccgtgactcggatcgggggacctcccttgggagatcaatcccctgtcctcctgttctttgctccgtgagaaagatccacctacgacctcaggtcctcagacccaccagcccaaggaacatctcaccaattttaaatcagacaaaggagacatgttttatccgtggacccaaaactccagtgccggtcacggactgggaaggcagccttcccttggtgtttaataactgcagggacacctctctgattatacacccacgtttcaagggtgtcagaccacgcagggatgcctgccttggtccttcacccttagcggcaagtcccgcttttctggggaaggggcaagctgctcctcgccaggccgagctaggtcccaattcttcctcagcctctgctcctccaccctataatctttttatcacctcccctcctcacacctggtccggcttacagtttcgttctgtgactagccctcccccacctgcccagcaatttactcttaaaaaggtggctggagccaaaggcatagtcaagaccatcacagacgccgagcttcgggtaactctcacagtggaaggccgagacagtttaactaaattatctgcttccctgacgattcctggactacagccacatctcattgccgtccttctccccaacccaaagcctccttcgcgtcttcctctcatatccccctaccttaacccacaagtatgggacatctctactccttccctggcaactgatcacatgcccattaccatcccattaaaacctaatcacccttaccccactcaacgccaatatccaatccctcagcacgctttaaaaggattaaagcctgttatcactcgcctgctacagcatgggcttctaaaacctataaactctccttaccattcccccattttacctgtcctaaaaccagacaaggcttacaagttagttcagaatctgcgccttatcaaccaaattgttttgcctatccaccctgtggtgcccaacctgtacactcttttgtcctcaataccttcctccacaactcactattctgtgcttcatcttaaagatgcttttttcactattcccctgcacccctcatcccagcctctctttgctgtcacctggactgaccctgacacccaacagtcccagcagcttacctgggctgtgctgccgcaaggtttcagggacagccctcattacttcagccaagctctttctcatgatctactttctttccacccctctgcttctcaccttattcaatatattgatgaccttcttctttgtagcccctcctttgaatcttctcaacaagacacacttctgcttcttcagcatttattctccaaaggatatcagtctgatgacagaccagcctttactagtcaaatcacccaagcagtttctcaggctcttggtattcagtggaaccttcatatcccttaccatcctcaatcttcaggaaaggtagaatggactaatggtcttttaaagcttctgctcctacttctgactgctaatatcgatgacaccagttatctgcaaattcctcataaggggctccaatga

SEQ ID NO: 117164 - DNA, 2867 bp, Homo sapiens
atgcagaaacgactttggaactgggtaacaggcagagattggaacagtttgcagggctctgtagaagataggaagatgcgagaaagtttggaactctctagagacttaccgaatggctttgaccaaaatgctgataatgatattaatgatgaaaaccaggctgaggtggtctcagatagagatgaggaacttgttggtaactggagcaaagggactcctgaggattacccacgatttttccatatgcatcctaggacagcagaacttagtctcctggagccagtaaacagagactttcaccagaaatttgatttggttattaaggctgaacaagacaatggtcatcctcttcctgcctttgccggtctacacattgaaatactggatgaaaacaatcaaagtccatattttacaatgcccagttatcaaggctatatcctggaatctgccccagtgggagcaaccatttcggacagtctcaatttgacttcacctttaagaatagtagctctggacaaggacatagaagatacaaaagacccagagcttcacctttttctgaatgactacacctcagtcttcaccgtcacacagactggtattactcgctacctcaccttacttcaaccagtggacagggaagaacagcaaacttacaccttttcgataacagcatttgatggtgtacaagaaagtgagccagtcatcgtcaatattcaagtgatggatgcaaatgataacacgccaaccttccctgaaatatcctatgatgtgtatgtttatacagacatgagacctggggacagtgtcatacagctgctgatggcaacaaaagacactggggactactatggagggagagagggagaagagacaattgaaaaattaactattgtgtactatactcagtatctgggtgacagaatcaatcataccccaaacctcaacatcatgcaatatacccagggggcttccgaggcgatcaagcagtgtcagtcttcagctgctaagccgagaagatctgggaaggagtcagtcagagagccttgggccagatttccaggggctctgggagtggctgccaggtaagttgaacagtccgattttcggtggggtcctacacagatgggacgcggcttaggaggaatcccgggctgcgggcattccttggcccagtggccagatttccggcacatgtagcaagctcctgtgggaggaggttctggaggaacgcctggccgctgcggttcaggcatttggaagttcttgtgtgctggagatgtggctgcggtttgtctcacagtggaggcaaggaattgcaacttttttctattattgtacaccttgaaggcgaggttaattaaatcttgccccttctccagaaaagcgggacttgccgctaagggtgaaggaccaaggcaggcatccctgcgtggtctgacacccttgaaacatgggtgaataatcagagaggtgtccctgcaatgattaaacaccaagggaaagctgccttcccagtccgtgaccggcgccagagttttgtgtccacggataaaacgtgtctcctttgtctgtctcagaaaatgaaaggaattgaaattaagagaagggagagattgaagagtggaaaggagaaagtgtggttgagggacagtgagagaggctgcatgctccctcccatgaggggtggaacatagcaggtcagagtgcatggagttcgctcctgccagtgccaaagcagccagctggttccagcactcgtgtactccagtttctgccttgtcgactcgcaaactccctctgtcctttcccctgctctatattccatcacttcactagaatttaaactgcctccactgtgagagttacccgaagctcggcgtctatgatggtctatggggcttccaaggcgatcgggcagcatcagtcttcagccattcagtggagaagatttgtccctcccccagaaaagcgggacttgccactaagggtgaaggaccaaggcaggtgtccctgcgtggtttgacacctttgaaacgtggatgaataatcagaaaggcgtccttgcaatgattaaacaccaaggaaaggctgccttcccagtccatgactggcgccagagttttgggtccacggataaaacatgtctcctttatctcagatttgaaattggtgagatgtttcttgggctggtcagtctgaggacctgaggtcataggtggatctttctcatggagcaaagagcaggaggaggggactgatctcccaagggaggtcccctgatccaagtcacggcaccaaatttcatgcgcgtccatgtgaagagaccaccaaacaggctgaagtacggtcatccaacagccaatcttctctatttctgtccccagccaaactccttgttcagatgctccttcttttctctccttctcagccatgccagtgtggtgctcgccccttcttctgctttttcctcctctgtttgtggagcttggtttccacatggccccaaaatggggtcgtggagccccatagtgttcttgaaaaccacaacttttggtgacgacaacaaaaccgcctgttctattttctacaccacccctccaccaacccgaggcagagcagcatggaaagagaatcagtatgctcaggaagggagagtgaagtgagtgtgggtctttgcactggaactcagtgtttcccaccagctgattaaggtgcccactggtccagaacaaatttgagtgataggccacaataactggagtttttggacaaacactcatgctgcactgatcttggagccagtggacttgggatgtgcatgacccagtgcgataccagttgtggcaagaaaagggagtacccat

SEQ ID NO: 117165 - DNA, 2069 bp, Homo sapiens
actggctactggccaattgggatatccttttatcagtcaaagctatgtcctggtcaatggatttcaaactgttgaggatctatgtgaagctgcagaccttcgagtgagtgttgcagaccttcgcagtgagtgttacagctcataaaggtggcacacccagagttgtttgttcctcccagtgggttcgtggtctcgctgacttcaggaatgaagctgcagaccctcacgaccagggaatggatgagaatcctactgattttctggaacggctaagaggggccttggtaaagcacatgtctctatctcctgatttagtcgagggacaattaatcctaaaggataaatttattactcaggcagcccctgatattgagaggaagctgcagaaacagaatgggccatctctcagggacatatttttcagtccccagaatggctacaattggaggatggcaagcttttatctaccagttgcgaacaaatggaaaattcttaaaagcctttaccagatcttacacctaggcccagattgggagggaccttacactgtatttctttctactcctatggcagtggaggtcactggaatagactcttggattcattacacccaagtgaaggcctggaaagctgatggagccacctctgtcaacccagaagagcacccaaagtaccaaggtgaaataaacagccatgttgctcacagaaagcctgtttggtggtctcttcacacggacgtgaatgaaatttggtgccgtgactcggattggggggacctcccttgggagatcaatcccctgtcctcctgctctttgctccgtgagaaacatccgcctgatccacatacgacctcgagaaagatccacatacgacctcaggtcctcagaccaaccagcccaagaaacatctcaccaatttcaaatccagctgctcctcgccaggctgagctaggtcccaattcttcctcagcctctgctcctccaccctataatccttttatcacctcccctcctcacacctggtccggcttacagtttcattctaagtcagacctgtcctcagaatgctacaagctgcttcagctccagccgtggatataaggggccagctcaggtcatggcttcagagggcgcaagccccaagccatggcagcttctatgtggtattgagcctgctggtgcgcagaagtcaagaattgaggtttgggaatctccacctagatttcagataatgtatggaaaagcctgtatgtccaggcagaagtttgctgcaggggcagggttttcctggtatgttcctgtggcagttgttggagcaaaagttcacgatgtgaacctccatatgctgtcctttccatccaagtggaagctgcacacatgcatgaaatttggtgccgtgactcggatcgggggaccgacctcccttgggagatcaatcccccatcctcctgctctttgctctgtgagaaagatccacctacgacctcaggtcctcagacagaccagcccaagaaacaactcaccaatttcaaatccgagacaaaggagacacgttttatctgtggacccaaaactctggcgccggtcacggactgggaaggcagccttcccttggtgtttaatcattgcaaggacgcctctctgattattcacccacgtttcaaaggtgtcagaccatgcagggacgcctgccttggtccttcacccttagcgaatttaattaacctcaccttcaaggtgtacaataatagaaaaaagttgcaattccttgccttcactgtgagacaaacctcagccatgtctccagcacacaagaacttccaaacgcctgaacctcagcggccaggcattcctccagaacctcctcccccaggagcttgctacaagtgccagaaatccggccaccaggccaaggaatgcctgcagcccaggattcctcctaagccacgtcccatctgtgcgggaccccactggaaattggactgtccaactcacctggcatccactcccagagcccctggaactctggcccaaggctctctgactgcttcccagatcttcttggcttag

SEQ ID NO: 117166 - DNA, 375 bp, Homo sapiens
atgcagaaactacatgtccaagaatctctttccaggttagagtttaccagtgggattaaatcatgtgaatattggaaggaagagaaaaacaaattccgatattctcaggcaagcattgtgaccagagccctatgccttcacaagaacaagttcccacaccagggtcaagaaggaaaccgtaagtcaagacaaaagtgcccagtgaaggcagaagatgaggggtctcaggttgcatcttcggaggcacgaggattcaaaggtggagaaaacgacagcttcagatattctatgatgtacagatgccatttatcaaattctttgatttcaagtaataatggtgttggtgcagccagagttgcaaaagaggactgttga

SEQ ID NO: 117167 - DNA, 519 bp, Homo sapiens
ttttttgttttagcagtgtgaactctttattcactcccagcctgtcctgtggcctgtcccactgtgtgcacttgctgttttccctgtccacatccatgctgtacagacaccaccattaaagcattttcatagtgtgtggtttcgctttgcccattccttccagtaggccctccgggtgctgttgccgaatgtcagggcgtagttgtcctgcatggcggggatgaaccccatgtagaaggggatcaggccttggctgctgtagatgtggttgctgggccagtgtgttccaggcagcttctcgcccaggtcacagtgggggtttctaaacaggaactggctcttgtcgaattcgtccatggcttgcatgacgccgtctcggtaattcaaccccattacccaggtgaaacggggaatgaagccagcgtagcctgagatggccttgcgttggattaggttagggtggtccagctgcggcagccgctggaagctgcccacatctagcgtctcctgctggcggcg

SEQ ID NO: 117168 - DNA, 1072 bp, Homo sapiens
tttttatctttgtcccaattaggaaaaactagtgacactgctttatttgagaacagaataaagagcgtggctggaactctgccaagatggtctttaacattctgccctaaccagggtgttaactttccaacactgttgggtgtatggctgagtgctgcagatttctcagagaattagcaaaaggttgaaataaacgctaaaggatgagtccgtaagaagggaaaataaggctgggttttctttctagttcctttttaaaactctaagcaggaaatactgcccaattgcataagtgaagactgtacacagcagcatcaaaaaggctatttacaagaggattttcttcaacagaatccactttgaaagcactggagaattttggcatcttaagctaagagcagtttaccaaggaacagggccaatctaagtgcctaactagcatttaaagttgtcaaggggtggggatgtgcaaattaagcagcaaaagattattatcttgttttgctttaaagggaaagtaatagtggtcagaggggccagttccaagggctggtccaaaggggggccgctggtcttggtactccgccacatgcccattccggtggtggccatactcaaacttgatccgcagctcgccaatcttagattggggaaggatatctgggatccactcgatgatgaaaggtgttggctccttttgatctggggaagtgttgccaactttgagaaaagtttttagttccaagggtcgcagcactggttgtttttctatacgaccgtaggtttctgctatgctttctacttccactttagggcatttaaatagctcataagtcccatctcggttctggataaagctacgggtgatttccaagggcatctctggggtatctaagatttgtttaccttgcagctttaatggtggtgtctgtacagcatggatgtggacagggacaccagcaagtgcacacagtgcgcacaggccacaggacaggctgggagaatatagagagttcacacaaattccctgctttccccagtgactgagggctgtaggctacatccagctgat

SEQ ID NO: 117169 - DNA, 440 bp, Homo sapiens
  misc_feature (1)...(440): n = a,t,c or g
ctgaatgaatttcagttatttccaaaaactaaatctcccaaaggatgaagagttttcatcactgaggatatttaaaataatactgcagcctctgagagtaatttgtcaaccacccagccaccatcctttcctcttcaaattttgactcatgaagacagaaaacatcttgagaaagatgatcgggacacgacagaattgtcaggttgctgaggccaggaggacaccaagcgaaggtcaccgtgaacaggaaggcagagatgctgttcctgactgtggctctcagaggaggggccgcgacttgggagagcccacaagatgctcgaaatgcccgaaagtgcacgggacaggctccatttcactgggcacctcccctttccacccttctactctcgcgaattccaccacatggactatggtcctcaaanncnagggtcctctat

SEQ ID NO: 117170 - DNA, 713 bp, Homo sapiens
acagccacatccttcaaaggtcactgagtcctgagagtaatttgtcaaccaccccagccaccatcctttcctcttcaaaattttgacttcatgaagacagaaaacatctttgagaaagatgatcggtcaatctttcagcaacaggcattactcatctgtcatcaagcgccattcattagccatctctcggggacacgacagaattgtcaggttgctgaggccaggaggacaccaagcgaaggtcaccgtgaacaggaaggcagagatgctgttcctgactgtggctctcagaggaggggccgcgacttgggagagcccacaagatgctcgaaatgcccgaaagtgcacgggacaggctccatttctctgggcacctcccctttccacccttctactctcgcgtggctgcaccgggacaccaccgaacgccgcccagaaacaaaaacttacctcagacgccaacgggaacgcgctgttaagatggcggccgttatgcgcatgcgcccacgcagacacgccgcgcacgcgcaaaggctaggaccacctagggggcggggcctcgggttcccgggcccatcagatgctgcggcttttccaacccagagctgagaggaaatgctgtttacctccccgaagagcgcaagtgtcaccggtagggggtcttgactgcaagctgtcggacgcgtgggtcgacccgggattccggaccgtac

SEQ ID NO: 117171 - DNA, 900 bp, Homo sapiens
atgatgtatttttaccgaattatcttctcagaaggctctaaagctccaggaatgtatcccttaaatgaggaagaaaaaggcaaaaagaaatcaaagatcctgcaaggtgatgctgtgtccaggtggcatgcccttttattccaaatggcatgcaggtctcaaatcccatggcccacccctgaggatacgcagccggtgatcctttcaaaacctaatcagatcacactcccgctcagagtgaaagcccatatccttacagagggctatgaggctttgcaagatctgagctctgacctccatgctggatcctcttccctgctgactccactcaagccacggaggcccaccagtcctcaaacacatgaggcatgcccgagctttgatgtctgtggtgctctctgcctagaagactcttctgcaaatgtctgtctggcttatcccctcaatccctcatcttcttcagaatgtaagctccatgagttcaccaactcttgtctgttgttgctcactgcaatatccccagtgcctagagtggcatctgacatatccttggcactcaataagcatctactgaatgaaagaggcactgtgaaaccatgccccagagacaagcttatccacttccagggtctcaactccaaaccctgtgatgatgttttccaaactgttctcaaatccagaatgctgaattgcccagtgcctgctggcgccctccccatgaagtgccccaaagcactgcaaactccatacaactcaaaactcattaccccaactctggcccttacaacttatctcccctgctgtacaactgtgtctataaatggcactgccatccatgcagatgaaaaatcttcatcttctccctcatcagaaaaccctacagagccctctcatctctaa

SEQ ID NO: 117172 - DNA, 579 bp, Homo sapiens
atgggggaggagagaaagagatggggtgagagaaggcgagagggagacccacccagagaactgtggctgagcactgatctacgcatgcctatgaagaaattacctgaggggaaaagaaccactagaaaggaggaggcagaacatccggaggagctcgaacagggctgggattgttcgtgttcccacaagccagagtggaaagacctcctaattcaaagggcatcgtggaggctgcagcagggtagtgtgtcagcaatggggccagattagccccaggctgaaggacccacactaacgaggcttctaagcaatcctcaaaaggattccaacacaacccaagaatattcaaagtaataccaaaaattcagcacccacccatgtacctttcacaatgtctataccattcaatcaaaaactatcacacatagaagcaggaaaatatgattcatacccagggtcaaaatccatcaatagaaacagacccagagaagacagatacaatgggatttgtatacaagaacagtgaggcagtgctaactagatttcatatgctcaaaaaggtagaagaaggcatgggcg

SEQ ID NO: 117173 - DNA, 483 bp, Homo sapiens
atgcgccggtgcctggaagagctgggggcggggacccggaggctcgcaggcttccctacctcctggagatgcacggccttgggcgtttctccgcagctgcaaagctgtgctgtgacccacccgctcagcgagcctttataccgggaccacctcccgggggtcgagagagagaaaccaaacaatggatctctatttgcagaacttgctacctccaaaagttgggcctggaggaggagtgtttgggatcactctcaatgtatgccctgcctctgcctgagggcaacaatcctggggcacccccagagccccttgtggagacaaccaccagagcataattattccaggtcagccctctgtgcccagtggccacaaaatggggtccagatttccaggcttgccactcagaagaaacagatcagaatggctcagctcaccctctcaatccctaccttcatagaatcaatccaccctgccggcttttga

SEQ ID NO: 117174 - DNA, 252 bp, Homo sapiens
agcagaaggagcggctcctctacctactctggggagaggtagcatttctgagagtcaaatgccgcatcgccatgcttctcaagtttgaacgctcaggtgaatctcatggattcctgagaagttggctggaactaagggagcattcagagaccacagatccagttgactggtccctgctgacatccagtccacgttgttggccacatcagctcctcttcaaactcatgatgcaaatcaacagctaaacatgtt

SEQ ID NO: 117175 - DNA, 822 bp, Homo sapiens
atggactttggagactcagggagcgagggtgggaagcggatccctgacctctcccatgaaaagtggtttcctggtttagaagagaaagatcaagcacaactgagaattttccattttcaaaaaaaaggccttgtgaatagagcaaaggggatgggatgtcatttccacgattgggttgcaaaagattgtgactttcgtcttgctagcagactctctctgtggccttctcagcttgcacacttcgatgaagttcttaaaactggcaggcagacttccaatttccagtccagcaagcacgaagcttgggagtcagcacttcatcctaacaacaaggagaaggctaaccaaactaaaaaccaaacagttcttttagattcttatggcaagagaggtcatggggcaaaccattactccccaacctggagagaccagcagacgaatatccggaatcacaatttaccagggcagaaagctccgtgggaaccggtgccagggggtggtactttcaatttccttcaagaacttttcctgtgcatgcacaggctgaggctgcctcttttgagaagagggagaaaagaagaagaagagggagataaaaagaaaatgtttgtgaagcagccaccaaaagttaaaagaaaaaactttatgtctaaaggtcaagtagttggtggccacacctgggtgaaaggcagggccaatcctagcatgggagtgccctgcagtcatgacctcagtggcttcctcactttctgggaccttttgcaaaattcttgtggcttgccatttacgaacctggtggcttcaatgcctgcagcaccttaa

SEQ ID NO: 117176 - DNA, 252 bp, Homo sapiens
agaaggagcggctcctctacctactctggggagaggtagcatttctgagagtcaaatgccgcatcgccatgcttctcaagtttgaacgctcaggtgaatcccgtggattcctgagaagttggctggaactaagggagcattcagagaccacagatccagttgactggtccctgctgacatccagtccacgttgttggccacatcagctcctcttcaaactcatgatgcaaatcaacagctaaacatgttgat

SEQ ID NO: 117177 - DNA, 2398 bp, Homo sapiens
gatggttaaaaaaatttgggttttattgtttttgctaaataatactaaaaaaaaaatttcattttgaaggcagggcttgaattatttaatttgatcccatttatttaaattaaaaaaaaaaggaaggggaaagagaatcatggcccaaaaaaatagtagttaacccccaccccacccccaaagctctagccagtcatgtgagcatcacccacatccccactcagtgcctgatattcggatggtggcatactctgcccccaggagactgcctgaaggcacggggcaatgggtgccaattttagctctcagcaggttagtcaaccaaacaaactggtgggctaaagtccagaaattctttccaggttttctgctcattggctgagcacatacaaactgtcataagcctgtaaaatttaaaggggaagttggggtgggacgtaagagcaaaaaggacagcaggagaagagaaattacgggtcacccaagtttttccctgggctagtggctctggatatagatttaaagagaggtccagagtaaatggactcccaggtttcttatcaaagaaaaactataccctcaaatgaggagcttgagatgtgccatgcaagagagttcttcctgcagaggcacaggagaaagggcagctgactctctcatgtggagagagtggcgaggaaggtcttctagtaccatgaagtaagacaggcagagggagaatcctgaggtttgggccaaatgtgagactggtacacacacagttaaagactaaaaagccatcaggaacccctcaaagccaaattctatctgcacactggctctacaaagttcgcatcaagaatctcttgcaccaagtcaagttagtggcctggctatgatggatggtggggagggcaatacatttttattttcagagggatgaggtgggaagaatagccatgatctagtaaaaagagacctgcaagaagcagaaaatatttagagaacattttaatatatattttcatttatatatttaaagttaagaaaaataaaactaattcaagccatgccctgtgcaaaaaaaaaaaaaaaaaagaaaaaagaaaaaaaaaggaaaagaaaacaaaaatttaaagtgagacgtttgcttgctctggtctcaatttaagaatcacagtcagcttgttacttttattttggaagaaaagatgtaaaagtttctttcaatcattcaggaaggcaagtgtagcccacttataaaaaacagaatggcaggaaccaaactaggaaaggaaagtcagaagtaaagggccagagtgggaaaataattttccaaaaataaaattaacaaggtgaactgttcccagaagagggctgtgaaaaggacatggtggaccgaagtctgttagtccaagtaatgattcaacttttaaattattctcttgttcttttttgttgggtgttttgtttgttcaagtctaagatttggaaatgctgaccctttgttaagagccaacaggacatataaggatcccttccctcccgccggcctgcctccgctgaagccaccaccagcgcctccttggctggatgctggaagagtcctccatgtgtacggactcaggatgtcagggcagcctccttctgtggttgcatgggcttggcaaccgtgcgagtatcttttggctttccacgtctctaaaatgtttttcaaactattttgcgtacgatggctcagtgcagctcccctctttgcctttacagttttccacttgatatggggggtgtaataacaacttcttccatgactacgatgtttttttcttgccatttacagtctttaatggtcatgtgaatggtctggaaaagctgctgcccctctagagagacaccagcagtgattgcataggcctggctcagcattctcctccttctctgtccgtgctttgctggccagcttactaacattggagtgaacctaggggaggaggggtttctgttcggtcattagattatttccacttctgaaacatactgtaagtttatgagcaagatgtctgcatggttgggctttccactacacgccggcccggactcgggcttcacgcagggaaggatacttaaagccagcattttggattggtagtcaaaggctaccacctcgccgtgcagcagctgctcctggcacgttcggctcgactcatggctctcaacgctgaagtcatcgccacggaggagccgccatcttgggagtgcagccgcggccggcggcggcggcggcagcagcgggcgaaagccgggcccccagtgagcgccgcgacgcgacggcgcgcacggagcgtgcttgcgtcacacgccggggcgtggcctggcgctggttggggcgggatcccagactggagtgcagtggcgccat

SEQ ID NO: 117178 - DNA, 255 bp, Homo sapiens
atggagtcggttaagttagatcccttccagtgtctcagtcataattttgcaaaggcggcttcacgttgtccaggaaacagggtgattggttctgtcagaactaaaccaatcagtcatggcaatcccctggctacatttgacctaattcagggcgatgaaaagcaagatatcagaggccttctggggaaggagctttatcatttttatgagagggctgtagacatgattctctctctccctttctctgaaaattga

SEQ ID NO: 117179 - DNA, 2398 bp, Homo sapiens; identical to SEQ ID NO: 117177

SEQ ID NO: 117180 - DNA, 306 bp, Homo sapiens
atggctgtttatatcacctgggtgcagggggcttccgaggcgatcgggcagcgtcagtcttcagccgctaatccgagaagatctgggaaggagtcagtcagagagccttgggccagagttccaggggctctgggaatggctgccagaaaagcgggacttgccactaagggtgaaggagaaggggttggggtacttaaccctctcccagaaaagcgggacttgccgctaaggaaaatgaaaggaattgaaattaagagaagggagagattgaagagtggaaaggagaaagtggttgatggacagtga

SEQ ID NO: 117181 - DNA, 503 bp, Homo sapiens
atggtctatggggcttccgaggcaattaggcagcgtcagtcttcagccactaagctgagaaggggtcagtcagagaagcttgggccagagttccaggggctctgggagcagctgccagtccatgaccggtgccagagttttgggtccacggataaaacgtgtctcctttgtctctaccagaaaatgaaaggaattgaaattaagagaatggagagattgaagactggaaaggagaaagtggttgagggacagtgagagaggttggagaagagagtaagaagaggccgcttacctgatttaaaattggttacctaaccaaactcctgcaaaaacacaccatctatgcctgtgatggggactatctgaatctacagtgccctcggcattctacaataagtgttcaattggcattttatgggcaagattaccaaatgtgtagttcccagaagcctgcctcccagagggaagacagcttaacctgtgtggcatccaccaccttccag

SEQ ID NO: 117182 - DNA, 1254 bp, Homo sapiens
caggtatttcatcacaggtgcagacttctgctgggggcttaagcctcacttcctctgtgagaggagctgcagctcactcttgtccataaaaggccacgaggctcgcagagcggtgacatcagcccaacaggaagtacggaggaaggggcctgcttcaccagcagccactgctgggacttgactcatcacccagctcccaagatcacacctcccgaggttccagcatggagcagctctctcgggctccacctgggagaggtccctgcaggaccccatcttcgggctccactgggcttcttgagaaatgggtatgggccaagaaagaaaaacaggaaaaagggcagtttcaggttggacaacatgcccacgttgggactcccctccatcgaacacccctatgagcacagcactcggcacctcccgcaggcctgcctcagtgctgcaaagaaagggccgcgacactctcatgacgagaagctctgcttctccacagccagctcaattcacaagcttgggttacaagtctttgggaggcaaacagagagcttagacctgtgccctgttgtatctgtggaccagctcatgtggaagagacaagatcttcaggaagaatcccaaagccaggagcagcacaaagcagccagctcgcatcagctcgaggacagcgcctcccggctgcagccatggtgttgggtggtggcccagggcctgcttcccacagcacctgtctggtccaccagcatcccagggaacagaaaagtgtctcagggctgcagaagaaccaactctggatcaagcacatctcctaaagctccactgaggccacatcagccccaggcctcagctctgcgtggaccagaccagataagccaggaccgcgtctgctatcgcgttccagtgtgtggcgcggtcgctgcaggggcggctgtgacaactcacttcctgcacctggactctcgggagagtgtttttggggagattcaaatggctgcctggaagatgcatttggccatcaccttcattaagcgagcaggagtgtggacggaaggaatgagcgatttgaagcctccgtggaaggcggggcagttcagtcaagaagtgtttggactcctactgccagctctaacagacagcactaatccatctcagaattcctgcatcgagtctcaaatccttgccagcacagggctccaggcagccactactgatcgatcggagatgacactcaaagtaaaactaatctgcaatgcttag

SEQ ID NO: 117183 - DNA, 615 bp, Homo sapiens
atgcaagggctggtgaattaccagatctccatcaagtgcagtaaccagttcaagttggaagtgtgtcttttgaatgcagaaaacaaagtcgtggacaaccaggctgggacccagggccagctgaaggtgctgggtgccaacctctggtggccgtacctgatgcacgaacaccccgcctacctgtactcgtgggaggtgcggctgactgcacagaagtcactggggcctttgacttctacacactccctgtggggctccgcactgtgcccgtcaccgagagccagtgggatggtgattgctcacaccaaagccttggacccctcccagcctgtgacctttgtgaccaacgtcacctatgcagcagacaaggggcctttatgggaagtagcagcaccatccagttctcagagagcaagctctggagtaactgagctaacccgggttaccccagtggatttacagattgaggttagaacccagcagggttctcttcctggaaagaatagccttccctctaaggtttcaaatagaccctggaaacatcggtatttgattaaacttgaggaatggattgttcctaattttaatactacctcaagtgaaagtcctgtttaa

SEQ ID NO: 117184 - DNA, 1032 bp, Homo sapiens
catgtatacatacatacactcagaagagtttggaaaaggaagacttgctgagtcttctggcctccatctttctcccatgctggatgctccctgccctcaaacattggactccaagttcttcggcttttggactcttggatttacaccagtggtttgccaggggctcttgagcctttggccacagactaaaggctgcactgtcagcttccctacttttgaccaatggtcagaaggaatcttgcagcaatgaccatagagcgctttctcctgcctgcagacgcctctttttattcagcctttatgggaagtagcagcaccatccagttctcagagagcaagctctggagtaactgagctaacccgggttaccccagtggatttacaatttgctgtttcttcaaggagctgtgaaaccaagggacatataaaactgctcttttctccctgattctgcctgcaattttctgcttctttgaggagctgtgaaaccaagggacataaacaattgctcttttctccctgtttctgcctgtagcttgaatgtgaggcaactgtgagcacgctaccagattagccctgctccgcaaggagcagttatatatatataatcacacacacacacacatttttcagggaatcctgcctaatttcttccgaagttcagctgtctcagttcacaccaaacaagttacacgatttcataacggatagaggacagaagcttaaggagggagggccgaatgcaccgggaaccctagtcaagtgtaggaaatcatcacgagcgaggcgaagcaggtcgtgggagacgagaccttcactcaggaacggggacgatgtgaatcgtgtttctatcgagtggctgggggaccgggttgggatcagccaggaggaggtagccgcacaaggcttagctgggtctcccgcgcagacatctcctggacagcgacgcagcgccgcgcaggcgctcactgcccggctccagggctgcgggtggcgagtccctgcctgcccggcgctcgccctcggggaagg

SEQ ID NO: 117185 - DNA, 361 bp, Homo sapiens
  misc_feature (1)...(361): n = a,t,c or g
ttcgcatgactgggctgctaaaggcactggatcctaggctaggaggagaaagggtgctgtgaactggagttgccagagatccagaagagggacagctgcctggagatgagaccattctgagctccgcttcttcttctatggaatgtggataatcacttctacttcatgatcacaaggtnnnnnnnnnnnnnnnnnnnnnnnnnnnnnnnnnnnnnnnnnnnnnnnnnnnnnnnnnnnnccctcaaaagcagggaagctgacagtgcagccttcagtctgtggccaaaggcccgagagcccctggcaaaccactggtgtaagtccaagagtccaaaagctgaaaaacttggagtctgatgtt

SEQ ID NO: 117186 - DNA, 3577 bp, Homo sapiens
gcccctcgctcgctcgctccttcccgccctccccgcagcgccggccgagccggcttcccctcagtctctcatgaatattgagcggcccctgttgtatttcccgagctccattgcggaagctgaggctcgccatattgtgcggcggcgccggcgtccgcggcagctgataccagagtcttgctccggccgcggccagcggagccctgggctggggcaggagccgcaatgtctcaggctgtgcagacaaacggaactcaaccattaagcaaaacatgggaactcagtttatatgagttacaacgaacacctcagtgactctcttacagaaggcaataacagatggcttagaaattgtggtttcacctcgaagtctgcacagtgatttaatgtgcccaatttgtttggatatgttgaagaacaccatgactacaaaggagtctttacatcgtttctgtgcagactgcaacatcatagcccttagaagtggcaacaaagaatgtcttacctgttggaaaaaactagtttccaaaagatcaccaaggccagacccaaagtttgatgcactcatcagcaaaataaatccaagtcgtgatgaatatgaagctcatcaagagagagtattagtcaggatcaacaagcacaataatcagcaagcactcagtcacagcattgaggaaggactgaagatacaggccatgaacagactgcagcgaggcaagaaacaacagattgaaaatggtagtggagcagaagataatggtgacagttcacactgcagtaatgcatccacacatagcaatcaggaagcaggccctagtaacaaacggaccaaaacatctgatgattctgggctagagcttgataataacaatgcagcaatggcaattgatccagtaatggatggtgctagtgaaattgaattagtattcacgcctcatcccacacttatggaaaaagatgacagtgcacagacgagatacataaagacttctggtaacgccactgttgatcacttatccaagtatctggctgtgaggttagctttagaagaacttcgaagcaaaggtgaatcataccagatgaaccttgatacagccagtgagaagcagtataccatttatatagcaacagccagtggccagttcactgtattaaatggctctttttctttggaattggtcagtgagaaatactggaaagtgaacaaacccatggaactttattacgcacctacaaaggagcacaaatgagcctttaaaaaccaattctgagactgaacttttttatagcctatttctttaatattaaagatgtactggcattacttttatggacagatcttggatatgttgttcaattttctttctgagccagactagtttacgctattcaaatcttttcccctttatttaagatttcctttttggaagggactgcaattattcagtatttttttctttcctttaaaaaaatatatctgaagtttcttgtgttttttttttttccccacaaagtgtgtttccacttggagcaccattttgacccaggaatttttcatagtttctgtattcttataagattcagttggctgtccttttcctgctcccctcaaaagatttttagtcatacagaatgttaaatattatgtattctgaccttttttttttcccccggagtcttggtatatttatagttttcctatataaactgtagtatcttcatgaagaacccaaggctcaaatttactgtccttaaaaacaattctcataggattattcttttcatggtattttcttccataatatctcattttaaaaagaagttctttatgaaacttagtgtccattgtcatgcaatgttttttttttccattctttttcccctgtaattttggaatttctggtcctgggaagaatcaaacaaaatcttaagttctatgagaacttggttcattgacatattctgctgaagaaagaaaaattaaattggtagtaaaatatagtcttcaagtatacgtttgagagtgcttttttttgtattagttctgctgtcacttcatttcctgtattatatgtgatgtttttccccattaaaataccagagataatggagatattttgcactttagccttgatgaaaagtacaagatatgttcaaagcttccctaatttttttcttatttgtagccacataagtttcaagaataacatggcacacagaacaatggaaaaaagtttgtttccattggaaaattatatcattttgggttgccacatcagtttataaatttggcgctcttttaattacactctgtagaaggttaatagagcttgagccctgctttaatatgtagtgaaagataattctgtagaaaaacgtcagccagtagggtaaagtcattctactgttcttaatttttatattgaggaacaatattgggtgtttgggagccagaaagctttgttgacagatcagaaataagattgacttgggtgttatatttcatctctctccagactctaggtatatttccaactttatatatcacagtatttaaaaagacatgtttgcattgagaaattaaccctaaagggttttcaatagggtgtagacctccagtacctttgtaactaaagtctgtctagtcattgtaaatatttatctgtcagttttgacagattggggccagcttgatgttttaaatcttcagcccggtatgaaaacttaaaggtatatattcaattttttaccattttatggaaaatatttaaaatttgtttttacagggtttttttttttttttttttttttttgtaatctgtgccatgaaatttgaaaaccaccaaaaatcaagggaacttttatatattcaattccttttctggtgtaatgttaaagttgtatagattattaatgcatgcccactgaatataaccctggttttgtgataaaactgcttagattttgttgatgacattagattagtagttgcattaaataactaaattcccattgtgattaattgaaattttgtctttaagcagagagttatttgtgactataagctttgtgcttagagaatgtatgtgtttttatctgtcagtatgggaggatataaactgcatcattagtgaaattattggttgtgtaatcctttgtgaaatataattctaggtatttgatagggtattgagtgtattttgtgtgtgtgtggatgtgtgttttggggtacggggagaggcgatgctattgggccatcactacccaacccagggttttcaaaaaaggtatatacctaaggtaatttcttttaatcactatctcaactgaggaagaaaaaggcttcacacaagtggtgtgaaggctttgggtacttagttctaaatttttttatggtaacatatacatagccacatttacagttttaaccattttaaggcatgtaattcagtggggttaggtacattcacaatgttgtgtaatgatcaccgctgtctacttgtaaaactttttcatcaccccaaacagaaactctgtgtgcaattaaagtaatgcatttctcttcttcttaacccct

SEQ ID NO: 117187 - DNA, 444 bp, Homo sapiens
agcagtggcctgccccgcttgtaaaagccgaggggttccggaaagccgaccgtgctttacaggacaactgcaaagaggaagagaggcgaaatccagggggagaccatgtgaccacgcgtggcactggccaatcccacagcaagtcatacagcagaggcattgaaacacacacccccaggcaccccctgaggctccggggttctgctctggaggagaacgaccctcgggtgagagagcagcccaggggcacgcagcccgacacgtcctcgagatcacggacggcggcaaggcttttggcgagactcaccccaaccaacaccgtccgtgcaggcctgaggctgggatcccgtgctgcttccaggtctccgcctggggtttcatcatcatggtcggccctttgcgagtgctggcatccggagacgttgccttcgaccctgtggggag

SEQ ID NO: 117188 - DNA, 4586 bp, Homo sapiens
atgatgtcctttgactccatgtctcacatccaggtcacacagatgcaagagatgggatatcatggctttgagaagctccactcctatggcttggcagggtacagcctcccttctggctgctttcacaggttggtgttgagtgcctgcagcttttcctgctccaccatacagaaatgcagagatgctgccaaatggagtggtcaacctttgatggggcctgtgcattttggaaccaatctgggggacactactggtgatgagcagagggtgtcagggctttctaagacagcaagggcaggtaccactgcattggcagtggcagttggctgtcatttgcctctgggagctccatcacaggataacacagagccactggcaatagaaatgttcagcttggggtcatctcatccagtcgtacggcttctattatcatccatagcagaaattatgaacccagagtccatggataaacttttgggcctacccagattggagagcaggcccaggggcatgttcctctcatggcatggaaggcaagctgcacctgatgagctctttgggagccactggttggacacggtgtactggaagtctgctcatgtgtcattgcccaaagcaagtcagaaggctaagctcagagtcagtgagggaggagcccaatgtgaggaaatgattgtcaatgagtgctgggagtaccacactgttgtactttttgacagagtaggcggctctggaacctgtatcggtctggctgcctgcctttataatggtgtttggctgcaagtttacgtacacagtgcactgcggaaagagcctttgctttccacccacacacacaaggagcaaatcccatcttcacttcctatttcttgccaggccagcagcatcacctcagctggggattcatctgtggcctcatcctggatctgtgactgctatgatggtccagagtccagggatctgagttccaccaagccttctgggcattctccctcagtggcccttaacccagggtccagggatctgagttccgccaagccttctgggcattctcgctctgtggtccttaacccagggcccaaggatctgagttccgccaagccttctgggcattctcgctctgtggtccttaaccctggtgcaggcagcgcccagggctacagcatggtccagcccagtccatggaaacaggagtcctgggcacagtgcaatgggcagacgctggcggtgacttcaaactcacagtcctgcctctggggtgtgtcctttcctcctgcctcagcacctggccttgagaacattatgaagtcacctgagacacaattagatctggtgacaatgaacagtgtgagatgctctgctgttggcttgcactgtgtggcccctgcagacttcaggctggtttcctttgtgccctttctcacaaagctcatgcatggatttccagcagggaggattaagaatattgtcctcaacccagttagaatgttgctgctaagtttcaatgtgtcagaggctttttcattttcccagagccagtgctggctggcgtggcgagtgacaacattgcagcatttgcaaagtgactacgtcgtagcatttgcattatcttccttggtgtgcatatctttcaaccatgtcagggaagcggttggaaggaaaaatcacagagcacataagaaggacttctgggcctgctccggaggcttgcagaggacatgcccgaagggacttcaaagctccttgctaggtctccactcaaaggcttatcccatggcccgagcaaggaaggcctttgtgtgtgaaaacacctgccacccagcttcaggagcactgagcgctttcggcatggccgtccccactggcccacatggcatttcttacaagtcatacaacagaggcattgaaacacacaccctctggcaacccctgaggctgcgggattctgctcttggaggagaacgaccctcgggtgagagagcagcccaggggcacgcaggccgacccgtcctcgagatcacagacggcggcacgacttttggtgagactcaccccaaccaacaccgtccttgcaggcctggggctgggatcccgtgctgcttcccccgtctccgcctggggtttcatcatcatggtcggcccgttgcgattgctgtcatcaggagaggttccctttcgaccccgtggaaagagcagtggcctgccccgcttgtaaaagccgaggggttccggaaagccgaccatgctttacaggacaactgcaaagaggaacagaggcgaaatccagggggagaccatgtgaccacgcgtggcactggccaatcccacagcagttggtgttaacgtgtgacaccggaggcaaacggggcgacggcgaaacgaagggtggggtccatgcacgtgccggtggaagggggaaacgggtgacctttccgtcaatgccaaggaaaatcaaacaacacctgggacccggagggtgtaggggacgtctgtgcctgacccaagccacgttttcaaatgcctaccagaggaacaaagaggtttctgccaatttcgcaacacccccaatcctccaccgaactcgtagccctgatgcaacttcggctggaacaaacccacaaagagagaacgaccctcgggtgagagagcagcccaggggcacgcaggccgacccgtcctcgagatcacggacagcggcaaggcttttggagagactcaccccaaccaacaccgtccgtgcaggcctgaggctgggatcccgtgctgcttcccccgtctccgactggggtttcatcatcatggtcggccctttgcgactgctgtcatcaggagaggttcccttcgaccccgtggagaggggttccggaaagccgaacgcgctttacaggacaactgcaaagaggaacagaggcgaaacccagggggagaccatgagaccacgcgtggcactggctaatcccacagcagttggtgttaatgtgtgtcaccggaggcatacggggcgacggcgaaacgaagggtggggtccaggcatgtgccggtggaagggggaaacgggtgacatttccgtcagtgccaaggaaaatcaaaccacacctgggaaccgggaggcaacccctgaggatccggggttctgctctggaggagaacgaccctcgggtgagagagcagccgaggggcacgcaggccgacccgtcctcgaggtcacggacggcggcacgaattttgcagttggtgttaatgtgtgtcaccggaggcatacggggcgacggcaaaacgaagggtggggtccaggcatgtgccggtggaagggggaaacgggtgacatttccgtcagtgccaaggaaaatcaaaccacacctgggaaccgggagagattgggaaagaaacacacagagagtgagagacagagagagaagagagaatgggagacacacacacagacacacacgcacacacacgcagagtcatacagcagaggcattgaaacacacactcccaggcaacccctgaggatccggggttctgctctggaggagaacgaccctcgggtgagagagcggcccaggagcacgcaggccgaccagtcctcgagatcactgaccgcggcgcgacttttggcgagactcacccaaacaaacaccgtccgtgcaggcctgaggctgggatcccgtgctgcttccccggtctccacctggggtttcatcttcatagtcggcccattgcgactgctggcatcaggagagtttcccttcgagcccgtggagagagcagtggcctgccccgcttgtaaaagcccagggcttccggaaagccgaacgcgctttacaggacaactgcaaagaggaaaagaggcgaaacccagggggagaccatgtgaccacgcgtggcactggccaatcccacagcagttggtgttaatgtgtgtcaccggaggcatacggggcgacggcgaaacgaagggtggggtccaggcatatgccggtggaagggggaaacgggtgacatttccgtcaaagcaaaggaaaatcaaacaacacctgggaaccgtggggcaccccctgaggctccggggttctgctctggaggagaacgaccctcgggtgagagagcagcccaggggcacgcagcccgacacgtcctcgagatcacggacggcggcaaggcttttggcgagactcaccccaaccaacaccgtccgtgcaggcctgaggctgggctcccgtgctgcttccaggtctccgcctggggtttcatcatcatggtcggccctttgcgagtgctggcatccggagacgttgccttcgaccctgtggggaggcaccccctgaggctccggggttctgctctggaggagaacgaccctcgggtgagagagcagcccaggggcacgcagcccgacacgtcctcgagatcacggacggcggcaaggcttttggcgagactcaccccaaccaacaccgtccgtgcaggcctgaggctgggctcccgtgctgcttccaggtctccgcctggggtttcatcatcatggtcggccctttgcgagtgctggcatccggagacgttgccttcgaccctgtggggag

SEQ ID NO: 117189 - DNA, 5659 bp, Homo sapiens
atgggagacacacaaacagacacaaacacacacgcagagtcatacaacagaggcattgaaacacacaccctctggcaacccctgaggctgcgggattctgctctggaggagaacgaccctcgggtgagagagcagccgaggggcacgcaggccgacccgtcctcgagatcacagacagcggtaaggcttttggtgagactcaccccaaccaacaccgtccgtgcaggcctgaggctgggatcccgtgctgcttcccccgtctccgcctggggtttcatcatcatggtcggccctttgcgactgctgtcatcaggagaggttcccttcgaccccgtggaaaggcaacccctgaggatccggggttctgctctggaggagaacgaccctcgggtgagagagcggcccaggagcacgcaggccgaccagtcctcgagatcactgaccgcggcgcgacttttggcgagactcaccccaacaaacaccgaccgtgcaggcctgaggctgggatcccgtgctgcttccccggtctccacctggggtttcatcttcatagtcggccctttgcgactgctggcatcaggagagtttcccttcgagcccgtggagagtcggccctttgcgactgctggcatcaggagagtttcccttcgagcccgtggagagagtcatatatcggaggcattgaacactgagaaccctgaggcaacccctgaggatccggggttctgctctggaggagaacgaccctcgggtgagagagcagcccaggagcacgcaggccgacccgtcctcgagatcacggacagcggcctgaggctgggatcccgtgctgcttcccccgtctccgcctggggtttcatcatcatggtcggccctttgcgactgctgtcatcaggagaggttcccttcgaccccgtggagaggcaacccctgaggatccggggttctgctctggaggagaacgaccctcgggtgagagagcagcccaggagcacgcaggccgacccgtcctcgagatcactgaccgcggcgcgacgtttggcgacactcaccccaaccaacaccgtccgtgcaggcctgaggctgggatcccgtgctgcttcccccgtctccacctggggtttcatcttcatagtcggccctttgcgactgctggcatcaggagagtttcccttcgagcccgtggagaggcaacccctgaggatccggggttctgctctggaggagaacgaccctcgggtgagagagcagcccaggagcacgcaggccgacccgtcctcgagatcactgaccgcggcgcgacttttggcgagactcaccccaaccaacaccgtccgtgcaggcctgaggctgggatcccgtgctgcttcccccgtctccgcctggggtttcatcttcatagtcggccctttgcgactgctggcatcaggagagtttcccttcgagcccgtgaagagaggagcaaagaggtttctgccaatttcgcaacacccccaatcctccaccgacctggtagccctgacgcaacttcggctgagtcatacagcagaggcattgaaccctgagaaccctgaggcaacccctgaggatccggggttctgctctggaggagaacgaccctcgggtgagagagcagcccaggagcacgcaggccgacccgtcctcgagatcacggacagcggcctgaggctgggatcccgtgctgcttcccccgtctccgcctggggtttcatcatcatggtcgaccctttgcgactgctgtcatcaggagaggttcccttcgaccccgtggagaggcagcccctgaggctccggggttctgctctggaggagaacgaccctcgggtgagggagcagcccaggggcacgcagcccgacacgtcctcgagatcacggacagcggcaaggcttttggcgagactcaccccaaccaacaccgtccgtgcaggcctgaggctgggatcccgtgctgcttcccccgtctccgccgggggtttcatcatcatggtcgaccctttgcgactgctgtcatcaggagaggttcccttcgaccctgtggagaaatcacggacagcggcgcgacttttggcgagactcacccgaaccaacaccgtccgtgcaggcctgaggctgggatcccgtgctgcttccccggtctccacctggggtttcatcttcatagtcggccctttgcgactgctggcatcaggagagtttcccttcgagcccgtggagaggcagcccctgaggctccggggttctgctctggaggagaacgaccctcgggtgagagagcagcccaggggcacgcagcccgacacgtcctcgagatcacggacagcggcaaggcttttggcgagactcaccccaaccaacaccgtccgtgcaggcctgaggctgggatcccgtgctgcttcccccgtctccgcctggggtttcatcatcatggtcgaccctttgcgactgctgtcatcaggagaggttcccttcgaccccgtggagaggaaattttgtcgagtgaataaaagtcaattatatacattatgtacaacagtacaagtaggccttgagacctatgggatcattctgtgctgcagcgaggccctgcctgcctcaccagatgtgtctctgtgtgtttccttcccactctctgtgggtttgtgccagccgaagttgcgtcagggctacgagatcggtggaggattgagggtgttgcgaaattggcagagacctctttgttcctctgggtcgaaggcaacgtctccggatgccagcactcgcaaagggcctgaccatgatgatgaaaccccaggcggagacgtggaagcagcacgggatcccagcctcaggcctgcacggacggtgttggttggggacccaggacacagccgccgccgcggcggcagcaggagcatcgcggccgccgcgcggcgatggcgatatttaaaggtgacgcagcctatctgtcaggagtggagctcggctcaagcaggtcctgaggacaggagccctgggggtttgggcctgggacaggacgagacacccgcggtccactctcccatgccgccccaaacaggacccaggacacagccgccgccgcggcggcagcaggagcatcgcggccgccgcgcggcggtggcgatatttaaaggggacgcagcctatctctcaggagtggagcgtgagtcggctcagccaatgcgcatgcgcgaggccccagcggtttctccggtcacagtggttcccacggttgtcttagaaaccagtccccgaggctttgcagagcaggagccctccgtggcagtgcttgggtatcgaggctctgaggctccggtctcacctctccacgggctcgaagggaaactctcctgatgccagcagtcgcaaagggccgactatgaagatgaaaccccaggtggagaccggggaagcagcacgggatcccagcctcaggcctgcacggacggtgtttgttggggtgagtctcgccaaaagtcgcgccgctgtccgtgatctcgaggacgggtcggcctgcgtagccctgggctgctctctcacccgagggtcgttctcctccagagcagaaccccggagcctccaggggttgcctccgggtcccaggtgttgtttgattttccttggcattgacggaaaggtcacccgtttcccccttccaccggcacgtgcatggaccccacccttcgtttcgccgtcgccccgtatgcctccggtgacacacattaacaccaactgctgtgggattggccagtgccacgcgtggtcacatggtctccccctgggtttcgcctctgttcctctttgcagttgtcctgtacagcgcgttcggctttccggaaaccctgggcttttacaagcggggcaggccactgcactctccacggactcgaagggaaactctcctgatgccagcagtcgcaaagggccgactatgaagatgaaaccccaggtgtagacgggggaagcagcacgggatcccagcctcaggcctgcacggacggtgttggttggggtgagtctcgccaaaagccttaccgccatccgtgatctcgaggacgggtcggcctgcgttcccctcggctgctctctcacccgaggttcgttctcctccagagcagaaccccggatcctcaggggttgcctgggggtgtgtgtttcaatgcctctgctgtatgactctgcgtgtgtgtgcgtgtgtgtctgtgtgtgtgtctcccattctctcttctctctctgtctctcactctctgtgtgtttctttcccactctctgtgggtttgtaccagccgaagttgcgtcagggctaccaggtcggtggaggattgggggtgttgcgcataattgggcagaaaccttctttgctcctggttcccaggtgttgtttgtttttccttggcgttgacggaaatgtcacccgtttcccccttccaccggcatatccctggaccccacccttcgtttcgccgtcgccccgtttgcctccggtgtcacacgttaacaccaactgctgtgggattggccagtgccacgcgtggtcacgtggtctccccctggatttcgcctctcttcctctttgcagttgtcctgttaagcacggtcggctttccggaacccctgggcttttacaagcggggtaggccactgctctttccacggggtagaagtgaacctctcctgatgacagcagtcgcaaagggccgaccatgatgatgaaaccccaggcggagacgggggaagcagcacgggatcccagcctcaggcctgcacggacggtgttggttggggtgagtctcaccaaaagtcgtgccggcgtccgtgatctcgaggacgggtcggcctgcgtgcccctcggctgctctctcacccgagggtcattctcctccagagcagaaccccggatcctcaggggttgcctggtgttgtgtgtttcaatgcctctgctgtatgactctgcgtgtgtgtgcgtgtgtgtctgtgtgtgtgtctcccattctctcttctctctctgtctctcactctctgtgtgtttctttcccactctctgtgggtttgtaccagccgaagttgcgtcagggctaccaggtcggtggaggattgggggtgttgcgaaattggcagaaacctctttgctcctcccacggttcccaggtgttgtttgtttttccttgacgttgacgaaaatgtcacctgtttcccccttccaccggcatatccctggaccccacccttcgttttgccgtcgccccgtatgcctccggtgacacacattaacaccaactgcagagaaacaaagaggtttctgccaatttcgcaacacccccaatcctccaccggcctcgtagccctgacgcaacttcgctggcacaaacccacagagagtgggaaagaaacacacagagaccccaggcaccccctgaggctccggggttctgctcccaaccaacaccgtccgtgcaggcctgaggctgggatcccgtgttgcttccaggtctccgcctggggtttcatcatcatggtcggccctttgcgagtgctggcatccggagacgttgccttcgaccctgcttgagccgacttccaccgagggaggtggagcttcaggacgcctgctgtgttctccggactcccgttgagatcccat

SEQ ID NO: 117190 - DNA, 416 bp, Homo sapiens
  misc_feature (1)...(416): n = a,t,c or g
cgaacccatctctgcggagtcctgaggagtccccttagtctacagacagccagaaacgacgctcgggaaggcaagtaaagcgcagaaaatccaatgaggacctggacttcaaagtggtggatgatgatggggaaaccattgctgttcttggagctggtcgaacatttgccctctcagcctctacactggcctggcaggcggaggagcctccagaagatgatgccaacatcattgagaagatcctggcatctaagactgtccaggaggttcccccaggagaccccccgttcgacttggagctgttttacgttaagtataaaaatttgtacgtctatttaaaggattctctggatttgggttttatatgaataaaactttttttctcttgtgnnnnnnnnnnnnnnnnnnnnnnnnnn

SEQ ID NO: 117191 - DNA, 427 bp, Homo sapiens
atggagtcctcactgccggcccggcctgcgctgcctgctctcggcctccctggtgggatgccgctcctgctctgcatcaacttgccctgcctgctcctcctaccagctcttcccagggtggcctccaagcaggtgttcagccagaatatggctaagtggtgtgtgcagctgtatccaccagcagggcctggcttgaggacccagaaccctggccccacacctaggcggacatctgacaagcgggccaatgaggatgacatctcggacggtagtcactgctacaacgaaagtcagtgccccaccttgcccagccgcagggtggaccctaagcagctcgccccacccagccggtcctgcctgctctgtccctcccaaccctgcaatgggcagatttctggggggcagtctctgacccactgtggcccag

SEQ ID NO: 117192 - DNA, 1695 bp, Homo sapiens
atgtctgatgcctctgtcaattttgactacaaatctccatccccatttgactgcagcactgatcaagaagagaaaattgaagatgttgctagtcactgtctgcctcagaaggacctgtatactgctgaagaggaagctgctaccctttttcctaggaaaatgacatcccataatgggatggaggacagtggaggaggaggtactggagtgaagaagaaacggaagaaaaaggagccaggagaccaagagggtgcagcaaagggaagcaaggacagagagcccaagccaaagaggaaacgagaaccgaaagagccaaaggaacccagaaaggccaaggagccgaagaaggccaaggagcacaaggagccgaagcaaaaagatggggcaaagaaggcacggaagccccgggaggcctcgggcaccaaggaggccaaagagaagaggagctgcactgactctgcagccaggacgaagtccaggaaggccagcaaggagcaaggaccaaccccagtggagaaaaagaagaaaggaaaaaggaaaagtgaaactacagtggagagtttagagctggatcagggcctgacgaacccatctctgcggagtcctgaggagtccactgagtctacagacagccagagagcttctctgacgggtgtgtttgccctacagaaacgacgctcgggaaggcaagtaaagcgcagaaaatacaatgaggacctggacttcaaagtggtggatgatgatggggaaacaattgctgttcttggagctggtcgaacatctgcactctcagcctctacactggcctggcaggcggaggccacatttattgaagaggtaatacctccgaaccaggtagaaagcgatacctttgttgatcagcataacaacgggcgtgaccaggcatctcttacgccaaaatcattaaaaagtatccgaagcactattaagcatcagcaattttaccctgcaataggtgttagacgggctacagggaaaattgaaattttggatggttcccggcgtcgagcttctgccatcttagagaacgtagggttgcgggttttagtcacggaccaggagatcagcgttcaggaagcgcaaaatttagcgaaagacgttcagacagcattgcagcacagcattcgagaaataggtctgcgtttgatgcgaatgaaaaatgatgggatgagtcagaaggatattgcagccaaagaaaggctgtctcaggcgaaggtcacgcgtgctctccaggcagcgagtgctccggaagaattagtcgcccttttccctgtgcagtcggaattaaccttttcggactacaaaacgctttgtgctgttggcgacgaaatggggaacaagaatttagagtttgatcagcttattcaaaacatatccccggaaataaacgacatcttatccattgaagaaatggccgaagatgaagttaaaaataaaatcctgcgcttgataacaaaggaagcctcactactcacggataaaggttctaaagataagtccgtagttactgaattatggaaatttgaggacaaggatcgctttgcaaggaagcgcgtgaaaggccgtgcattttcttatgagtttaatcgactctcaaaagagttacaggaagaactcgacaggatgattgggcatatccttagaaagagcctcgataaaaagccgaagccttaa

SEQ ID NO: 117193 - DNA, 1195 bp, Homo sapiens
tatacggctgcgagaagacgacagaagggaaggcaagtaaagcgcagaaaatacaatgaggacctggacttcaaagtggtggatgatgatggggaaacaattgctgttcttggagctggtcgaacatctgcactctcagcctctacactggcctggcaggcggagcaaggagcaaggaccaaccccagtggagaaaaagaagaaaggaaaaaggaaaagtgaaactacagtggagagtttagagctggatcagggcctgacgaacccatctctgcggagtcctgaggagtccactgagtctacagacagccagagagcttctctgacgggtgtgtttgccctacagaaacgacgctcgggaaggcaagtaaagcgcagaaaatacaatgaggacctggacttcaaagtggtggatgatgatggggaaacaattgctgttcttggagctggtcgaacatctgcactctcagcctctacactggcctggcaggcggagatctgtgcagtatcttctcagtgtgctcaacgcaattctgtgactgctggcccttgtcccagccccagatcacaacctcaggattggttaccaagtggtgagttgcgaaaacatctttacacaggattcgctttagctcaggactggcatgttatcacagctctgctttgcactccataccacaatcccaagcatgggattcaggggcaggaagagcctccagaagatgatgcaaacatcattgagaagatcctggcatctaagactgtccaggagggtgggatgccgctcctgctctgcatcaacttgccctgcctgctcctcctaccagctcttcccagggtggcctccaagcaggtgttcagccagaatatggctaagtggtgtgtgcagctgtatccaccagcagggcctggcttgaggacccagaaccctggccccacacctgtgagctggaacacctgcacagcagtgccacatgctactggggctgagggtgcagacactgtcaggctccccccaggtccttggacccctgttactgggttgaggcacgcatgtctccacagctgtgtgcactccaagcagcctacccctaagtgcaccccagcagcccacacctgtgccctgagcagcccacacctgtgccctgagcagctcacacctgtgtctccagcagccaccacccgtcacttctga

SEQ ID NO: 117194 - DNA, 576 bp, Homo sapiens
tgtcgtgcgggagctgagcggagtggccttgccaccggaggggaagggctgctggcgttaggcctggttgtgtcgagcggctgaccgtgaggctagaaagaaaaagcgatcctccatgagtgagaacgggagatctgccgaggataacaacctcccttgtggccgaagggcgggggatccccacacgagggctccgcttcgagagacggcgacaaaggaaagttcgtagcgcgttccggaggcccggccacctctgagaagggagacgacgctgctgggtccgctgagcggggcgaccccaggttagtggagacggatgctggcttttgaaggccttattccctgccctggtgaagccgactgcgaggttccacagggcgtgcaggcagtccggagatcgttgcgaaggggggtgcgggctaacttatctgctgccgtttctagatgtgcagctgtggaggccctgtttacaagtgtgcataaggacagtgtattaagggagaactcaagagaatggaaaggtctttcgggtagtggttaaaataaagaagagtaggaactaggtttttaaatttt

SEQ ID NO: 117195 - DNA, 994 bp, Homo sapiens
tttcgtagctgagcggagtggccttgccaccggaggggaagggctgctggcgttaggcctggctgggtcgtgcggctgagcgtgaggctagaaagaaaaagcgatcctccaagagtgagaacgggagatctgccgaggataacaacctcccttgtggccgaagggcgggggatccccacacgagggctccgcttttaaaagacggcgacaaaggaaagttcgtagcgcgttccggaggcccggccacctctgagaagggagacgacgctgctgggtccgctgagcggggcgacccgagtcttctcattcacaggttaaggctacctttccagataatccaacagctaaatcaccagtttccaagggcatttgcatcacctatggaaagcatcggatccttatacaccagatgttcttgacagctcatcccgtcattcccccctgcacaaaagttgctataccagcggacaagcaagacaactactgagcttcttttgattgtcaagtagatataatatcactgccagcaaaacagcacaaaaagtgtctcttcacagtatcactaccagttgggactatgctaagtaaatcagcttgcctagatgaggaccccttctattcttgggtagccaggatttgaaggagatactctgacctgtgccagtggtaagtgactaatacttttacacactgaactggtcctggaaactgagatgtcttctttgtaagtgaagaatatacaacataatcttgaagaacggcacagtggtatgggccacaagcatactttatgtgtgtaacggactgaaagacaaattaatcttggtgaaaggatttttcatctcttatttctatttgccagtgttagtcagtgttctgctggcttagattattacctttttctggttccttactgtgttttattctgatgggtcctagaaatccctctcctgaccacttgtcagaatcagaaagtgagaaaaaaaaaaaaaaa

SEQ ID NO: 117196 - DNA, 222 bp, Homo sapiens
atccagagctcccctccccgccactgggacagccgccctcccagtgccaagcctggtcttggttccttcatctcagcggagcttaagattggggatgagcaaggccccttcctgcggaccctggcctgtgccacgcagggagaagaggctgttatcaaagaacagcttcaagagactcagggattgtgtgaatatgctatctatgtccaagatttgttgtaa

SEQ ID NO: 117197 - DNA, 633 bp, Homo sapiens
tgcaggaattcggcacgaggctaaaatggctgaggagagagtcgcgacgagaactcaatttcctgtatctactgagtctcaaaagcgcgcggcagaaaaaagctccggagggtcctattttggagaagcagaactggttgattcatcttcattatatccggaaagattatgaagcctgcaaggctgttatcaaagaacagcttcaagagactcagggattgtgtgaatatgctatctatgtccaagcattgatatttcgcctacaatgaaatatccaagaatccctagaactctttcagacatgtgcagttcttagtcctcacagtgctgataacctcaagcaggtggccagatctttatttcttttgcgaaaacataaagctgtcattgaagtatataatgatgcagctaaactcaaccagaaagattggcctaggagatcagccataacctacgagtttgctacatatacctgaagcagttcaacaaggcacaagaaccagttggcacaatgccctgaattcttaatagggcacgatctgacttatataatgctggggaagatccacttgctggagggagacttggacaagggccattgaagtctacaagaaagcagtggagttctcacca

SEQ ID NO: 117198 - DNA, 422 bp, Homo sapiens
tttcgtaagttgagttctaaaggttgtaaaagagttaatatgtgcatagggagagaatacgataagggaggggacagaacgggaaaggaagaacgtacaaagatcctggggaagaaagaaacatgggcttcatggaacagggaaacgccagagaggttggagcccagagagtgggggcatcgcagtgagagttcaggctggggagagaggagggaccagaccactcacacggagcctcatcaatgggccatgtaaacgattgtggcctttctctggagagcactgggaagccaatgacagacttttaaaatccaattttaattttatgaagtgctcaccattcacagtcaggaaaaagaattaattaggagatcgttctggctatcttgggtacagaaagcctgtgttgctggaattggaga

SEQ ID NO: 117199 - DNA, 508 bp, Homo sapiens
ccctgatccatgggctatgcatttcccattttccttggggatggtcatccaggcaaccagaatctccaggagtttgggagctggcactgctttatggatgatttccaccatgctgccacagttaaatccattctcttctgtcttggaattctgagtgatggttccatggagttagttcaacttatcccacagcttctcataaagaggtctctgtagctgctgccctggtgcaccccagcaccgccttcacaagcccgttccgaccacgggaggctcatgttgtcagcattttacttaatggagaaggactgctttcctcttcatatcaggaacacagcaaggacgtcttttctcaccagttccattgaacactgtactagaggtcttagctttactttggacgtgctctcaagttcttttgtgtggcgaagtcaagaccctgaaccggtccaccagcaacagttctttcggagtccctcaaccacaggccctgaaagccgctacgaaa

SEQ ID NO: 117200 - DNA, 1358 bp, Homo sapiens
atgctgacaacatgagcctcccgtggtcggaacgggcttgtgaaggcggtgctggggtgcaccagggcagcagctacaggaagggctccatcctgtgctcaaccctggggatgctggacagctttgaggaggtcacagaaccaggccagtgttcgaactcaggagccgaatgtggagcctgtgctcggctgttcaacccgctagcagcaccaaccagcccgtcaaccccacacctagcctgctctcacaactgcttggggaacttttacaagagacaaattttctgctatgcagccatgatgaaaaaggaaatagatgtccacgtgctgatgtggaacagtttccaagatacatatggctataaagaaggacaagttgaaaaggacatggagcaaccagaagttctgtatgctgatggtgggagtggaaatcagtgcaaccactttggaaaactggcaatatcttctttgaggtttgtaagccacagaaaggcacagggttcctggagctcactggaaccagagaacttcaaaactcaggtactcagagataatccttgcatttctgagcatgctggggacttcctcacaggacaggctgtctgtggctttggtgacaagatcaggctgttgggggctttgcctgctttgacagcatcttcagcacctggaacagtgcctggtgcacagtgggtgctcactaaatattcagaggtacttacatgcacgtccaccttcttccaggaggaggaaaggaaagggaaggaagctttttctccattgcccaaagtctttgatatttgtattagtctgttctcacactgctataaagaactgcccaaggcttctgaggagctgtctggtacggaggcacctcagacccgccaggacgttctgtctgacttgacgtctgacttgacatctgccctttgttctgaggggccaagcccatttgcagctggcagaaaaaccctcccaatctgcagggaggagcttcacagggaccctggagagaatgttgtgcttcagcgagttcacataaaatcatctctgacggtgttgaggaaagtgccagggaactttggtctctcagtcactcatggattcagcagatacttcggagcagctgttatggaccaggtgctcatagctctcacatcactaggtactgaggagaaccctgtcaggaattatgattctcattgtgtagttggggaagctgagacatggaaggctgagctgtctgacgtgacgcagctggggagtggccgagctggaaatggagcccaggtctgtctgactctggagtctgtgcctttgactgatgcagaaattcagaacatccgtgctgaggcgtag

SEQ ID NO: 117201 - DNA, 1164 bp, Homo sapiens
ttttttttttttttttttcagatataagaggtttattaaggaaaggctcccagagacaccagtaaataaatgggagggtagggaaagggattaagcccagcaagggtgtgatttcatgtaatgtcccagcctcaggccgatctagaggaaagggagtgctagagcataaattactcctcagagaatgtccttccttgaggcaagggagctgggcttttgactcgtagcccagtcagtcagcggccttggcacagaggacggagaactcccagaccctgctggctctccatatgggctgactggctccaataccaggtcacaggtgccagcctttaacctcaaagcacttaattgggattgggcacacagagctggccagagacccttaggggatctgggtggccaccaacactgctggtcatggcacagcacctccattactaccctgcacacccaccggcaccagttacaggtctttcattacattctgctgcaagaggaaaatgagtaatatcctttgacagtcctgggtttggcttttcatcatccaaagatgtacttccttcctccagtgggtagaagtgggtgtccctggaatgcctctgtaagacggagcagccgtccccggttgaagatcacccgggcccatttgaaaactgcggagggcatacttttggctctccctggcctccttagttgagtgattttctgagacaggcacttgcagacagatgccagagagtgagtttgccagagccggccctgtgggatgcccaaaccttttcatagaatcgatgcagggagttccgaaggccatcatcctcttccttctgtgactggcctttcacagcagggtcaagccagaagttctcagcggtccaggagttattttgttctatatttaagttgctggtgtctggatccgcttcagaagaataaggaaaagaatggaattccaaagaactgaaagcctcgctgttggcttcttggctgggtccctgcagaacgtaatctcttatgtctcgcactgatggcaggtccaaagcactgctctcctctgacaggctgcctgaagtggcgtccctggctaccatagtactctcctccaaagcactccagaaaactgaggagaaaagccgccaagccccccgacacactcaccat

SEQ ID NO: 117202 - DNA, 306 bp, Homo sapiens
atgagagaaatttccagaagaatctacaaaggaaggaagatgtcaggggacttgcagacatccctgtctgaagtattcaggctagagactatattcccttggcagaaaatctgtttaaacccctcaagcgtgaccactatggtgtccttaccaagggcatacaaaggagagcaacactgggggtggcagggcaaccagaaggaaggagcccagccccctataactttagcaggcagaaatgccattctagctgactttaaacctaacaagatggccgacatcatcgtctttgactccaaaggatag

SEQ ID NO: 117203 - DNA, 771 bp, Homo sapiens
atggcctatgcagcaggacgaggttgtactaagattggtaatgtagtctcagtcattcctactggatttgagctcactggtaatttattccttgcaatttcaaaggatgcaggcaaagagcagaatgataattgcaagctaggctactcctctatggatagcagctgcttctggtcaccacaccctcctacgctgaagagggcctctcgttttggagggtgcaggaagaaaatgatggatgagatgtggtggcagtttaaatctcaggtcaggtctttttgccttcactggtatgcttggagtaagcctgcacctgtggttcaggggccatctagaaatttgggagtttttatattttctctctttagttctggcttgcctgaaatttctgccttactttccagtgactgtggctgtcctgaactctgtcctcttatttctgaaggcagccctcatgaagctgccatttgtcactctgctactcatatcagtgctttgcaaggttgcacctataatgatgaccccaaaactgccatgtttcatgtgtctcactcatccagaggcaataggctgagagcggcagttccagaaggtgcctatacttctgtcttcatagccagagttgctgaaacttggaaacgaatgcttcctgccctcaaacatcacactccaggttcttcaggttttggactcttggacctacaccagcggtttgccatggctctcgggccttcagccacagactggagattgcactgtcagcttctctaa

SEQ ID NO: 117204 - DNA, 651 bp, Homo sapiens
tttcgtggaataaggatccagaatgggacggatttggctcctccaggaagaaagcaaaacaaatgcaggtcgcgaacactttacattgcaggaagctgctcttccagtggccgcggctgggtccttccacaccacctctctgtcctaggccttcgtcccggttcagccctcacggattctaggctagcggtcaacaaccgcatccctccggaacctggaaactctaggtccgagatctcggtgaagaatgaaaggcacagcgccgctcaacccaggcttcaggcctgccccgctggatatcagacagttaatcatcagaataaaggagcggttcccacagagttacatcccgcagaagaggtacgggaccgagagagtggggggtcaggcctgaagtcgagattgtgggagtgggggggacactcacaagttgtgtggaagggaaccagcggcaatgggacccggcgagcacttgcccgcagcaaatgcctgcgctgctgcaaaaaaaacaacttttggcgcaaagaatgttgcggccagagagcatccgctgtcgctgacaaaggagtagcaatggcaatgagaaaccgccggcgccacggccgaccgcggcggctcacgcctatgatccttgcagtttgggaggccgag

SEQ ID NO: 117205 - DNA, 567 bp, Homo sapiens
atgcccagggggcacgacgttgctcctagagcctcagtgtgcccatctgtcctgtgggggatgctcaccagcccccaaccccggggaggacctgcagaggctgaccatgtggaggccgccatcctcgaagaagacgagggtctggagatagaggagccaagtggcctggggctgatggtgggtggccccgaccctgacctgctcacctgtggccagtgtcaaatgaacttccccttgggggacatcctggtttttatagagcacaaaaggaagcagtgtggcggcagcttgggtgcctgctatgacaaggccctggacaaggacagcccgccaccctcctcacgctccgagctcaggaaagtgtccgagccggtggagatcgggatccaagtcacccccgacgaagatgaccacctgctctcacccacgaaaggcatctgtcccaagcaggagaacattgcaggttgtgatactgcagcagcctacagtatctttattttatgtgtgacgaaagatattcttggcctttctgttcagcaacaggacgaatggatttcttcattctag

SEQ ID NO: 117206 - DNA, 345 bp, Homo sapiens
atgagtgggggtgcagctgatgcagaagttcttggccccttcctgggcccccttcactggagcagcaacctgtcccccagctgctgggaacatcggttggtgaaggctctcagctgcccccttcttcagaggacaccacttgccaacagcagggccatgggcacagagaagacaaggagagtcccggttaaggggctgttcccgaaggacagttttgtctccagcgtcatcggccggccattgctcacttgtgctgtggacgcatgtagggacgttagacaaaagcatggcaccttggaaaagcccaactcggaggtgcccctggtaaccccctgcttcgactaa

SEQ ID NO: 117207 - DNA, 1233 bp, Homo sapiens
atgaatacagggaagctgcagcttagtgtgcacctggaagccttgggccagccccaccatctggggaccagtgatgtcagcttcccaggcctcaccacccacacagctaatgaaggtgtttcaaggctacctctggtgtcctcaaacgaccccctttacaggcccattgtcactgccaccaccccgatacatgggtacatgtggtgtaccaatatggagatgaatactctgaaggtcatggcatttgttgcccaaaattttttagacaacttccctagcagtgacaccctgtccttcattgcaaggatattcctgctgttccagatgatgactgtatacccactcttaggctacctggctcgtgtccagcttttgggccatatcttcggtgacatttatcctaggcgcctccagattggccgcttgcttaaagtttttcgtgtctttttctggactttgtcctccggtattttggggaattggcatacaggtcgaggggagtgtttcgcccatgggtttgcactccttgtaaacgcactacaagtcgcccgaaatcttgccaacattcgcgccgctcgtacgcgcgttcggaccatccgaacgtctgcaagtaccgttttcttggccccatacacacagggagatatacaaaagacaaaaatttgcatagatgccgtttcttccaaggtcgcgtccacttcgaaagttctaactgtgtctttcacactattgcgatcgcctgcgcccctggaacgtcatttggcaaattcccaggaaccgttgttttatgtagtccacggacaagtctttagcctattgtttctagagatcgtctataatgagtataatattaagttaatatggcctttctgtatagagcccacaaacatcgtgaatgtgaatcatgtcattcagagggttagtgaccatgcctctgccatgaacaagagaattcattactacagccggctcaccactcctgcagacaaggcactgtatacatacgtggcccgggacgcaatcggctgtcgtagtcgaatagccctgcgtaacagtccgccgaggcacgtcgtcgtcgtatgtcgctccgtgtggatggcccgtcgatttagctacttgtgttacgacgcgacgaactgcgtcgtcgcaagacgtccttcttgccacattaatgatgatcataaacacgaggttcaccctaggacgacttgcatgcatcgaccatatagatga

SEQ ID NO: 117208 - DNA, 773 bp, Homo sapiens
tttcgtgggaatctttatcttctcgtctagttctccgaggttgaaggctcggcctgctcagagaaggaaactgaggtccaccgagttggagaaacctactcaacaccaggactaacttcttcagtgcttagagtgtgagaaaaatggcaaatatgaatagtgattctaggcatcttggcacctctgaggtagatcatgaaagagatcctggacctatgaatatccagtttgagccatcggatctaagatccaaaaggcctttctgtatagagcccacaaacatcgtgaatgtgaatcatgtcattcagagggttagtgaccatgcctctgccatgaacaagagaattcattactacagccggctcaccactcctgcagacaaggcactgattaggaacttcatctttgtatccatagggtttagcaagttgccacagaaagaggttcttgccataaaactcatgcctgctgttggtcgctctagaggatccccctggaagaaaaggcaacagcagcaaactcacattgtgcctacagaacttcctcccatggttccaattcctcgttacatacaacaatcatctgcagaaacacgcaactctgggtctgacagtgtaacaccaccattcattcccagtgtgatttcattgactctgactcacgcttggctagatcttccagcagctcagtacaagaaggatgcgtccttgcatgtggatctggctgagggaccttcaggcccttctcacactgtacgtgaagttgagcagtga

SEQ ID NO: 117209 - DNA, 417 bp, Homo sapiens
atgaggaatctctggatgcaacttcagctgcattgttactgtgttttcacaggaggcgatcgagttcggatgacagcaaatcatgaaagctacctcctcatggcaagcacccagaatgatatggaagactgggtgaagtcaatccgccgagtcatatggggacctttcggaggaggatgtggatcatccaattgtccagtacatttacgctgcacacactacccgctgcccattagtagccatcttggtgatcagatagactgtcaaagtatcacagtgcttgtgctcaagaaagccttgttttacttaataattgccccaaagggcaagagtagtgatgctggcaatttggatatgccaaagagaagtcataaaatgtttcacttacgtgaaaaggtgatatctgagatattgtga

SEQ ID NO: 117210 - DNA, 525 bp, Homo sapiens
atggaggtgatgacatcagtgccagctccatgcatacccagagcccggagagatttactagtgctagtgagcttggcaccaacaatgtctcagccttctcagtctgatcaagcagcaagtgaaattgaggtcacatcttcagtacttcatgcaagcagccagaaggggttgtccagccagcacctgggctttggtgctcctcaagcaggtggaggaagtttcaggcacctggctcctcagcgaaaagaggttttggaggaatattttaagtatgatcctgaacacaaattgatcttcagatttgttcgtactctgtttaaagccatgaggctaacagctgagtttgcaatcgaaataacacatggtggccgggatgtagagagagccacaggacttgtgaataaaatccacaggcaaggatgtggcgattccttttgcaatattggagggaatgccaaaccctatgtttgctgtggaaaagagtatgttagttcctcaaaacatcaaaatggtattgccatatga

SEQ ID NO: 117211 - DNA, 679 bp, Homo sapiens
cagagtgctgattggtgcgtttacaatcctttagctagacacagtgctgatggtcatttacaatcctttagctagacacagagtgctgattggtgtgtttacaatcctttagctagacacagagcactgattggtgcatttttacagagtgctgattggtgtgtttacaatcctttagctggaaacagagtgctgattggtgcgtttacaatcctttacctagacacagagcgctgattggtgcattgttatgagagtgctgcttggtgcatttacaattcctttagctagacacagagcgctgattggtgcgtttttacagagtgctgattggtatatttacaatcctttagctagacacagagcgctgattggtgcatttttacagagtgctgattggtgcatttacagtcctttagctacacacagagcgctaattggtgcgtttttacagagtgctgattggtgcatttgcagtcctctagctagacagaaaagttctccaagtccccacttgacccagaaagtccagctggcttcatctctcaatccaccctctaaacaggacacctcaactgctgctgggaatttggcgatgacggctctagctacttcctgctggataggggtgaagaaggggccctgcagttgtagtgtcctccagaggggaactctttag

SEQ ID NO: 117212 - DNA, 1185 bp, Homo sapiens
atgaagctgtggaccttcgcggtgagtgttacagctcttaagagtgctgactggtgcatttacaatcctttagctagacacagagcactgattggtgcatttttacagagtgctgattggtgcatttacaatcctttagctagacacagagcgctgattgaacaactaagactttggtacagcccattagctctccctgtggataccgtggactacacaatgccgtgggtgtctgtgagtcaagccattctgactgctgctttgacactgctttccactgtggtgaccacacccacctcatctttggtgattaaggacagcccatgttccctgccaccccaggattcaattatcctcattttacttaaagatcccagtccagtggctgcagttcctgctgtaacattttgcctactgagagcacaagctcaaagctcttccaggatactgggctcctctcacaatattctttctcatgatcggttgtgaggacaagatccaggcagatcacactggactcccagcactgaatctggctcgaggggacatcaaatttgactgggtcatggggctcaggagcatcaactctcaaaaaatagcagtacaggaagaggcgatggccctaaacagcatttccaggcagatcccatgttaatcatttatggggagacagagagaaagaggagacactccaggaagacctgcaggtgggagtaccaggttgaaaccaaggacacattcctggaggagctgctgtttgagccagctctgagaacaggtggggacaggactggagaggaggagggggtcccctatgagcaaagactggccaccaccccatctaacacccccacagggcccctgtggcatccctgtccagtccctgtcaccacccagtttttccctctggacccaggaattcaaagtaagcaaggaggtccactgctccagttgactgcaaataattacaaccttgagcccaagcagcactttgggtcctggtttgggaccatgaagcggctcggcagccagaaggggttgtccagccagcacctgggctttggccctcctcaagaaggtggaggaagtttcaggcacctggctcctcaggtgtctgccatccaggtgctcttcaggcctgcccagaagagctctcttgatccagctagaactggccagaactga

SEQ ID NO: 117213 - DNA, 729 bp, Homo sapiens
ctccgcaattcccgggtcgacgatttcgtcttgtttacagtgacaacaaggtggtattggagtgttacagggtcacagagaagaccttcaattatcaattagaggttttaaatttaaatttaccctggcttttaaaggaacagggtacactgttttctctttactgcttctctctctgactctgtctctctctttctctctttgactccctctttgtctctctgcctctctctctttcctctgctgggctttccctgcctctgccagccacttatgccgctgttctcccctctccttgcccttcccctaggggaggaaccggcaggagtagtgctgggattacaggcgtgagccacagcgcccggcccttttttttttttttttttgtggttttaaggagagagtttaataggcagaaagaaagggagaagacggaagaagctcccccatattattttatttatttatttatttttttcttttttctttttaccaggaagtaagtaagccctgagaatattgggttggggtaaggttgggatggggagctttctgtttagagggaactaccagtggaaaggccctttgttaggagcattcttagtgtttccagctcctgaagccccagtggccgtgtgttacagtgtgctctttcagttttgtggtctacaggtggcttgtgccaatcagctgagttacactctctgccttatcgcaaggatagagggc

SEQ ID NO: 117214 - DNA, 552 bp, Homo sapiens
atgaggaagaccatttctggcctagcttattccccacccacccacttcctgtgggaaagcagggcaattctgaaacccatatgggtgccgtcagctgggtccctgagggtacagccacccagtggcctgaaatacccacccaggcctgctacacgagagaagcagctttcagtccctccacctggcctctcaggacttcttccaaaccaggtctcaaaatgccacttggtgttcctgctcagttgtggtatcagcgatactgcggatccaggccctgggccaagaaagcagcatggctcagcttctggttctgaagctgtgtctttgtctctgaaacttccagaagcccattccttccaggacaccctggggaaccgccaaggtgcacaagacccacctgcctactcacaaagacccaatggtgtgggagtttggagccattccttttccctactgaggcctgcccacacctactccattcttgtcaaactgcagggggtagcgaacaagttccttataagtgagaaaataggcagcatgggagaaaaatga

SEQ ID NO: 117215 - DNA, 487 bp, Homo sapiens
tcattctccaagtccgtgtgtgatccgatctttccagcacactagggcaagaacctgggatacagagagccctctatccttgcgataaggcagagagtgtaactcagctgattggcacaagccacgtctttgttcactgtcctccaaacactgtgctccaaaacactggtcaccttgctgttcttcaaattcactaagaatgctcctaacaaagggcctttccactggtagttccctcttccctccactattgtcctgtgaccctgccaaatccccctctggctggtatctgtggcaggtggggacttcctcttttggttttggagcccccctccttctgtctctgtatgggggagcttcttccgtcttctccctttctttctgcctattaaactctctcctccggtagtaaggaaaatattcagaactcccctttcctttcttctcaggggaagaaagagtagctccactcctgccggttcctccc

SEQ ID NO: 117216 - DNA, 581 bp, Homo sapiens
tacacttagtttcttgggctgagtgggatttgcgtggctgcagtctgggccccgggcagtcactagcctagaggcttggcagatatgctgccgcaaattgcaagaattacgccttttcacctcctctgctctcctcccggagccggtgcccaccctctttttcacaaaccgcagggctggggagagggacttaacctttggcctgcctgcctggctgtttggctctgcgcttgccgatattggtctctttctcatctaatggtctttcctatgtctctgccagccacctatgctgctgttttctcctctgcttccctctcccctaggggaggaaccggcaggagtggaactactgtttctttccctgagaagaaagaaaaggggagttctgaatatttttcttactactggaggtttgtgtgaggttcaacccccccaacaatagggatttctcacctctaagtcatcctaaggaattctttaccacccctgcggtttttctctctttggtatgtcctaaccaaggaatgctttaccatcccggctttttccttagtcccgaccaccaaggaaatacttta

SEQ ID NO: 117217 - DNA, 635 bp, Homo sapiens
  misc_feature (1)...(635): n = a,t,c or g
cgctccgcaattcccgggtcgacgatttcgtcccagcgtctctagatctcgtatttgaatttgtggcgcttggtgtccgcgagttgccgaatgaagctgagcgtctcagtggaaccagggatctcagggaggggaaggtataaaattttcaaatggaggagtatacctgaacctaatcatggatgtgattttatgtaagtaatatgtgagatacagataagctgattctaaaacttacaagaatggcaaagaaacaagaagagcttaaactgcaatcatcaacagagaagctttctgcaaccaaagtgaagactgaagccttaggctatggcagaagttgggcgcctgaagtacacgtggaaatatgccaactgaacattggactaccacgtcaannnnnnnnnnnnnnnnnnnnnnnnnnnnnnnnnnnnnnnnnnnnnnnnnnnnnnnnntagcaggagcgcctgcccctggctcagcgcccggtgccaacagaacacctttcaggatccacagcaacgcagacaacctcctctttaacttctgacatgaggggaagcagcctgaagcccttaccagaagtagatgctggtgccaagcctcttgtacagcctgcagaactgtgtgccaaataa

SEQ ID NO: 117218 - DNA, 524 bp, Homo sapiens
cggtgtgaacgtgtgtccgcagcgtgatgggcaaccaggtggagaaattgacccacctaagttacaaggaagttcccacggccgaacccgactggcgtggaccgggacgacgggccccgcattggggtctcctacattttctccaatgacgatgaggacgtggagccgcagccgccgcctcaggggccagatggcggcggcttgcccgacggtggggacgggctgccgccgccccagccgcagctcctacgatccgcggctgcacgaggtggaatgctccgtgttctaccgggacgaatgcatctaccagaagagcttcgcgccgggctcggcggcgctgagtacctacacgcccgagaacctgcctcaacaagtgcaagccgggcgatctggtggagttcgtgtcgcaggctcagtacccgcactgggccgtatatgtgggtaacttccaggtggtgcacctgcaccggctggaggtgattaacagcttcctgactgacgccagcctacggcgtcgcggccgc

SEQ ID NO: 117219 - DNA, 816 bp, Homo sapiens
atggacaaagtgaagaatgttgggggccatgtccgtctgatcacaaaggagtccaggccacgggatcctttcacaaaaaaacttcttgaagatggagcctgtgtcccatttctaaatccatacacagtccaggcagatctcactgtgaagccctctacatccaaaggctatttgcaagctgtggataatgaaggaaatccactttgccttcgctgtcagcaacccacttgccagactaagcaagcatgtaaagcgaactcttgggattcacggttttgctctctgaaatgtcaggaagagttttggattcgatctaataacagttacctgagagccaaagtatttgaaactgaacatggtgtgtgtcagctctgtaatgtgaacgcacaagaactctttttacgtctgagagatgcccctaaaagtcagaggaagaatcttctgtatgctacctggacttcaaagctcccattagaacaggaacaaggaagtaaagagaaggtagaaagatcaattctagagaaattacttaaaaattggctcccccaaagcaatgtcacagtatcagtcaatgaggactgtctgccaatggtaccacctggagaccacacccagcagcctggatacagcatggaaaaggcttcaggcttttttgatcctgaggttggatccattcaagattggattttttcaacagcttatgatgcatggactgtgggacaagggaacttaaactatatttataagaacaaagacagatcagcgacacagaagattaacaaggatatccaggacttgaacacagtgcagacctaa

SEQ ID NO: 117220 - DNA, 348 bp, Homo sapiens
atggtgaggataaagcatgcagaagaatgtggaaggactagactggctgagtcttctggcctccatctttctcccatgatggatgcttccagccctcgaacatcagactccaagttcttcagcttttggactcttgaacttacaccagtggtttgccagaggctctcaggtcttcgaccacagactgaaggctacattgtcggcttccctacttttgagatttggggactcagactggcttccctgctcctcagcttggggatagcctattttgggacttcaccttgtgatcgtgtgagtcaatactccttaataaactacgcttcatgtatacatatatcctattag

SEQ ID NO: 117221 - DNA, 353 bp, Homo sapiens
catgtatgaatcacttggcaaaacctgatgttaaaagaaatgcaaagagtggtaaagccaagaagcccttgtctgaccctgcctcaagtgggagagacgatgagagggtttacctcctaaggggcaggactaataaagagaaagagaggtttgaagatacagggaagaagggtttgaccagtgggcaaggaacccaggaagcaggagagaggtggactaactgcaaacaggacagggacacctgtcccctaaggcagaaggaaatagtaggactccaagttcttcagcttttggactcttggacttacaccagtgatttgccagtggctcttgggccttcagccacagactga

SEQ ID NO: 117222 - DNA, 405 bp, Homo sapiens; identical to SEQ ID NO: 114346

SEQ ID NO: 117223 - DNA, 950 bp, Homo sapiens
ttatgccggtactgccgggcctcttgcgggatatcgtccattccgacagcatcgccagtcactatggcgtgctgctagcgctatatgcgttgatgcaatttctatgcgcacccgttctcggagcactgtccgaccgctttggccgccgcccagtcctgctcgcttcgctacttggagccaatgatcacaaggtgaagtccccacaataggctgtctgcaagctaaggagcaaggaagccagtctgagttccaaaacctcaagagcagggaagccaactgtgcagccttcagtctatggccaaaggcccgagagcccctggcaaactactggtgtaactccaagagtccaaaagttgaagaacttggagtctgatgttcgagggcaggaagcatccagtgttctccagggccgatgtatgtttggagatggatttccccctctcacacttcaggcactcagttttttggcagtctcatggagttttcagtggcaagccgcttatttcaaatggtctgtgaattcttttggtttttctgatatgttcctgggatttggaaaggattccgtgatggttaatattgagtgtcaacttgattggattgaaggatgcaaagtattgttcctgggtgtgtctatgcttcctgacctcgaatatcagactccaagttctttagcttttggactcttggacctttggccacagacggaaggctgcacttttgaagttttgggacttggactggcttccttgctcctcagcttacagatggcctattgtgggacttcaccttgtgattgtttaccagaagttaggtttatcactgttgcaaagccactgagttctgatccagaatctcacaaactggtacatgcccacgcagatctagcctgtccagaagatgaacaggaggaaaaacgcaatgccaagaaggaagcaaccgggtcctaa

SEQ ID NO: 117224 - DNA, 810 bp, Homo sapiens
tcacacatccttgagtgacttcccatatgtgtgtggggctgaagcggcttctttccgctgaacttttatttccatttcagcctcgtggcttctcttattcaggtccaaggcccctggcctctcaggtggatggaggctgttctcatctggggctgtctcttgattaaggctgtcacctgtttgtatagggaccatgtttcccaatgcactttgagtgcagtttaggaggtatcctttggatgctgaagtgttgggattttgaggacatgcggatgatttatgagaatagaggggcagagtttgtgaagtctagggttttttgtccagtgggtttcaaatttgttggctgtttaaagaccctgtctcctcccccaccctccccttccttttcccatcaaatgcctacctactgaggcgccttctctttttattcttgagccaatgagatatcagtgtgtttattaataaggattgcaatagtatagtgcttaatatgtgccaggcatagtgctaagggtttacatacgttatcccttttaatccagaaaacagcctttgattaggtattgttgtctccattttatagatgaggaaactgaggcagtatgactgaggccgagagcagtggttaagacagactttgggatcaaatcaccctaggtgcgggcaggtttctaggctgctctaagcttctaccttgaaggcagttgggtctgataatagtaccttcttcctggggtggttgtgaggatataacgaggtaatgcatgtaagcatttagtaccatgcctggcacatagtaagcactca

SEQ ID NO: 117225 - DNA, 1449 bp, Homo sapiens
gccggcgatgaatttgtggagaagaccctgagcaccatagcgaccagcacggatgcagcctccgttgtccacagcacagacttggtggtggaagccatcgtggagaatctgaaggtgaaaaacgagctcttcaaaaggctggacaagtttgctgctgaacatacaatctttgccagcaacacttcctccttgcagattacaagcatagctaatgccaccaccagacaagaccgattcgctggcctccatttcttcaacccagtgcctgtcatgaaacttgtggaggtcattaaaacaccaatgaccagccagaagacatttgaatctttggtagactttagcaaagccctaggaaagcatcctgtttcttgcaaggacactcctgggtttattgtgaaccgcctcctggttccatacctcatggaagcaatcaggctgtatgaacgaggtgacgcatccaaagaagacattgacactgctatgaaattaggagccggttaccccatgggcccatttgagcttctagattatgtcggactggatactacgaagttcatcgtggatgggtggcatgaaatggatgcagagaacccattacatcagcccagcccatccttaaataagctggtagcagagaacaagttcggcaagaagactggagaaggattttacaaatacaaagtccccataggatgcaggcccttgtcctggaaatggcagggttctttcttgaccactgaattccaggaaagatgtaactcagcaatgcaactatcagactgccgggatgagaagaatgggcataaggatggaacctatgccatagggttgctggggaccaagcgaagtaggtttcaggtgttgagcacactgcctagcatctataggccaattgtgaaggaagccccagtaacctatgttcatcgggttacagatgacagccctgaacatgtgacagcagcagggagtaggcttaagattcagagcaggcctgagtcttggaaaagcttcactggggggctgcggctgaagctgggccaggccaggcgagccccggcacagcccaacccaccagtgaagtctgcgcaatcaaagccagcaattactgctctccggctgcggctgggcttcaaagggatgaagataagaagctgctctacctcatcaggtgcgctgcgggatgtgggagacgtatgtgcagagccgggcgagtgcagggcagacgccctgaagcagcgtaacagaactgaaatctgtcccctccaccccacaatggggctgctacagaacgagaggaggcaacacatgcagaagcatctgttaaagcctccggaatgtggcaggtggtccatacaggttgggaccatttctgctgttccaacttcacacgacacattcggggcagcaagcaagattcatactattacagaacttctggtagaaaattaa

SEQ ID NO: 117226 - DNA, 738 bp, Homo sapiens
atggctaaaagcagctatggaaaaaagtcaggaaagcaaaagaaagaactgcatatggaagccgagggctctctctggagttccataaatggcatcaatctgactctctgggggcatgccggtgaactgacagctaggagttggaggtgtgccttttcaggtatcctccaaactgccagaggacaattagggaatgtgcaagcctcctgggagtccgcactgtcttctaggcttgttctcagctgccagtcagtcaatgacgaaagtgatattcagacaagtcaggcagctgggtctgcagtcgggctccaaatgttgccaccccgaatccagtgccccacctgggatacaaagctactaccagacccagtcacaaatgctcagaggctgtcctctggaagaaagggccaaggagacaagtctatggtgaagataagaagctgctctacctcatcaggtgcgctgcgggatgtgggagacgtatgtgcagagccgggcgagtgcagggcagacgccctgaagcagcgtaacagaactgaaatctgtcccctccaccccacaatggggctgctacagaacgagaggaggcaacacatgcagaagcatctgttaaagcctccggaatgtggcaggtggtccatacaggttgggaccatttctgctgttccaacttcacacgacacattcggggcagcaagcaagattcatactattacagaacttctggtagaaaattaa

SEQ ID NO: 117227 - DNA, 324 bp, Homo sapiens
atggtccctatacaaacaggtgacagccttaatcaagagacagccccagatgagaacagcctccatccacctgagaggccaggtaaggccactgctggtcaacctgaaagggaagggcgcattcagatggcaacagcagccaggactcttctgagaatagggcccaccttctgcagggatgtggataaggagagtccaggcccaagagaaggggccttggacctgaataagagaagccacgaggctgaaatggaaataaaagttcagcggaaagaagccgcttcagccccacacacatatgggaagtcactcaaggatgtgtga

SEQ ID NO: 117228 - DNA, 1009 bp, Homo sapiens
atggctgctctacaactctggtccattctaggacttctgttggcaactccccttgctccaggtactctagcctatgctggaaaactgctgttaccctctcctctgcattcccaatctaatggattacacttggtgggggttggaagaaccgaattccgagtacctactgctgagatgctttccacagtttgggctgtggaggcccctacccactcaaaagcaggtgatccaatctcttttcgaagactaaaatacctgtgtggccacactgccgagttccacgaatggctgacttcatatgtgcctggatttaaacggcatcctgctcttgattgttggtctggaacagcgtctgcaacattttctggtgtctttctctcacaacatctccaagcctttccccactttaactttaagatgcttcctgccctcaaacatcagactccaggctcttgtgtttttggactcttggacttacaccagtggtttaccaggggctcagctttggccaaagaatgaaggctgcattgtcagcttccctacttttgaggttttgggacttgggctgaaccactactggcttcctttcttctcaacttatagacagcctatcgtgggactttacgttgtgctcattgaattattcttagtttccgggaaccactccatctttgcctttaccatagttcaatccccagagcctaggagagataaatggttttgtgggccaggtccagggcaccctgctgtctgcagcctctgccttggtgcctgcattcaagctgctccagctatggctaaaaggggccaaggtacagctcaggctattgcatcagaggtcaagcccaagccttggcagcttccacgttgtgttgagcctgtgggtgcacagaagtcaagaattgaggtgtgggaactctgcctagatttcaaagaatgtaaggaaacacctgatgtccagacagaagtttgctgcagggacaatgccctcatggagaacctctgctag

SEQ ID NO: 117229 - DNA, 447 bp, Homo sapiens
atgaagcacaaggccagagacctgacagaagtaatggtttccagcaaggtgatgtggcaaccgctaaaaaccaaactaaaagatgtgcatgtcagaagtctggctgtcctcatagatgacaagagattagcattcagtacttctggtatagtttctgagaattctgagaatttagatactgcctggctccaagtcctgcaggttttggactcttgggcttacaccagtggtttgccaaggttgtcaggcctttggccacaaactgaaggatgcactgttggcttccctacttttaaggtttcgggacttggactgatccatcactggctttctgctcctcagctttcgatgtctgtctgggactgtgatctccggaatgggaaagaagaagcgaacgtgagcgaacaacaacatacaaaacgagaggaagagacgcacgatgactga

SEQ ID NO: 117230 - DNA, 570 bp, Homo sapiens
atggaggtttgggtggtgcacctggttgcccagtttgtgtggaaagagaatggcctgagggtagaatatgcacagactcttacttgggctgtggcaaatagccaccttttgatggtcctgggaggaggattggaagataggagaccaggggtagaggcctgtggatcaacatgggaatggccatgcagtgtgaaggtctttcccttgcttattaatgcccacaagaaagcatccaccatgggagatgcctatttgtctcaggtcttgagcttcagatcctatccccttcctggttctgcgccagagaaacgggtactgggtagaaagctgcagtccatactggctatactgctagttgcccacatcttcactgaagaaaccactcgagatggcttggcaggagccacgctctgtgccaggtgttgggcctgggtagtgcacagacagatggacaatggagtaatttacaggtcagtaaacactttcctggagatgccggagcagtttcattttggtacagataatatgggatttgttgtgactcagaatatcagtccagagtgggactga

SEQ ID NO: 117231 - DNA, 839 bp, Homo sapiens
atggatgctctaagtagttgtgtcactcccaatgcctcttcctatgcacactgcaactacttccagaatccttcaatgcagtcctcctatccagttgaatttttgccttccaattggccctgcagtactactgatgaaaatacaaagacagaagtaaacctagaggctgtctttcagatagttgatgagttgcattcctcccctaaattggagatggtaaaggtggagcctgttgagaatcagtgcccaacatctccgtcttacagaggccaacacattttagctaattctaacaacagcaatccatgttctgcaagtcaggctagccagctggagccacttactcctgtaggctcagatattatgtcttttgtggttggaacagaacaagcagttgcctgctctctaccacagtcacctgagtacatctataccatccacacagctcagcctgttgaaaatagcacaatacaggaatctgcagccatccagcaagctcatgtcaaactgaaggagcacctaaatcataatccatctccatcttcagtagtatttgtgcaggaagggccaccattcagcacacaccaggtggatgccaacataaaatgccagaccagttcacgtgagaatatcttgccgtcagaacagatgggattcctcatttcagaaatggggcctgctagcaagcctagtgaagacacaggtttagccactccagccagatacagagagcacagaagcaactcacaacaaggaaagtcccctgatctttcatcttgttggtggacgtggcctgcaagcaggagcgctttccaaaggaggaagaattaaaagagtga

SEQ ID NO: 117232 - DNA, 744 bp, Homo sapiens
atgaccctcttcctgaatttgcctgtttgggcctgcagcctggtgactctttgtgtgatcccaacagctgtcatagagatgggttggacttttactgagacctgggtcctaggcccagcactgccaccagctagtggcgcaatgccccataaagaggccacttattctctctggcctctactattggtaaatgggtataataatatccacgctgccaatcctgagaaatttcaggaagacccactgacctattatttgtgtcaggcactttattcctcacaacaatgctggaagattggtataactattctcaaattacagatgaggaaactgaggtctggggatctgtctgtgtcggagatccccaacccccggggcatggacaggcttcctgagggctcctcagaaacatgtgttagaaaagaaaagctttccggtctgtccagtctcctccatgaccacagtttctcacccacataccattgtctggcttggaatggatcctggaaggaggactcaagagaaaccatagaaacagacaacaggaagttctcccagtccagggcccaatcctccatagaatgttcgggtattattagtacttcagccaaggctctaatgcagtatcaagatgcagatttgcttctgactgttagtacctgttataagaggaaaggaggcaaaagtgtgaaagagaaatggttggatcagtggtctgagaaagaggataaagtagtcatgtga

SEQ ID NO: 117233 - DNA, 396 bp, Homo sapiens
atgacgtcaggcccgtgcaggccgggagtggcgtgctgggcgtgcgcggctgcggtacggcgtgttggtcccagcggttcagctgaggccggaatgttaccggctgttggatctgcggatgaggaggaggatctgcggaggaggattgtcctgaattggttcccatggagacgaccaaagcgaggaggaggaaaagtctggcctcggcgccaagatcccagtcacaattatcaccgggtatttagccgggaaggaggaaggggaaaagagcaggaaggagcaagagagaaagcagggcagactcatcccttttatcagaaacctgctccattaataactaactcccatgataacaccattaatccattaatgaggacagagcccaataacccttaa

SEQ ID NO: 117234 - DNA, 514 bp, Homo sapiens
gctgcggtacggcgtgttggtcccagcttttcagctggggtagggacgtgctgtaggccggaatgttaccggctgttggatctgtggatgaggaagaggatcctgcggaggaggattgtcctgaattggttcccattgagacgacgcaaagcgaggcaggaggaaaagtctggcctcggcgccaagatcccagtcacaattatcaccgggtatttaggtgctgggaagacaacacttctgdaactatattttgacagagcaacatagtaaaagagtagcggtcattttaacatgaatttggggaaggaagtgccctggagaaatccttagctgtcagccaaggtggagagctctaatgaagagtggcctggaaccttagaaaccgggttgcctcctgcttgtttcagtgaaggacaatggccttagagctattgagaatttgatgcaaaagaaggggaaattttgattacatactgttagagaccactggatttgcagacccaggtgcagtggg

SEQ ID NO: 117235 - DNA, 582 bp, Homo sapiens
cccagctgttcagccccatcattcctcaggcctcagcttcaaggtccggtcagcatgctgtgtgcgctcacaagcttctagcttttttctcttgtacagtgcttcccacagctggaatcaacacatgcttaatgccactgtttgccagcggttcagctgaggtagggacgtgctgtaggccggaatgttaccggctgttggatctgcggatgaggaggaggatcctgcggaggaggattgtcctgaattggttcccattgagacgacgcaaagcgaggaggaggaaaagtctggcctcggcgccaagatcccagtcacaattatcaccgggtacttagttattcagaggctgctaaactgagaagaagaacaaatttcttgtccaaagcaatgtatttcaaacgtgccgctcgggcctttcccgtattgctcactggtgctgggaagacaacacttctgaactatattttgacagagcaacatagtaaaagagtagcggtcattttaaatgaatttggggaaggaagtgcgctggagaaatccttagctgtcagccaaggtggagagctctatgaagagtgg

SEQ ID NO: 117236 - DNA, 838 bp, Homo sapiens
atgtcggcatacctgcagatgctaattctaggtcagtcttctcagttgccttcacaggttctgcaaacagctgactattgctggggaaaaccccccagctgtgcgggtgtggtccctattcatggtctccatcctggggtctgtatgctacgaggacaatggtccttagccttgaatgaatatgggaatcatcagcttgggtaccagatccagccacgtttttggtgccacaacccaaggagctggagggtaaggatccacagaggggaagggatagaggagatgagaggaaggagaggaaagaagagaagagaagagaagagagaaagggtgaggatgaccagctcagtacccagtgttctgcagctctggaagatagtgccaaatggttcttcaagaaatcatattcataaaaaggcaccagttcctgaaattgaatcatctgagttttaccttttcatgtgcacacatgaaacagacctaaaacattcccagatgtgccctcttctcatgggagttgatggatctcctgcttcactggattactgcgagccaccagagtacgcagaaactcctacagctcagtacctgcccaagtggctgccagctggagcccctgctatgggtctgcacagctttgtgcttgggacccaaggccctggtggtgtggactcacaaagggattacctgttctggggtttgcaaaaatctgtgggtaaagcacagttctccgggcgcctggctgaagagagcatggcttcagtggcatgggccgtcctcaaggtgcagctgcttctccccattcagacttggagccccgtaggagcaggacatccac

SEQ ID NO: 117237 - DNA, 814 bp, Homo sapiens
tttcgtgtctgcagcgccgagggaggctgccagtgcgtgaggaagagagctagagactggacaggggagacagagcagcgtcggagccgcgcaggggacgggagtgagagcgggagtgagagcaggaacgacgcagagcggccgtcgccgtgcccgggtctcagggcgcctggctgaagtgagcatggcttcagtggcctgggccgtcctcaaggtgctgctgcttctccccactcagacttggagacccgtaggagcaggaaatccacagtcaggaccctcagctgcaggtctgttggagtttgctggaggtccagtccagaccctgtttgcctgggtatcaccagcagaggctgcagaacagcaaatattgcagaatggcaaatgttgctgtctgatcctttctctggaagcttcgtctcagaggggcacctggctgtacgcggtgtcagtcagcccctactgggagaatcatcagtcagcaggcaaggctcctttcttgggagtgaggttctcctgttccctctcatccccatctgccgccgcacgtggctgctgtgtggctccctgtcatccttcagcagctcctcagagctgtccagcagccacggcccggggttttcaaggcttaatcgaagagatgagatatgggctctgtttcgttactttagattctattgctgcagagcctcagtggatggtcattatcactgaaacagtgactaagcctgggcacaggggtagatataacaatctccctttggttcagattgaaaaaacggaaaatgatgatgatgatgatgatgattgttga

SEQ ID NO: 117238 - DNA, 1680 bp, Homo sapiens
atggtggaaaaaggacctggagagccaggaatgagaggaagagcacagagaatgagaaaaagccggcaaagtgatggaactcaaaggtggaaggtggctgattggctctgtgagagaggaaagtgtatccattgcagaggccgaacagtgcaagtgattaggttggcccgcactctaaatcctggtcaacattcctggcatgctgccccagtgatggacactggaggggtaggctcatcatcgcataaggaagtttcaagctgtggatggagagcagatgtgcgatatggtttaaacagccttcagccttatcctgtctctggtgttttactgcaatggcatattcttcatgaagctcatttagaatatgattgctttgctgatgccagttcagagggggctctggagagagcttggagagaaaagacaaggccaaaatcactttcagaggcatcatgctggatgctgagctttgttctcaaggcttctgctcacaatgaaggtgagtcggtatgtgactggcgtgtgaaaggacggccgacatacgaaacagacgatgccttcccgggctataactacatgtgtttaggatgtcacttgtgtagccctcagcctgagatgctgagactgagtgcggctttgtcaggcagtgagaatgtccacaaacgggctgaaaacgtagacctcttcacgggaccggcttctttcactttccgccatttggatgggtggatgtggaatagttatgccgtcccacttttagaggtgtatattcctcccaagttacaattggagaagcggctgacaaatgtgaagcagatggaaacacagatgatggccctctctaaggcagtactagcgaagaccgactcagatgctgccacagaatgctgtatgctacagaaacaaagcaaccagtgccactatccaaaaacaaacttccccatagatagaaccagaaccaactgcagaccaggtgcacctgtgagcaagcggtctaagtgcgtgctctgcgcctcagttccctcatctgcaaaagaacagcaagaacacctacatcataaggccgtcaagaaaaatgaggagttctcaaatggaaaacacttagaagagtgcctggaacatagccaagctaccgtaaaaatatcagacactatgcagaggatgaagaggagcaacaggatgaggaaagcacagctccaagagaggtgggagctcatccacctggggaagcatgagcaggagcaggaagggtcactctgggactgtgctcatgggaccctgagatgcagcagaaagagcagtgtgaggagcaaagtgacgctgcctgcaggtaggacatcaatcttccccgactctgctctggccatatttactgccagtcgctgtcccttagactgtctgcctctcctagccttgacagatgagtctcactccaccaggatctttacaattcaaggcacagtccagcctcttgtagatgggaatcttgctaatgtagccactctagcttatcctggctgcatcatgagaaaaatggagttcagctcaggactggcttcctcggtttgcagagtcagtgggcacctgcaaactaagagcttccatctgcaaggaagacctatcaccccaagcacttggcttggctgctggctgacatttgatcatcagtacctttag

SEQ ID NO: 117239 - DNA, 423 bp, Homo sapiens
atgagctctaaaaatagaagtcctgtgaggcatccgcggtatcactcgcagtcgcccagcatgtgtgaccgaaaggagtttgtcttctctttcaacgccatggcgtcctcttccatgcactcggccggcgggggctcctactaccaccagcaggtcacctaccaagacatcaagccttgcgtgataaagtcggtgcttccgattccctccaatacagaaagtgcccatgctggtgatttttccacgaatagttcagaagcccttcagctgtttagcaattcagtcaatcaggagtcccgaatgcttctaaattcagagataaaggatgttcaaaacaatggcttccaggcccagttggcacaggagagggaacccaggcagaacctgtggtgttccagaattgaggagctggagctgaaatag

SEQ ID NO: 117240 - DNA, 2512 bp, Homo sapiens
ggcggcagcagccacccgatgtcttcggcgcccgagaagcagcagccaccgcacggcggcggcggcggcggcggcgggggaggcggcgcggccatggaccccgcgtcgtccggcccgtccaaggccaagaagaccaacgccggcatccggcgcccggagaagccgccctattcctacatcgcgctcatcgtcatggccatccagagttcacccaccaagcgcctgacgctgagcgagatctaccagttcctgcagagccgcttccccttcttccggggctcctaccagggctggaagaactccgtgcgccacaacctctcgctcaacgagtgcttcatcaagctacccaagggccttgggcggcccggcaagggccactactggaccatcgacccggccagcgagttcatgttcgaggagggctcctttcggcggcggccgcgcggcttccgaaggaaatgccaggcgctcaagcccatgtacagcatgatgaacgggctcggcttcaaccacctcccggacacctacggcttccagggctcggccggcggcctctcgtgcccgcccaacagcctggcgctggagggcggcctgggcatgatgaacggccacttgccgggcaacgtggacggcatggccctgcccagccactcggtgccccacctgccttccaacggcggccactcgtacatgggcggctgcggcggcgcggcggccggcgagtacccgcaccacgacagctcggtgcccgcctccccgctgctgcccaccggcgccggtggggtcatggagccgcacgccgtctactcgggctcggcggcggcctggccgccctcggcgtccgcggcgctcaacagcggcgcctcttatatcaagcagcagcccctgtccccctgtaaccccgcggccaaccccctgtccggcagcctctccacgcactccctggagcagccgtatctgcaccagaacagccacaacgccccagccgagctgcaaggcatcccgcggtatcactcgcagtcgcccagcatgtgtgaccgaaaggagtttgtcttctctttcaacgccatggcgtcctcttccatgcactcggccggcgggggctcctactaccaccagcaggtcacctaccaagacatcaagccttgcgtcgatgtgaggctgccgccgcaggccctcctggtgcaggcaaggcgggtcacagggaccctggaccggcacaagaaactgctttcttctcgaggtataaccgtcggcagaagaaaagggttccacctctccccaaccggagtttttggcaaggagtccccaatgcaaagacacagcgctgcggttggcacctccttcctcactccctcaaaattgttaagaaatgttagtggtgggtctgatctgactgcagccatcggtaaataaaagtttttgatcctgttgaacccgcctgagacggtgctgtgcaggggaaagccccgcacccacacaggaattctgctgaggtccccctccttccggccaatggcagaagtgggggaaaatttttagaagaaaagcaacatgtgagaccaatcattatcaaatacttttatttttgggtgagtattaaccttttaatttttaatttttttttgaaagaatgtcttggaatgcgcaagtctccctttagagccgtcttttgcagggagcgggaagtgacaagagctcagatctccctcccgatctccctccccacctccgaagtctcctccgtggaccacaggtggatctttgtgcgaacaacttgcatttcggaagccactgtccgtctttaaacagaaagtcaaaggagccacgaagcaagcggccgtccgggcgtccgcctccgtccccttccatgttcctcctcttccttcgcttcagcctcttctgttatgttttgtcttgaattttatttagactttttcagtgggtatttttctgtctcccaacctctactgtaaactttctggtccgagaacgagccgaacacagcgcgacgcagggactaggacggcccggtgaccgcgcggattcaggattgcggggacgcagaaaggttaaggcacttttaaaaactatagcaaggctcctgtttatttattctactttctttccctaataatcaaaacaccgcgtaggctcctccgtttatcagtattaatggtgtaactttgttggcaatatttgccgtgtagaattttttttagatatccattgtaaatttgaaacaaagaccgatctgtgtaaaaacaaatttccatatgttttatataaatatatatataatatgaaggactaccctcctttttttttttttgtattttggctgctagagtgcagcatttgtgacacgtatttgaaatttgaaatttccttctgcactgtataaaaggaccatttgaggatgttttgccttttgtgtattttttcctaaaaaaagaacaaaaataaaaatgtataacatttgtacatggcctttaaaattgtatcaactaga

SEQ ID NO: 117241 - DNA, 1085 bp, Homo sapiens
atgatgcagtggccgagcctgtgccagaaatggaccaccaagccccccgaacgcgtgggcgagcgtgcaatcatgcggcacagctggcgggccacaggtggggatcctcctagcagtctgaactggcagtgcatgctacagcttggcgatgtggccggtcgtttttaccacatgtcggtagacttgggtacaaacctcaggctgttcacccccaactttaatcggcccttggcaggcactatcaccccttattctgcccagcgtgtgaccgtacatcatgcgagctcatggtcccagtggcaggacgtccgttatgcaggtccagcagtatggagttgctcctgctcctgcccctccacatccccagggaacagatgcttctggcagagtttgtcttctctttcaacgccatggcgtcctcttccatgcactcggcggcgggggctcctactaccaccagcaggtcacctaccaagacatcaagcttgcgtgatgtgaggctgccgccgcaggccctcctggtgcaggcaggcggtcacagggaccctggaccggcacaagaaactgctttcttctcgagttcccgctaccgagaaaaacaaacacagaacatgcaccggcccagaagccagccccagcaggggcaggatcgccggcccccacggaaccggcaacacccaggacagacaagacggcggaccaaacgggagacccgaggggcagggaacgcggccaagaacggaccggcagtgagcggcggcggagcaacagaggcacgacacgtcgaccagacatacaccgataacaaggcgcacaattacactccgcacaggagcataaaactaccatatgaccagcgtgcaaagccagcctgccgacggggcacccaccacatgagagaaacccacgtcaatgctcgtagagagctctccctgcattctagtgctgttctccgggccgcatggatccggcacttcaccgtcaccagcgtgagaggcggatgccaacggtgctcctatctccactccgcaaatgaaaagcaggcacagagacgttcagtgacgcccccggcctcacgcagctag

SEQ ID NO: 117242 - DNA, 429 bp, Homo sapiens
ggcacgagagtagatgaaattcccaatatgtgactgtaatttacctacaggaatggtaatgtcatgtgattcaacctaatctaacttaccactatatctataaaacagtagatacttaaaatacttagaatttttttcttcatttttctctttaagatcctgataacttaagtgactctctcttttccggtgatgaagaaaatgctgggactgaggaagtaaagaatgaaataaatggaaattggatttcagcatcctccattaacgaagctagaattaatgccaaggcaaaaaggcgactaaggaaaaactcatcccgggactctggcagaggcgattcggtcagcgacagtgggagtgacgcccttagaagtggattaactgtgccaaccagtccaaagggaaggttgctggataggcgatccagat

SEQ ID NO: 117243 - DNA, 869 bp, Homo sapiens
aaggcagttaaagcttgacaaagtggatcaatgtctgatttatgcacagggaaaggtgtgcctatcctatcttctaaaacatgactgggtcttttgattatttccaaagagtgagacgtatagatatatatataaaagctcaatttttcaaaaataaaattttattgaactataggtagtgatacacttttaaaatgattctaaattattcttttgaacaggaaatgttaagagatttaaatcttggtgaaacgaaaagcggagtaccagtgctggcagtatccttagcattggaggggaaggctagtcatagagagatgacatctaagcttctttctgacctttgtgggacagtaatgagcacaactgatgtggaaaaatcatttgataaattgttgaaagatctacctgaattagcactggatactcctagagcaccacagttggtgggccactttattgctatagctgttggagatggaattttatgtaacacctatattgataggtacaaacgaactgttgattgtgtgcaggctaaagctgctctggataaggctaccgtgcttctgagtatgtctaaaggcggaaagcgcaaagatagtgtgtggggctctggatgtgggcagcaatctgtcaatcaccttgttaaagaggtaatgattgggtattgtttttaacttaatttatatgtattcctctgagtgaaagaaattgtggctactagctggtatttttatggacaaaaattaagttcggtcttacagctgcaattggaaaatgaaataatttttttaatatgtggctttataaccttttattataaattatatgattaaaaaatgagtctgttaaaatggctttcatgg

SEQ ID NO: 117244 - DNA, 999 bp, Homo sapiens
aggctagtattgaactccaggcctcaagtgaacctcccgcctttgcctcccaaagtgttgggattataggtatgagtctccttgcctggcctagattctatttttatatgcgatcaatgtatgtagcatgtctttgtcttgtgctaagtggggattattaaccacttagaatataaaattgtacaacaatttcacttgtttatttgcattttgttttttataactcttactcccttttcccctcaaaggagaactgtgtttatgaaactgtagttttgcctttggatgaaagggcatttgagaagactttaacaccaatcatacaggaatattttgagcatggagatactaatgaagttgcggaaatgttaagagatttaaatcttggtgaaatgaaaagtggagtaccagtgttggcagtatccttagcattggaggggaaggctagtcatagagagatgacatctaagcttctttctgacctttgtgggacagtaatgagcacaactgatgtggaaaaatcatttgataaattgttgaaagatctacctgaattagcactggatactcctagagcaccacagttggtgggcccagttaattgctagagctgttggagatggaattttatgtaatacctatattgatagttacaaaggaactgtagattgtgtgcaggctagagctgctctggataaggctaccgtgcttctgagtatgtctaaaggtggaaagcgtaaagatagtgtgtggggctctggaggtgggcagcaatctgtcaatcaccttgttaaagagggttatgagagaatttacaatgaaattccggacattaatctggatgtcccacattcatactctgtgctggagcggtttgtagaagaatgttttcaggctggaataatttccaaacaactcagagatctttgtccttcaaggggcagaaagcgttttgtaagcgaaggagatggaggtcgtcttaaaccagagagctactga

SEQ ID NO: 117245 - DNA, 2656 bp, Homo sapiens
atggaggcagggaccatcaggaagctcaaaacctttgcttcagccgagtttgcagaacgccctctccggctccgccgccacgattggccagccgaccacccggcctcggccaataagcgccgccctctcgcccccgtgttactgggtagaagaaaacaaaaacaaacagagcgagaagggccagagactctccgaggcggcggcagagacagaagagcggggtcggggccggctgaccaggaacctgggcgagcagcggcggggggcccgagggattctgaaggaagatttccattaggtaatttgtttaatcagtgcaagcgaaattaagggaaaatggatgtagaaaatgagcagatactgaatgtaaaccctgcagatcctgataacttaagtgactctctcttttccggtgatgaagaaaatgctgggacatgaggaagtaaagaatgaaataaatggaaattggatttcagcatcctccattaacgaagctagaattaatggccaaggcaaaaaggcgactaaggaaaaactcatccccgggacctctggcagaggcgattcggtcagcgacagtgggagtgacgcccttagaagtggattaactgtgccaaccagtccaaagggaaggttgctggataggcgatccagatctgggaaaggaaggggactaccaaagaaaggtggtgcaggaggccaaaggtgtctggggtacacctggacaggtgtatgatgtggaggaggtggatgtgaaagatcctaactatggatgatgacccaggagaactgtgtttatgaaactgtagttttgcctttggatgaaagggcatttgagaagactttaacaccaatcatacaggaatattttggagcatggagatactaaatgaagttgcggaaatgttaagagatttaaatcttggtgaaatgaaaagtggagtaccagtgttggcagtatccttagcattggaggggaaggctagtcatagagagatgacatctaagctttctttctgacctttgtgggacagtaatgagcacaactgatgtggaaaaatcatttgataaattgttgaaagatctacctgaattagcactggatactcctagagcaccacagttggtgggccagtttattgctagagctgttggagatggaattttatgtaatacctatattgatagttacaaaggaactgtagattgtgtgcaggctagagctgctctggataaggctaccgtgcttctgagtatgtctaaaggtggaaagcgtaaagatagtgtgtggggctctggaggtgggcagcaatctgtcaatcaccttgttaaagagattgatatgctgctgaaagaatatttactctctggagacatatctgaagctgaacattgccttaaggaactggaagtacctcattttcaccatgagcttgtatatgaagctattataatggttttagagtcaactgggagaaagtacatttaagatgattttggatttattaaagtcccctttggaagcttctaccattactgtagaccaaatgaaaagagggtatgagagaaattttacaatgaaattccggacattaatctgggatgtcccacattcatactctgtggctgggagcggtttgtaggaagaatgttttccagggctgggaataattttcccaaacaactccagagatctttggtcccttcaaggggccagaaaagccgtttttgtaagcgaaggagatggaggtcgtcttaaaccagagagctactgaatataagaactcttcgcagtcttagatgttataaaaatatatatctgaattgtaagagttgttagccacaagtttttttttttttttttttaagcacttgttttgggtacaacggcatttctgacattttataaacctacatttaagggggaatttttaaagggaaatgtktttctctctttttttttgttttttcgaggggggcaagggagggaccagaaaagtacccctcttctaaagtggaatattctaataagctacccttttgtaaagtgcccatggtttattatcctaatccattcccaagttttgcattgatgtctggactgccactccctttcctttccaaggacagtgttttttgtagtaaaatcactgggtttatacaaaggctttatttagggggggaaagttaaggctggctaaaacccccatgttggcctgctgctgttgagatactgtgctttagaggagtaaaaaaaggaaagttatttctttgtcttaaagaatttttaaaaaaattagtcatgagacttattcatctttccagggcacatactgattgggtctttaaaagactaggacagttaagtaaaaggtggctggaacatctatttttctacaaaactggaaaaatgaacctggttctagaagaatgtacaccaaaataaaacatgtgaagcgagtattgattctttattgggagtacatttttttaggtctcttaaactttaatttcacacagtaaattttgaatctcataaggaagcatatttgaacctagtcaatttaatcttagtgttcccttgaaaactttttttccctacaaaattttaagtgaaaaatacaatagtaaatcaagattacactggggaaaaaaa

SEQ ID NO: 117246 - DNA, 1896 bp, Homo sapiens
atgccctgcagccttgagcttctgggctcaagtgattctggcacctttgcctttgcctcccaagtagctagtaccacagtggataaagtccacgggaacaggcaagttattttaaatctgtatcttctgttgtcaagatctgtaatcagttctgctcgctggactggggacaggaaccaagggaacatgagggtgaacgggttggcatggagtccaggaacacactgtgcctacatgcagaatgtttgtgccaggaaagccagtcggcaggcagatgctcacactctagccctttgttcccagtcaccaagagtgactacaaatgtgggggaacaggaggacctgaaacagtcatggaaattgagactgggacacagaagccatgctcagaggcagcctagcatgcagcaatggaagggctttaagtttgtcatcaagcagatcagagttcagatgccaactctgccaagttctagctttaggactttgtcagatcacttaatctctttgaatctctgtcttcccaaccctctgggaaaaagaagtgacttcgagtctatgggtcttggagggaccaccaacccaagagctagagcagaggaaggacttggatatcccagcttccagggttataggatctctccccaagcccacatatgcagacccagttacaggactagcttcagggataggagtgaaagagttgatctgattccaatcttagcctccctggggctcctgcaagcggacaccgctttccaggacaggtgcaaacagggacggtgtgaagccgaggtgaagacaatgcgatcacgcgtggcactggcatatcccacagcagatggtgtgaatgtgcgtcaccggaggcaaatgggaattgtatcgtggtgtggcttcattgctcagagaagagccgtgcaggggtacaaccatcttcttggaggtgggtctgctcctctcctgccggacaatgagctgctgttgggttttgtcctgggctggagtgtggtcctcttgatcctagaaaagaggccgctcaggatggggatgagacttcgattgctccgggaccgacgcgtctcctcacgtgatcgaggacttcaaaaacccaaagcagagaagcagaaagaggctcaacaaagactggccgacatggaaaaaatcgcattttggcgaacagagcacattcgtccaaagatacacacgcacacgggcatacacacacaaacacgcacacacacagaccgacagagagagggaaagaaacacacagagggcagagattggaacagattggagggctcagaagaacactggaaaatgtgggaaaatttggaacctcctagagacttgctgaatgactttgacaaaagtgctgatagtgtattgaacaataagttccaggccgaggtgttctcagatggagatgaggaacttcttgtgaactggaacaaagatatacatcccagggatgtttcagtgacagtagaggaagcggctcccacggtgctgagagaatcctgcaacgacagaacatttactgaagtccaggaggctgtgggcatccccatgagccaagtggaaccaccaaggtgtccagtgcatccccttgaaaccccattaactgaagctctaggagcggtggacatctccagccctaccgagatgacccccactgcgggctggggggcagatgtctggctaacaagccttgccctaattcactggtttgtcatttgtgatgcccaattacaacatctggaatgctcagatgcaatccctacgactaggcatctgcatgactgtgcatcttttgttcagcaaagaaagcctgctggagaacaatttcaaggaggtgggaaatgcataaagcctgaagggacagggttctcttaa

SEQ ID NO: 117247 - DNA, 573 bp, Homo sapiens
ggcacccccagtttttccatcctcctcgattccgtctatggggcacccgaaatcccctactccttatttcccctatcactcaggcactggcagggtccttttcccactcctgttggccgccgcggctccaaagcgagctgggcagatgtgcctgagacaggtttgaccaggcaactgagaatatatccctaagagaagacaaaacaaagatatgaaaggaacacacttccctgactgactaggaggaacagagctgcctgctgactggaaccgcttcctcccagactaaggtttcccagaggaagagagagaatttggacaaatgaatgaggaacaacgctctcctgagggttttctttaaggggcaaggatcaaagcctctagatcctttgaaagcagagttaagaggcagtgcaggaaggcacagcaggaaggttcatggttagactacagagaaggaagcagccactgctggggacctaacctgtgctggtcactgacaagctgtctcattaaaccttcccggaccctcaacccctcctagtatcttatcctcattttacagatgagaag

SEQ ID NO: 117248 - DNA, 1449 bp, Homo sapiens
atgcaaatttttgcatatcggccagtctttgttgagcctctttctgtgtctctgcctgggtcccctggccggttgtccgtcattttcacggcggttccactttgggtttgtgaagtcctcgatcatgagaggagcagacccacctccaagaagatggttgtacccctgcacggctcttctctgagcaatgaagccacaccacgatacaattctgaggaggaagccgggaatgggagacggcaacaatccctgtccctggaatgctggcctctctggacaagtcacacatttcacacccctccccttatgcccgtggcagtggcaaggtgcacccgaatcccctattccttatttcccgtatcactcaggcactggcagcgtcctttgcccactcctgttggccgcggcggctccaaagcgagtctttatggcccattggcaaaaggaagccagagctgtggctcccagggtgacgatccttcagctgcctccttggcactgtcattccctcctcccatctcccgccaagggctacagccgagaataccacagacggtttgccatggatcaagatttctctcaatagagagctcacagaaaggctgctccctaatgactgtgggctatctgaggatgtgcatctccaagcgcttttccttccatgggtgtggagtaccaggggatactgtacatctttatcccactgtgacaatgcccccacttccacctacagcttgccatcctgtgagtataactcctgtatgggtgctggacacagtgttggggaagactgtgcaacagggcacattagccaaggcagaggaggaggaggaaggtatacaatcgcagaatgaggacgcgccagcgacgctcttgcccgaggccccgctgtttggcgagcccgggagtccctccctccgcagcgtctgccttccaggcgctctcaactcactcggctttgcgggaggctcaaagcctcagggcctgcaactcaacctctggctacacattatcaacctggggagttttaaaaatccagatgcccaggccctactacaggccaaccaaattggaatctctggaggtacagctgttgggagctgcatctcctaccctcagtctccctgtctgtggttccagagggaagaagaggggaaaaaaaggatgaagagaattgtttcagtgctgggggaggagcctacaaagcactttgaaatccgaagtttgtgggaagtggctgtattgcacaaatactctgaggtgcaacattacttgactggtaatgaggcaaccatcccacctagggcagagttcaaggactgccttcaagaggggctggcctcagtttgcctgttacagaagccaagggctaacagaggctcccctctgcctcacaaagaaggagataaatgggtccactggagagcaacggtcacaatcaagtcttaa

SEQ ID NO: 117249 - DNA, 663 bp, Homo sapiens
cggacgcgtgggcccggcaagcggcgctgcggggtaggctgctttcctgaggccggactcaacgggtctcggctgagccaccgggtgagctcaccgcccagcccaaaccaggagattgcgagggagcgatgcggtgcagcgcgtgttcttggggaagatcccgactaagccattttccagtggcacctcttccatcatgagttcctgaggcagtccgatggggctactttattccagaacaatcacaatttgcttgtaaatgcatcacgaagaggcagcccagtaatgaagaaagcaagcaggagtgttggctcagtgcctaaagtgtctgcaataagtaaaacgcaaacagcagaaaaaattaaacctgaaaacagctcttcagcatctacgggaggcaaacttgtaaaacctggaacagcagcatcattgtcaaagaccaagagcagtgatgaccttttagctggaatggccggaggggtaacggtgactaatggtgttaaaggaaagaaaagcacctgcccatctgcagcaccttcagcatctgcccctgccatgaccaccgtggagaacaaatccaagattagcacaggatcttggaccctcaacatcttggctgccttagaatccctcaattcaaattttagtcctgctactcagtga

SEQ ID NO: 117250 - DNA, 556 bp, Homo sapiens
tttcgtcggcactgggggtggggagaccagcccggccgagccgagggccaccccctggtcctctgccctcgcgccccgctagggccaggtgtagatcatggggaattcatatgctgggcaactgaaatctgctcgatttgaggaagctctccacaactccatagaagcctccctcagatgtagtagtgtggtaccacggccaattttttcccagctatacctggaccctgaccagcatcctttctcatctgcagatgtcaaacccaaggtggaggatctggacaaagatttggtaaaccgctacactcaaaatggaagtctggatttttctaacaatctaacagctaatgaaatggaagatgatgaagacgatgaagaaatgtctgattcaaacagcccaccaattccctattcacaaaaacctgccccagaaggatcttgcactacagatggttttcttcctgactgttggccaagagggactccaggcccaccaccagttactggctgcgcattcacagaggcagctacacgggggctaagcagctccccatag

SEQ ID NO: 117251 - DNA, 591 bp, Homo sapiens
gcccggaattctcgggtcgacgatttcgtggctttctgtcctctgtggccccttgcctccctcctggtcgtgtgtgcccccgagatggagcgggggcctgtgacttgcacacaggcacagactgtacgagggagaacaggacaccgtcggcgttttggaccaggcgcccacggcctgcgagaggagcccgagtttgtgacggcaagagctggggagagcgtggtcctgcgatgcgacgtgatccacccagtgacgggacagcccccaccctatgtcgtagagtggttcaagttcggggtccccatccctatcttcatcaagtttggctactacccgccgcacgtggaccctgagtatgcagagcagtcctgctttcaggcaccctccttccccagcccttccccggcggaggagctccgggttgtgagtgctagacatgggctgtgccaggccctggatgcctcatggttctgcacaggggtccaacggcagccctggactcagccacccactgggtaccacctggcccagagagcaggagatttgtaccctgtgggcttcccaaaagagacctattttgaaaaagtttaa

SEQ ID NO: 117252 - DNA, 476 bp, Homo sapiens
cgagcatggtatcatcaccaactgggacgacatggagaagatctggcaccacaccttctacaatgagctccgtgtggctcccgaggagcaccccaccctgctcacagaggccccgctgaaccccaaggccaaccgggagaagatgactcagatcatgtttgagaccttcaatgtccctgccatgtacgtggccatccaggcagggctatccctgtatgcttctggccgtaccacaggcattgttctggactctggggatggtgtaactcacaatgtccccatctatgagggctacgctttgccccatgccatcatgcgtctggatctggctggtcgggacctcactgactacctcatgaagatcctcactgagcgtggctactcctttgtcaccactgctgaacgtgaaattggccgtgacattaaagagaagctgtgctatgtcgcccttggatttgagaatgagatggccacag

SEQ ID NO: 117253 - DNA, 455 bp, Homo sapiens
tttcgtcgcgtgggtagaggccttatgcgggcgttgcttatggttgtttgctagagttcggaccttgttacggcgcgaagttccctccttggggcgggggaaaggtaccgcacccgctacctagtgtgaatgaactgtggcgtgggctgctaagggcaggctgcggagtacccgggccgtggccatgaactcacccgtggaccctggcgctaggcaggcgttgaggaagaagccacccgagcggactcccgaggtgaggctggttgacctttatgtgcgtctcacagtccagtagacagcatcctcctgtctgtccgaaatccgcggcgactgccctcttgccagagtctcgcacctgctactgcgaatctgttcgcttgagtctcttccctgacccaggcccttgtcgccagcagggtgccgaccgcccttcctgcctgtgatgcggtcttaac

SEQ ID NO: 117254 - DNA, 2862 bp, Homo sapiens
atggtgcttcttaacgacactcagaagcccccggcaaggacgggtacgcgggttaagccgcatcacaggcaggaagggcggtcggcaccctgctggcgacaagggctgggtcagggaagagactcaagcgaacagattcccagtagcaggtgcgaactctggcaagagggcagtcgccgcggatttcggacagacaggaggatgtgtctactggactgtgagacgcacataaaggtcaaccagcctcacctcggagtccgctcgggtggcttcttcctcaacgcctgcctagcgccagggtcacggcaacacaaaacagacaagacagtgcccaaggtgaaaatatatgtaaattccagtgcatggatgtctggtcagggtctagaaggaaaaagacaaaaagatcagggacaaggagggactaggaaaaatattaaaggagggtcactatctgtttctggcagacatgctctgtacttaattgtcattttggtctttgtttgtaaaccgggggaaggtgcccctgtcatctttgatcccctcaagaggacagctgcggtaaagagtcaacctgagcttggaggacagataaagtttgtgatatgtcttaatgctagcagagaagtcattggagaggctgcggaatgttgtgacagagttgagatgcctgctattccagttccaagtctggtagtggaggcagaaatcctagatccacaagcccagctgcctctccatggggcagagctggggacctgcagcccgccatgcccgagcccccccccacagtgggctcccacgcggcccgagcctccccaatgggtgccaccccctgctctgcggcgcctggtcccatcgaccacccaagggctgaggagtgcaggcgcgcagcttgggactgacgagcagctctgcccgcagcctggtgctgggtccactaggcaaagccagctgggctcctgagtcgggggcttgcaggtgcctggggaacaatacagccaaaggacaccccacgtgggctgggtcaggacgggctcgacacgacgaccgtaaggactacataggacgacccagactggcaaacgctgtatcccccgtacgtaaaaagaacacacacaggaataacacccaccgaggaaaacacaccaccgtccacaaacaaccacaacaaaaaacaaccacacaaaaaaacacaacacaaacaaaaaccaaaccagcacccccacaaaccacacaaaacacaacaccaccgcaacctaacaaaaaccaacccagcgccaaaaggcaccacacgaacccccaagaaggcaagaagacaacacgcaagcacggagggagagacgcgcagccgaaaaacacgagcagaagggcagaaaggaccgcacacgcagaaaacgagcggaacgcaaaggaaagagaatcagagagaagaggcaggaagcggaggatgagaacgggaaagagaagcaggagaggaagagggaacgcacgcacgacacatgaaaagaagaaagagagacgaaaaaaaagacagggacaaaacaagccaggcaacaaaagaccagaaggaaacgaaaggcgcaaagaagaagaaagaaaaacagagagcgacagaggggacatggatgaactggaaaccatcattctcagcaaaataacacaagaacagaaaaccagcatgcatgttctcactcataagtgggagttgtacagtgaaaacacatggtccagggagggaaacatcacacaccaggacctattgggggtttgttattacccagtagtcattccggagcaggttgttcagtttctaagtagtttcaggcccctccgctgcaggtctgctggtgtttgctggtggtccactccagtccctgtttgcctgggtatcaccactggaggctgcagaacagcaaagattcctgtctgtcccttcctctggaatgcgacaccccttcgcggtctcaacacacatgggcccttctaacgccggcacacgggacgcggagaaggcacacaaggccactaacagccctgtcccggaaaaagccgggtccacaaccgagtcgaacggaagccttacggacaaaaccccgggcctttacccccaaagggcaaccgggcacgggtgaaaaatggatgggtcggaggattcaagggaccacaaggcccagacaagagaggtatcatgaccctgaagtaccccatggagcatggcatcatcccaactgggatgacatggagaagatctggcaccacaccttctacaatgactgcatgtggctcccaaggagcaccaaggaaccagggggtgtttttcaacgccatggtttaaggcccaaccgaattgcgttccttcaaattcttcccttgtaccctttggtgaaattcccgggcttgggcctacgaggcccttccccaaaagttggcaaagaaatcccggttcagcttttcgcctggcttccgccgtggggtaagggcttccgggccgccatttgctttgtcgacccttgccgtggtgggggcgacgttctgttgtccccgcatccggggagctccacacccgcggacctcctttataaaccccctttaacggtttttcttagcaacggtggcgtttccaaccccaaaagggaaaagacgaggagaggagccgaagaaacccataaaacctgttcagacaaagcaaccagagctggacccccgggagagaacaccattactgcgaagatacgagcaccaccagtaaagcgtgatacactaaaagatgcacagaaaataagcggcaaaggggacacaattaaagatatacctgtaatagttatcagtactcacagaaatgcattactatttcaagagtaa

SEQ ID NO: 117255 - DNA, 833 bp, Homo sapiens
gaattcccgggtcgacgatttcgtagcaatgtgactgaggctgcctggaggagggagagtcctaggagtggggccccatcccgtggagaggccagcctgagacttcaggcacacagccggctgcatgacgactactcccgccgcgtctccaggagcactgagcaggacagcaggcggggcggggcggtcatgcatgggaccactgcaacctgcaccgtggcccccggtttcggctcagccacctctaagggggccccacctagacgctgacactgacgtttttcctcttgaaaccaaaagttcctgggcggtggaaagcgacagttcctgcacttgcagctctttgccaagcccgattgtccaggatgtgttgagcaaagactcctgtgacccaaacgctggcagccagttgacatttgaccctgagcagcctcccacccctctaaggcccaccacacccaaaccccagagccctcagagcccccagagccccggggcaggaagtgccagctgtcacagcaaatcacagtgccctgtccgcgaattcagaggaaagtgaaggaagggcagaagagcctgctcagagagagccagggcctgtgtccttgcaggatcccctggaagccacacatggtgatgagggcagcaaggaccttctggtgaacattggtgtggcagccggcccagaagaaaaggagaaggaggagctgagagcagctgcctttggctctgctcctggcttgggccctgtggttcttggggagggacttcctctccaggatgaagtcatgggggcaggagccatggggagcctttgcggctgtgacccatga

SEQ ID NO: 117256 - DNA, 1275 bp, Homo sapiens; identical to SEQ ID NO: 116347

SEQ ID NO: 117257 - DNA, 591 bp, Homo sapiens
atggcagcatctgtatctgggggtgtcaccttgggcctgcttagagtgaatgacacatcaccgaattggagagcacagagctgcctccccactgtggcagtgatccatgagactccacccaaagaatataagcaggcagaaaaatgtgaaaagagacactggcctagtcttctggcctatatctttctcccatggtggatgctggaacatcagactccaagttcttcagttttggaacctggactggctctccttgctcctcagcctgcagacggcctgttgtgggaccttgtgatcatcttggaaggaagggaggcgatgtcttcaagtggaaaatatgagccgaactgccagaaacaaatgggctccaagctcagatcccaaactccacagctgaaaacctgtgggaccagtgtaggcacactcagtcgtgtgtcggagccagtctccccgggctgccccaaccaatctgcagcagcgcagaggatggggaaactggggtggttcccaagcaccaatgggcatctcaggcttctggaagccggcacacttgctgggcaactctgctcgctgcgggtgtgggagctgtag

SEQ ID NO: 117258 - DNA, 291 bp, Homo sapiens
atggagagctggtggggacttccctgtcttgcgttcctgtgttttctaatgcacgcccgagtacaatgttcaataaattatgtgaggtatgcaacacctcattataaagttgactgtgtgctagatgatttgtccatccgttggctgatgaaaagtgttctgagcactctgaaggcaggccgtctgcaggctgaggagcaaggagagccagtccaggttccaaaactgaagaacttggagtctgatgttccagcatccaccatgggagaaagatgtaggccagaagactag

SEQ ID NO: 117259 - DNA, 744 bp, Homo sapiens
atgcatggagatgtctcctacgacatcgataccgtcttctcagaagatattattggctatcacgggtccaagcggcatgagcagctgtcctggtacctgggtgctggcctagtggctgggcagatccagcaggagcggcagctgctcatgtatgctacccagctgccagagcggctcaaatataagcaggcagaaacatatgaaaagagagactggcctagcctcccagcctacgtctttctcccatgctcaatgcttcctgccctcgaacatcggactccaagttcttcagttttggaactcggactggctctccttgctcctcagcctgtagatggcctattgtgggactttgtgatcatcatcattggagaaaatgtcctccgctcatcatcggcccagacttcccaaccagaggcaaagttttcattagcatctgcacgcttggaagctgattctaagaaagcaaaaaagagcagggagctggagaccagtgatgtatcatctccaagcagggcaggagcaggagctcatatgattccagctgtctttcgtcaatccagtgagatgccagcagccgtggagaagggagtgatgtgtgttttccatgttccaccttctagcagtccatcgtatttgcagatcccagttttctgccattgtcggttcagaggtttaaacatcatggtattagcagtcccgcagagctttacatctattgatatttaccagttccggaattaa

SEQ ID NO: 117260 - DNA, 709 bp, Homo sapiens
tcgacgatttcgtgcccattggtgcttgggaaccaccccagtttccccatcgtctgtgctgctgcagattggttggggcagcccggggaggctggctccgacacacgactgagtgtgcctacactggtcccacaggttttcagctgtggagtttgggatctgagcttggagcccatttgtttctggcagttccgctcatattttccacttgaagacatcgcctcccttccttccaagctgggagaccagaagtcaacaacaggagggtggagaggccgggtctcacaatccgcttggctggggagtccactgaggttcttgcatcctgaagcaaaccatggagagctggtggggacttccctgtcttgcgttcctgtgttttctaatgcacgcccgaggtcaaagagactttgatttggcagatgcccttgatgaccctgaacccaccaagaagccaaactcagatatctacccaaagccaaaaccaccttacttacccacagcccgaggaatcccgacagcggtgggaaatattttacccaagggccaaaggccacgcccttcaaccccagctggggcaatttccgggcaacagtggaggttacttcaatgatgtggaccgtgatgacggacgctacccgcccaggcccaggccacgggcgcctgcaggaggtggcggcggtggctactccagttatgggaactcccg

SEQ ID NO: 117261 - DNA, 435 bp, Homo sapiens
atgcgcctgcactcctcagcccttgggtggtcgatgggactgggcgccgtggagcagggggtggcgctcgtcgaggaggctcgggcagcaaaggagcccacggagggggtgggaggctcaggcatggcggcctgcagatcccaagccctgccccgcgggaaggcagctaaggcccggcgagaaatagagcgcagcgccgctgagggagtgggctccggccttggccagcccagaaaggggctcccacagtgcagtggtggactgaagggctcctcaagtgccgccaaagtgggagcccaggcagaagaggctccgagagggagcgggggctgtgaggactgccagcacgctgtcacctctcaccaggagcctgctaaactcaaagatgatgagcataaaaacctttatgatgatctgtttccacttaatggatag

SEQ ID NO: 117262 - DNA, 477 bp, Homo sapiens
atgcgcccgcactcctcagcccttgggtggtcgatgggagtgggtgctgtggagcagggggcggctctcatcgaggagtcttgggccgcacaggagcccatggagggggtgggaggctcaggcatggcgggctgcaggtcccgagccctgccccgcgggaaggcagctaaagcccgccactttcagcacgaagaccacggcagccaagggtatgatgaccatcagagggtggaaaatgaattgacttactatgctcatgatgacagcgagaagcttcatgacaatttcaccatctttgcgaatagctcagagcttggaaaacagagtctgccccaaactctttttgtgactgttgaatctgtaaatgatgaagctccattggtaacagccaataacatccttcagggactgatcctggtgaagaaagttgcctttcccaaggccttatctgcttcctggggtgacccagagatatga

SEQ ID NO: 117263 - DNA, 2943 bp, Homo sapiens
atggtggaaggcaaggagaagcaagtcacgtcttacatggatggaagcaggcaaagagacagtgaagaagatgcaaaggcagaaacccctgataaaaccattagatctcatgaaacccactcactactgcgagaacagcatggggaaaccaccctcatgattcagtcgtctcccaccagctgtgtcatctttgaacattcaattcaccagaaaaggaaattgcagccgaaaagaaaaccaccaatggaaatccagatctaccccctcgtgattgtgatcgcaggctgtggggaaaaggtcagtgtggcagttgttttccatatgaattttggcccaagagccaaactgaagctactggaacgtcacgtgtacgggcgcaagcactgttaccggttctacaccaagctggctcaacgaaggccacccggtggtccagtgccattcaaaagatattgttaccgctccacaaacggccatgatgatgccatgcagtttaagactgtggacacatgcagctcccaaacacgagctgccttcccgtggagcaaggctcgggacctgcagcccgccatgcctgagcctcccacccactccatgggctcctgtgcggccggagcctccctgacgagcaccgccccctgctccacggcgcccagtcccatcgaccacctaagggctaaggaatgcgagcgcacggcgcaggactggcaggcagctccacctgcagccctgctcaaggtttgtaaacacaccaatcagcaccctgtgtttagctcaaggtttgtgagtgcaccaatcgacactctgtatctagctgctctggtgaggacgtggagaacctttatgtctagctcaaggattgtaaatacaccaatcggcaccctgtgtttagctcaagtgctcaaagacaaaggctataccacccttcaggatgaggccatcaagatattcaattccctgcagcaactggagtccatgtctgacccgattcccataatccagggcatcctacagacagggcatgacctgcgacctctgcgggacgagctgtactgccagcttatcaaacagaccaacaaagtgccccaccccggcagtgtgggcaacctgtacagctggcagatcctgacatgcctgagctgcaccttcctgccgagtcgagggattctcaagtatctcaagttccatctgaaaaggatacgggaacagtttccaggaagcgagatggaaaaatacgctctcttcacttacgaatctcttaagaaaaccaaatgccgagagtttgtgccttcccgagatgaaatagaagctctgatccacaggcaggaaatgacatccacggtctattgccatggcggcggctcctgcaagatcaccatcaactcccacaccaccgctggggagtttgcggtcggggtccccacccttttcgggactggcccccccgacgccagtgccctctgccactgccgactggagacggccactggcaatcattcagtctccgtcgggctccaaaaacaaggaagagttcacagtgagcagtggaccgtgctcatgcgcacccgggcatctgccttggcacagcagctggctttgcccgcaaccacgcactacgccgagcgtaaattcaacgtatgtttgcagtacgacgatcggcggttctcacacactcgatctgcgcgcacgagcttgcagtctcgaagctccatgaccgtcacggtgatgccactccaccatcggacctccgtaaagctgcctggagattatctagaggatccccctttgatttctgctgaagaaaggaaagacgagaagaagaatatcaggtcttctggtgtggtgtcgctgcgcgggtggtctttcgtggtagcactactatcgtgtccgtctgacaagggtatcttcttctgtggacaaaagagaggaatggagacgactccattgtcttgtgatgactatttattaatgtaccggattcgaaatgtcgttgttaatttagatcgcgttcccaactcaagggagagaacatcggactccaagttcttcagttttgggactcagactggctctccttgctccttagcttgcacacagcctattgtgggaccttctgatcatgaccccttctgggacattggatgtaatcgtcatgctccttctttgatagccttgacggttttgagaaatgctggaactgtggggattaaagaggctaactctgagaaagaaggtgagtggataatcagaaatgcttcatggaaagcagaggtggccactgacgcatttaacaacacagatactgtgccagagatccagcgcaaagattatatgtacttcttgccacgttgcgcctacttacgcgtatcagtcgtagttgctcgacgcttcgttcgagtgcttcgtaggaccacgaatgctgtcgacctccatagtactgtaggaagaaatggtaccgagctcttattgcaagggagacccaacccggcaattagtcgagggcccaccaaccctcagggccgtgaaggaaatgtgtgtaccccacaaagtccccctggggtcgctaactgggccggaaaaaaggccaaggcctccatccgcagaatgggaaaacccctgacagctggaccgtgccactggaaaagcccatacagtcaacgccagcccatagttaagacaaataaaactagacgattaattatatgccaaatagcagaaaaatatgtgctttcacctaagcggtaccgagctcgattttccgccggcgtcaaaaagatggagcgtcccccgctgttttcacaaaggctgtgtgaattattttttctctatggtatttacttcatcttaaccattgcagataatgtcccgaacagggaacatccaaaattcagggagtggatgctgaagtctacactcgctggtgctacctccaaacatccatga

SEQ ID NO: 117264 - DNA, 1719 bp, Homo sapiens
atggcaggctgcaggtcccgagccctgccccacggggaggcagctaaggcccggcgagaaatccagcgcagcgcagccgctggcccgggtgctaagcccctcattgcccggggccggcggggccggctggcaggccgctccgagtgcggggcccgccgagcccacgcccacccggaactccagctggcccagaagcgccccgcagccctggttcccgctcgcgcctctccctccacacctcgctgcaagctgagggagccggctccagccttggccagcccagaaaggggctcccacagtgcagcgcggtcacctttgtcccgtgtccaagtgagcgggcaggcagaggtggacgacatcctcgcggcagtccgcccgaccacacgcctcgtgaccatcatgctggccaacaatgagactggcattgtcatgcctgtccctgaaatcagtcagcgcattaaagccctgaaccaggaacgggtggcagctgggctacctcccatcctcgtgcacacggatgctgcacaggccttggggaagcagcgcgtggatgtggaggacctgggcgtggacttccttacaatcgtggggcacaaggtcccctatggagccgctccgactaacggacgcgcaggtccagcggacctgctcatcactgtccagggtggcctgcgggagactcccggggccctggctgtctgccgcggccccggcacttcccctcgagggttcgcggggaacaaggccgcgcggccccggctctcccggagtgcacggtcccgcgctcatgcggctagagggaggcacccgcaggactgcccagccgcctctgctcctcaggtccagctcgggccccgcctgctcttacgccgactaaccggccgcggcccgatggcggccctgccgcagacagcaaagcgctccgcgggaaggaggctggatgcccggcagcagtggggcggggatggaggcggccgtggcgccggggagggatgcgccggcacccgcggcgagtcagcccagcggctgcgggaaacacaactcgccggagaggaagctggtgcactggggcaggtgaaagggaatcaagggttctcccagactgctggcccagctgcaggaaacgggatggccaccgctgagaagcgcggagacccgaagcacgtggtatccctactagttaagtccgagaagagcaggaggcaggggaaagtttatatggactataatgcaacgactcccctggagccagaagttatccaggccatgaccaaggccatgtgggaagcctggggaaatcccagcagcccgtattcagcagatccttcccccatcctgggagcccaccttgtgcccgccctctctgggcgtgtggtgctgtctcagtctgaggtcagcacctctgccgctgacttggtgtacgggagcagggcgtgttcggacattgggaagctgacctctgccggcctcggaagaaaggccaaggatattataaatgcagctcgggaaagcctcgcgaagatgataggggggaaacctcaagatataatcttcacttccgggggcactgagcccagtgaaggggccaagccccatttcattacttcctcggtggaacacgactccatccggctgcccctggagcacctggtggaagaacaagtggcagaggccagctgccacaagggggttggcaagtgtggccaaactttcccttag

SEQ ID NO: 117265 - DNA, 376 bp, Homo sapiens
gctgataaccatgtcccaagcactgctctaagttcccaatgtgtccggaattggtgggttcttggtctcactgacttcaagaatgaagccacggaccctcgcgttttagactatgctaaaaacagcctcaggaccttcagcactgatcaacaatcctgggcatgggctgaccgacagttttcacccagagagtgaagatcatggaggagccattttaaattccgcccagcgcaggctcccaggaatccttatgtcaccgatctcaattcagccaatgtgacaaacacagcagtaattaagtctagagagctaaacacacctcaaaaagaattgtctcttggtatgagtggaatggaataaaatacatggaaacccg

SEQ ID NO: 117266 - DNA, 1092 bp, Homo sapiens; identical to SEQ ID NO: 114125

SEQ ID NO: 117267 - DNA, 1470 bp, Homo sapiens
atgaggcagaccatggtcccgacctgcattggctggtgctggctgcagctgctgatggaggctacaaacagtgatagaagcatgcagaagctacacagcacaggccaagcccttgggtggtcgatgggactgggcgccatcgagcagggggcggcgctcgtcggggaggcttgggccgcacaggagcccacggagggggtgggaggctcaggcatggcgggctgcaggtcccgagccctgccccgcgggaaggcagctaaggcccggcgagaaatcgagcgcagcgctggagtcttcctggctgtgcccaccaacgggcaggcagtggcggcccccgtcggtcaaagctgtgtcatcgctcagaggcttgctaagctgcaagtcatgcaggtaagaaatggaggggctcctggagtcaccttcaaggcagatgaagaggagctatggaggccctttgaagcatggcccctgggcatgggatctgaaggcgatgggccgagagctgaggaactacaactcctagagtactccgcgccgccgggacgccgcgcggctgcggggctgggcgagcgcaaagatgtccgcgcccgctgccgggaggcgagggggctcgggggacccctgcgcagcagcgagccggtgcgcgcggtcccggcccgggcgccggccgtggaccttctggaggaggcggccgacctcctggtggtgcacctggacttccgggcggcgctggagacctgcgagcgggcctggcagagtctggccaaccacgccgtggcagaggaacccgcgggcacctcattggaggtgaagtgctccctgtgtgttgtggggatccaggccctggcagaaatggatcggtggcaagaagtcctctcctgggtccttcagtattaccaggtccctgaaaagctaccccccaaagtcctggagctgtgcaaaatgcaagagcctggagctgtgctggatgtggtgggtgcctggctccaagacccagccaatcaaaaccttccagaatatggagccttggcagaatttcacgtgcagcgggtgctgctgcctctgggctgcttatcggaggctgaggagctagtggtgggctctgcagcctttggtgaggagcggcgactggatgtacttcaggccattcacacagcgaggcagcagcagaaacaggaacactcaggctctgaggaggcccagaagccaaacctggaaggctctgtctcccacaagttcctgtcactaccgatgttggttcgccagctttgggactctgcggtgagccacttcttttctctgcccttcaaaaagagtctcctggctgccttgatcctctgtctcctggtggtgagatttgatccagcttccccttcctccctgcacttcctctacaagctggcccagctcttccgctggatccggaaggctgcattttctcgcctctaccagctccgcatccgtgactga

SEQ ID NO: 117268 - DNA, 426 bp, Homo sapiens
atgaggccccggaaagccttcctgctcctgctgctcttggggctggtgcagctgctggccgtggcgggtgccgagggcccggacgaggggctcccactgtcttctggcatttgcttcctaaactacaacccagccagctccactgcttacttcttggacattgttgtccagccccttggaaaacagttggaacagccgttgggctctgagcaacaaggcccttttatttcagttagatgctgggctcgggacctgcagcccgccatgcctgagcttcccacccactccatgggctcctgtgcggcccgagcctccccgacgagcgccaccccctgctccacggcgcccagtcccatcgaccacccaagggctgaggagtgcgagcgcacggcgcgggactggcagcctgcagatggcctactgtga

SEQ ID NO: 117269 - DNA, 747 bp, Homo sapiens
atgcactcaggtagaatcaaggttttcccagtaccctttggcaggtctgacggcacaggcatcttcagctcaacttgccacatatggttgttgaactccctcatgatgactaaagaaccaaacttgcctggtttttccaggcaaggcaacattttgatgttttttaatagtgtgaacacctgggctgcaggtggagctgcctgccagtcccgtgccgtgcgcccgcactcctcagcccttgggtggtcgatgggactgggcgccgtggagcagggggcggcgctcatcggggaggctcgggacgcccaggagcccatggagggggtgggaggctcaggcatggcgggctgcaggtcccgagccctgccccgcgggaaggcagctaaggcccggccagacacagttcaagaattatctggcaacacaaacacctttaagcacaaaggtagggatgaagctgctgtgaggcacattccactccctgatgatgagagagagagggaaaatgaaaagcaagatggaggcaaaatagaaagtcagggagaaaaagaaataaagagagcttccacaaacaaatggcccactctcagccaaacagaccacataccttcagaagagagtgaccctaagaggcagcaagagctggagatgatgtctgagagccatgcacttgaaagccggcagtgtcctggccgtggctggctgagctggtgtcctcaccacagtctccctgcaacatggtcttga

SEQ ID NO: 117270 - DNA, 2234 bp, Homo sapiens
gtaattggcttccatcagtatcacggtgtcaggaaacccataaaatcgcagctaaccagtcccttactcaaaggcagatgccactcacatctctgtactgtgatgttgttattctacctgtgagtgttggcttggaaagcttgcagtcgccctattacaggacttcaccttgtgatcctgtgagtcaattctgcctaataaagatatctgcatctagcctacctgttctgtccctctggaaaaccctgaagaatgcacaaagctaccaaagggattaccggcatgacaataaggctcattattttcagaagcttgtaactatgcaggagaatttatatgtacttctgtgtgatgaagaattggatgcagtctctttggaagctgtgcaccaacaaaagatgaagaatagacaagcccactcttcatcaggttgttgtcagaaagtagctaacgcccctaggaatgaagaatcaagtggacagtttagagttattggaaacgagaagtttgaaaaaggaccctgtggagttaggcagcaaatctttgagaaggtgttgctgccaaacagaacctgtgaatttgttaccccacgtttcaataggaactttgaagatttgatcaaggatcttaaggctgcagagaccttgattgattttctagtgtacgagcccaagaaccaaagaaggcttgtcaatagattcaggctgccatgcaagctgctccacaatttgggccatccactgaagactgatgctgcccaatcacctcggaagccccctgggccatcatggatgccaagcttcggttcaaagcctccctcacatcctccccttgtatctccccaccttaacccacaagtatgggatacctctagtccctccttggcaactgaacatgcatcccttaccatctcattaaaacctaatcacccttaccctgctcaatcccaatattccatcccacagcatgctttaaaaggatcaaaacctgttatcactcgcctgttagagcatggccttttaaagcctataaactctccttacaattctcccattttacctgtccaaaaactggataagtcttacaggttagttcagcatctgtgccttatctaccaaattgttttgcctatccaccccatggtgccaaacccatatactctcttatcctcaatacccttcacaacccattattctgttctggatctcaaacatgctttctttactattcctttgtacccttcatcacagcctctcttcgctttcacttggactgaccctgacacccaccaggctcagcaaattaccttggctgtactgccgcagtgcttcatagatagcccccattacttcagtcaagcccaaatttcttcctcatctgttacctaccttggcataattctcatgaaaacacacataggactgggcgccgtggagcagggggtggtgctcgtcggggaggctcgggccgcacaggagcccatggagtgggtgggaggctcaggcatggtgggctgcaggtcccgagccctgccccgtgggaaggcagctaaggcccggcgagaaatcgagcgcagcgccgttaccattgttcctgtcctggacttcaatccggccttccacattattccggataccacacctgaccaccatgactgtatctctctgatccacttgacattcactccatttccccatatttccttctttcctgttcctcaccttgaacacacttggtttattgatggcagttccaccagacctaactgccactcaccagcaaaggcaggctatgctatagtatcttccacatctatcattgaggctactgctctgccccgctccactacctctcaacaagccaaactcattgcctatactgactctaaatgtgccttccatatcctgcaccaccatgctgttatatgggaagaaagaaatttcctcactatgcaaggggcctccatcattaatgcttttttaataaaaactcttctcaaagacattttacttccaaaagaagctggagtcattcactgcaagggccatcaaaaggcatcagatcctatcactcaggacaatgcttatgctgataaggtagctaaaaagcagctagcgttccaacttctgtccctcacggccgtttttctccttctcatccggccactctcacctacttccccactaaaacttccacttatcaatctcttcccacacaaggcaaatgattcttag

SEQ ID NO: 117271 - DNA, 3394 bp, Homo sapiens
atgagtgaactcccattcacaattgcttcaaagagaataaaatacctaggaatccaacttacaagggatgtgaaggacctcttcaaggagaactacaaaccactgctcaaggaaataaaagaggatacaaacaaatggaagaacattccatgctcatgggtaggaagaatcaatatcgtgaaaatggccatactgcccaaggtaatttacagattcaatgccatccccataaagctaccaatgactttcttcaaagaattggaaaaaactactttaaagttcatatggaaccaaaaaagagcctgcattgccaaggcaatcctaagccaaaagaacaaagctggaggcatcacactacctgacttcaaactatactacaaggctacagtaaccgaaacagcatggtactggtaccaaaacagagatatagatcaatgcaacagaacagagccctcagaaataacgccacatatctacaactatctgatctttgacaaacctgagaaaaacaagcaatggggaaaggatttcctatttaataaatggtgttgggaaaactggctagccgtatgtagaaagctgaaactggatcccttccttacaccttatacaaaaatcaattcgagatggattaaagacttaaacgttagacctaaaaccataaaaaccctagaagaaaacctaggcattaccattcaggacataggcatgggcaaggacttcatgtccaaaacaccaaaagcaatggcaacaaaagacaaaattgacaaatgggatctaattaaactaaagagcttctgcacagcaaaagaaactaccatcagagtgaacaggcaacctacaaaatgggagaaaattttcacaacctactcatctgacaaagggctaatatccagaatctacaatgaactcaaacaaatttacaagaaaaaaacaaacaaccccatcaaaaagtgggcgaaggacatgaacagacacttctcaaaagaagacatttatgcagccaaaaaacacatgaaaaaatgctcatcatcactggccatcagagaaatgcaaatcaaaaccacaatgagataccatctcacaccagttagaatggcaatcattaaaaagtcaggaaacaacagccctgtttcaagtttcggtttggatgtcacttcccccatctggctgttcctccatgatcccccacagaacccactgtatcctatccaagcaattaccactctgcaatttcaccatgaattccttcatctgcttccctcctggactatgggaccatctagttgcaggaaaacaagctcagggctcccactgattcgacattatgatgagttgtatgattatttcattatatatttcaatgtaacaataatagaaataaagtgtacgataaatgtaatgtgcttgaatcatcccaaaaccatcccccgacagccatccatggaaaaattgtcttccgtgaaaccagtccctggtgctgaaaagatcagggaccactgctgtagagctttggcaatgcttcgtgcattgggagagaaaagaaatgagcaccccaccctgagatgtgcagaaccaagatatgctctaatgagcttgcctggaaacacagctagcctagcaacaaggctcagaaccattgcattcttaaagagacatagagctttccgttttgagtgcctgttgcccttgtgttacaagcctctacaatcctgtggtctctggtcatatggaggggactctgtcttctctgcttggaaagaggacatttccatgtcattgcccaagcaccctggtctaggcgacttagatgcttctctgagagactctgcctctggctgttttgggttgttcaggaaattccagattcggcagaacaattacaacagacacagttgcaacatggcaccaagccttcctcccggatacaatgttattgatatattgtggtatagcgaaaaaaaatcatcaatgggctgctgcaatttgctaggggttcacttcaggcactattcatctggtttgctcccaagcccagagatattacttgaggaggctggagaacagcaaaggcaggtgcctgctcctttttctgggatctctgacctcgaggggcaccaacctgatgccagcaggattgttcctgtacagggtatcttacaacccctgttggagggtctcgtccagttgggtggcagagggaacaggacctgtttaacaaagtactttgactgtccctttgcggaggggggtgggctgccacgctcttccttcctctccgtggatcaggccagcctcctagtccgttgtgatgacggaacctggataccttggttagtgggaggtgtggagggagaggcccgagcaggaaccagggctgtgtgccgtgcttgcgggccagctagagttccaggtggtcgtgggcttggcgggccctgcactcagagcagccggccggccctgttggctccaggcaatgagggacttagcacccgggccaatggctgcggagagtgtactgggtcccccagcagtgccagcccaccggcactgcgctggatttctcgctgggccttagctgccttcccgtggggcagggctcgggacctgcagcccgccatgcctgagcctcccaacccctccgtgggctcctgtgcccccgagcctcctccacgagcgccaccccttgctccacggcacccagtcccatcgaccacccaagggctgaggagtgcaggcgcagggcgcgggactgccaggcagctccacctgcagcccccgtgcgagatccactgggtgaagccagctgggctcctgagtctggtggggccttggagaacctttatgtctagctcagggattgtaaatacaccaatgggcactctgtatctagctcaagcgcgaaagtcggcagcttcactcctgagccagctagaccacgaacccaccagaaggaagaaactccgaacacatccgaacatcagaaggaacaaactccagacgcgctcccttaagaactgtaacactcaccacgagggtccgcggcttcattcttgaagtcagtgagaccaagaacccaccaacgccggacacacactttttgagatgtcttggcagagtagtcttccagattctctggattcagtcctggttccaccacttgctagatctgtgtcattagaccaatcaattgacctctctgtgcctccgtttttgttccatcagagctgacacagctccagtccacgggcttctccgcggggtctaggatccacagtccctgggggctgaagacccaatggaagtaactgatggatcgcaaattggaaatcgtaacgtggccgacagacctgatcaggaaaactcgcgtccttatatgaaacagccccgaggc

SEQ ID NO: 117272 - DNA, 537 bp, Homo sapiens
atggacagacgttgggacaatttggagatctcagaagatgaaaggaagatatgggaaagtctggaacttctgagagacttgttgaacggttttgaccaaaatgctgatagtgatatggacaatgaagtccaggctgaggtcttctggaatgcagatgctaatgtgtccggaattggtgggttcttggtctcactgacttcaagaatgaagccgcggaccctcgcagctgcaggtggagttgcctgccagtcccgcgccgtgcgcccgcactcctcagcccttgggtggtcgatgggactgggcgctgtggagcagggggtggcgctcgtcgaggaggctcgggccgcacaggagcccacggagcgggtgggaggctcacgcatggcgggctgcaggtcccgagccttgccccacgggaaggcagctaaggcccggcgagaaatcgagcgcagcgccgatgaatacggcagtaatgatgacatgatcaaggaagagctgacaaccagctggaatatttgtaaaaaaaagactgcctag

SEQ ID NO: 117273 - DNA, 2496 bp, Homo sapiens; identical to SEQ ID NO: 115690

SEQ ID NO: 117274 - DNA, 309 bp, Homo sapiens
cttggaggggaagatgtgtacatagtgggcctggagggcggctgtggcctggaaggccagttcatggtatttctgcctctcattgggccccagggtgtaccaccacttgctcagcatctggctgacggtccagttatcctggttggggtgaccctggtgtgccctgccagggcctggtgccgcttgctgaagatcatgaccgccactcatgggacaccggatgtggtccttgtcccatttgttggggctgcgtccatccttctcagaagatgagccctgttccttgtgcagggcactgaggaactgggc

SEQ ID NO: 117275 - DNA, 1478 bp, Homo sapiens
atgcacaggcccgactccggcctcccaacaacgtctttggactcagctcctgcccagctcccaggggccctggtaggcccacaactttccgaagccaagctccccaggcccagctcaggcctcacggtggcctcttcaggctcagctcctaccctccaatggcatctgcaggccccaaacagcctccggttggtgggctcctctaggcccagcttgggcctcctggtagcctctgaaggcccaaatcgtcccgaagttggcctctccaggaccagctccagcctcctggctgcctctgcaggcccaagtcttcctcaagtcggcctggaagtgggcctggaagagctgcaagtcagcctccctgggcccagctccgtcctctcggtggcctctccagcctcatgtgactctcaggcagaggcagtggtggggcagccagggcagcgtcaagagtctgagccagagttgtccccactctcagtcggtcacccactccttgaacttgagatcagtgtcagtggtgctaaagccatcatcagcaatgacatcatcacaccctattcctcatggatgaccccattctgccccacagaagctgctccttggtatccgagctctggagtgtttgggctgcaactgacaggagttcagaggacaccccaggggcagtggcagtgccagtctctgacatgctccactcccacgagcctttgttacactcctgctagcccctggcttgtgggcttggcctctgagctgaacttctttcagtccttattgcaagtgggccaccttcacctggaaggccagttcatggtatttctgcctctcattgggccccagggtgtaccaccacttgctcagcatctggctgacggtccagttatcctggttggggtgaccctgctgcaggacaagttcgagcatcttaaaatgattcagcaggaggagataaggaagctcgaggaagagaaaaaacaactggaaggagaaatcatagatttttataaaatgaaagctgcctctgaagcactgcagactcagctgagcactgatacaaagaaagacaaacatcctgtgccgggggaaagctgggcagtttccctcctccgagcccctgtacataccatgaattgtgggaccttcagagcttttcacttttcggaaaatagctcctgctggggctacaagatggagtgtgaagagggccttgggccacagggaggcgcctgtggactagggggagttcatgcaccccttctttccccagaggggctggactcaggaaccagagttccaggccccaagcaggaaaggcaagaacaagaaaggacaggggagctggaccgaggctacaggagcctctgtactgggcttccactggtcaatcagggacaatctgagcatccaaagaaggctttcagcccatggggtaaaacaggaaacaacgagtctatagagatatccatcaaagttaa

SEQ ID NO: 117276 - DNA, 1657 bp, Homo sapiens
gcctgcgttcagtgaggcctcccgtggcgtcagcatgttcgtgtggaggaatgtggaaggtcactctgcggccgtgttctcctggtactccatccccttcctgacccctccctgcagccacacgaggcccagcaacctgccagtcactcagtggcctccaaccagagaaaacaacctgccaagttggcagccgttgctcatgagcgtccaccaggcccagtccctcagtgccctgcgcaaggaacaggactcatcttctgagaaggatggacgcagccccaacaaatcagacaaggaccacatccggtggcccatgagtggcgctcatgatcttcagcaggcggcaccaggccctggcggggcgcaccagggtcatcccaaccaggataaccggaccgtcagccagatgctgagcgagcggtggtacaccctggggcccaatgagatgcagaaataccacgacctggccttccaggtgaaggtggcccacttgcaacaaggaccgaaagaagtccagctcagaggccaagcccacaagccaggggctagcaggagtgtaacaagggctcgtgggagcggagaatatcagagacgggcactgccactgcccctggggtgtcctctgaactccagtcagttgcagcccaaacacttcagagctcggataccaaggagcagcctctgtggggcagaatggctgcacacagtccagggaacctggctcagcctggcccaagccttctcccacagcggggtacacagcctggacggcagggaaatagaccgtcaggcactacgggaactgacacaggtggtgtctggcactgcatcatactctggcccaaagccttctactcagcatggagctccaggccactttgcagcccctggtgagggaggtgacccgtgggcagccctgctgccgcccacgagccttcaaagcccaggagtctggtcaacgcagcagagcgggccccctacggccccaacccctggggatgggggcccagggacgccttccaaggtggcctgtttcctcccaatggatcctgccaccttctggtgcaagagacctgaaagtgtgggcgacctggagctaccaggctcctcagtcatcagggtggagaagccgaggacaggctcagggaaccggagaccgagaaggcgctgtcctcttcactgcacgtaccctggaccagtgccggccctgatcatgcagctcttccaggcccactgcttcttcctgtccactaggccacagccgccctccaggcccactatgcacacatcttcccctccaagagcttttcacttttcggaaaatagctcctgctggggctacaagatggagtgtgaagagggccttgggccacagggaggcgcctgtggactagggggagttcatgcaccccttctttccccagaggggctggactcagctagctttgactcctctgtcacttgtccgctttggcatcacctcctcatagaagacttctatgactcccgagattctcaggagcatggcaggaatcaaggttccctagagaaacggctgactccatgtatggtgcagtatattgatcctggaacatctgttttgccagaaagcaagaaagccatcaaagtccaacaggatcacgtcaaaaagacatga

SEQ ID NO: 117277 - DNA, 1197 bp, Homo sapiens
catgttcgtgtggaggaatgtggaaggtcactctgcggctgtgttcccctggtactccatccccttcctgacccctccctgcagccacacgaggcccagcaacctgccagtcactcagtggcctgcaaccagagaaaacaacctgccaagttgccagctgttgctcatgagcgtccaccaggtgggacagggagtgttgaccctgggcggccccctggagccacctgccctgaaagcccagggcccgcaaccccacacactttgggggtggtggaacctggtaaaagctcacctcccaccacggaggaggaggcctccggccccccaggagagccccggctggacagcccagtccctcagtgccctgcgcaaggaacaggactcatcttctgagaaggatggacgcagccccaacaaatgggacaaggaccacatctggtggcccatgagtggcgctcatgatcttcagcaagcggcaccaggccctggcggggcgcaccagggtcaccccaaccaggataaccggaccgtcagccagatgctgagcgagcggtggtacaccctggggcccagtgagatgcagaaataccacgacctggccttccaggtgaaggtggcccacttgcaacaaggaccgaaagaagtccagctcagaggccaagctcacaagccaggggctagcaggagtgtaacaagggctcgtgggagtggagcatatcagagacgggcactgccactgcccctggggtgtcctctgaattcctgtcagttgcagcccaaacactccagagctcggataccaaggagcagcttctgtggggcagaacggctgcacacacacatggccagtgaggacatagcgagtgatgaggcgcacacgatcatccatgaggaggagggggtgatgatgtcattgctgatgatggctttagcaccactgacaccgatctcaagttcaaggagtggcttttggcaaagtctatggtcccaccttgtcctcctcctacacatactcggatgcttcctcctcaaccttggcacccacctccttcttactgggcccaggagccttcaatgcccaggagtctggtcaacgcagcagagcgggccccctacggccccaacccctggggatgggggcccagggacgccttccaaggtggcctgtttcctcccaatggatcctgccaccttctg

SEQ ID NO: 117278 - DNA, 1479 bp, Homo sapiens
atggttgctatactaagtaatagtgcacgtggacatttcaaaattgccaaaaatgtcaggatcatttttaaccatcacacaatgataacctgcgtcaatgggcttcctgggttaaacagtccgttgaagaattggaaggtcctttcggccgtgttctcctgttactccatccctgtcctgacccttcgtgcaagcaacacgaggcccagcaacctgccagtcactcagtggcctccaaccagagaaaacaacctgccaagttggcagccgttgctcatgagcgtccaccaggcccagtccctcagtgccctgcgcaaggaacaggactcatcttctgagaaggatggacgcagccccaacaaatcagacaaggaccacatccggtggcccatgagtggcgctcatgatcttcagcaggcggcaccaggccctggcggggcgcaccagggtcatcccaaccaggataaccggaccgtcagccagatgctgagcgagcggtggtacaccctggggcccaatgagatgcagaaatacaacctggccttccagcacatggccagcgaggtcatagcgagtgacgaagagcacacggtcatccatgaggaggagggggtgatgaatgtcattgctgatgatggctttagcaccaccgacaccgatctcaagttcaaggagtgggagccttcaaagcccaggagtctggtcaacgcagcagagcgggccccctacggccccaacccctggggatgggggcccaggacgccttccaaggtggcctgtttcctcccaatggatcctgccaccttctggtgcaagagacctgaaagtgtgggcgacctggagctaccaggctcctcagtcatcagggtggagaagccgaggacaggctcagggaaccggagaccgagaaggcgctgtcctcttcactgcacgtacactggaccagtgccggccctgatcatgcagctcttccaggcccactgcttcttcctgtccactaggccacagccgccctccaggcccactatgcacacatcttcccctccaagagcttttcacttttcggaaaatagctcctgctggggctacaagatggagtgtgaagagggccttgggccacagggaggcgcctgtggactagggggagttcatgcaccccttctttccccagaggggctggactcagatcagtactgccacatggagggtccagcactggacgtgaatgagtgtgcagagaaccctggcgtctgcactaacggcgtctgtgtcaacaccgatggatccttccgctgtgagtgtccctttggctacagcctggacttcactggcatcaactgtgtggcctcaggttcttttgacgtttccctcaaagtcgtcgacctgtttcttcaggttgatggtttgctgtccgttttaatgtgcagtccctctcaagtctattacccagcagaggtagtggaagagaaaagctattag

SEQ ID NO: 117279 - DNA, 455 bp, Homo sapiens
  misc_feature (1)...(455): n = a,t,c or g
ctccgtaannnncccgcaatttccgtgtcgacgattccgtgccttgagcgaggaggagctggacaatgaagactattactcgttgctgaacgtgcgcagggaggcctcttctgaagagctgaaagctgcctaccggaggctctgtatgctctaccatccagacaagcacagagtcccagagctcaagtcacaggcggaacgactgtttaaccttgttcaccaggcttatgaaggttgtggaaaggaggagaacccctgctgaaattcgagaggagtttgagcggctgcagagagagagagaagagaggagattgcagcagcgaaccaatcccaagggaacgatcagcgttggagtagatgccaccgacctttttgatcgctatgatgaggagtatgaagatgtgtccggcagtagctttccgcagattgaaattaataaaatgcacatatcccag

SEQ ID NO: 117280 - DNA, 593 bp, Homo sapiens
ctcactctgtcatccaggctgttgtttgtaagatttctgcagcctcagagataagttgctaaaataaagaatgtttaagtcactctggagagctgagtgaaaactcatttcaaccttgggaagggccaggagggcagtgagctctccctcacccaggcctgagccatcggatggtggaactcatggtttggggtccttcctgaggaaaggctgtggccggaccccaggcagcatgcacacaccaaaatcaatggctgcagctctttgtgtacgtttcccttacctcctgggtcctcaactgtcttcccatcttgattctgtgcataggttgtggaaaggaggagaacccctgctgaaattcgagaggagtttgagcggctgcagagagagagagaagagaggagattgcagcagcgaaccaatcccaaggtaagccaggggccacgtttcatgaggacacttcatgaaaaggcctcataactagaagccaggtctgaaataatgaggtgctggtggattgttaaagtaaaaacatacaagctggtgggacaaaatttagcttatattatgtcaaagcctgatctttctggaag

SEQ ID NO: 117281 - DNA, 1098 bp, Homo sapiens
gtttggcggggtgaaaggttgcgaagatggcgacggccttgagcgaggaggagctggacaatgaagactattactcgttgctgaacgtgcgcagggaggcctcttctgaagagctgaaagctgcctaccggaggctctgtatgctctaccatccagacaagcacagagacccagagctcaagtcacaggcggaacgactgtttaaccttgttcaccaggcttatgaagtgcttagtgacccccaaaccagggccatctatgatatatatgggaagagaggactggaaatggaaggatgggaggttgtggaaaggaggagaacccctgcttgaaattcgagaggagtttgagcggctgctgagagagagagaagagaggagattgcagcagcgaaccaatcccaagggaacgatcagcgttggagtagatgccaccgacctttttgatcgctatgatgaggagtatgaagatgtgtccggcagtagctttccgcagattgaaattaataaaatgcacatatcccagtccattgaggcacccttgacagcgacagacacagccatcctctctggaagcctctcaacccagaatggaaatggaggaggttccattaactttgcgctcagacgagtaacttcggcaaagggatggggagagttggaatttggagctggagacctacaggggcctttgttcggtctcaagctgttccgtaatctcacaccaagatgctttgtgacaacaaactgtgctctgcagttttcatcccgtggaatccgacccggcctgaccactgtcctagctcggaacctagacaagaacaccgtgggctacctgcagtggcactgcagctccccgctcctgcaggtccagcgtcctcacaggaacaccagggcctgtgctccggagccttccttcagacccttcctccacgtgcccacttgggatgcagaatgcagcggagctaggaccccctccacggcctggacctcggctgcagtaaagttacgtgaggcctgtctctcggggcctggaagtggcagccatcagttgctcttgctgacccctcggagcaagcgccgcacaggtggtggctga

SEQ ID NO: 117282 - DNA, 1990 bp, Homo sapiens
tttccatcccgggattccattagaagctctgaaggtgatgtctgaacttgatatgacccagagctcaagtcacaggcggaacgactgtttaaccttgttcaccaggcttatgaaggtcagtggagggccggactttgtagaaacatcctggtaacagatattcgatttttaggaggtgcgatttgggaggtaagagaaactgtgcgtctggtgttccagaaaagtcattaaacagttacagaacatctccccaaaaccgagaggagattgcagcagcgaaccaatcccaaggtaagccaggggccacgtttcatgaggacacttcatgaaaaggcctcataactagaagccaggtctgaaaaggagaaaagggaccagagcctggttaatcaggtctgggaaagcactgtgataatgaaactgaaaccctggagaagaagagtggtcttggcaatcgggatagaaggcatagagggattcaaaggtaaaacagctgtttgtcttgaaatgagtatccgtcggagggctgttttcaccccctcatgtcagcatatcaacgagtacaaatacatcatttcctacctggtaagaagtttctcattgtgggagaaaggctgtaactcaggctcagaatttctgagtgatgtcagtgaatccggcagtagctttccgcagattgaaattaataaaatgcacatatcccagtccattgaggtaaagcacacaaccacctctccgagtacagcaagggctcgagttaatgaggcacagcacaccaagcagggttccattaactttgcgctcagacgagtaacttcggccaaagggatggggaaaggtaagaatgtctattggctgagttgtgttgtctgtgcaaagccttatttctgaacatttacactctcaacagaaattctggttccataggtctggggtgtcctctaggtaagtgattctcaaactctactgcacattggaatcattgggacacttagcactccaagcccacactgaagctcggaacctagacaagaacaccgtgggctacctgcagtggcgatggggtatccagtcagccatgaacactagcatcgtccgagacactaaaaccagccacttcactgtggccctgcaggtgagccgagcagccatcatctcctgcagacagagctctgggaggacccctcctcccaagcactcagtggtgaaaggatccctcaagtaagtcctggcctggctaaaatggaagcacactggtactgcatgcgggtcttcacagtggaaccagtttgcagctgtcagcgttggagttccacagggtgtttctctcaaagtcaagtaagttgaacttaggcctttcgggtcaaggaatgcctgtcaccttcactcaaccaggctttacccaaggttctatgccaccgtggggcctctagtggtctactttgccatgcaccgtctgatcatcaaaccatacctcagggctcagaaagagaagtgagttgacacgtcatgggcatgtcactagccagccctgtgcctcagtttcctcacccttaaaatggatgtgagtgctgccccaccgttcccaagcgagggctgtaggggacacactccacaccccacatgttggtcttgtcctctcttggtccagggtgggcgctgggggtctctaagccacacaaggaggtgccaggtgattgacgtgactgtgcccctgcagtgcctggtgaaggactcgaagctcatcctcacggaggcctccaaggtacagcagcaccagccaccacatgctatgtgctcacagatttgaacaggctgggcgcggtgactcaggcggggcgtcctgcatcaggtgatggtgctggacagtgaggccctccggataccaaagcagtgtgagtagccgtcccttcgcagtcaccagctaacgggggcggggacctcgaagcggctgctcagtgtgtcctgggagtctacaaatttggaaatg

SEQ ID NO: 117283 - DNA, 321 bp, Homo sapiens
atgatgaaggaagaaaagaagaaccatgaaaagagtaaacagccatccatcctcacagcagagtctgccagggaaggcagagagagggcgaacagggtggaggaagtcagtgttgctacccggagagagggagcggcctggatccgctcgaatcccagaaggggcccgattcccctaatccgggggcttaaccgggacgaccccttccacttgcgaggtgctggcatcaggaccgagaaaggaacggaagctctctcctattttcggggttcagaggagcttccgaccgggagttggcgaggttacttcaaattttcctaa

SEQ ID NO: 117284 - DNA, 470 bp, Homo sapiens
  misc_feature (1)...(470): n = a,t,c or g
cacaaacgagtcgcaggaggcggggaccaatgaaanccaggacgtgcgtgttctctggcacaattggaagagaaaccgtgcttccttgggtcccaaggttggcacgagcatcgacccgcagccttcctgggagtacccagaaatagtgttccccttccccggggctcgggacaggggacaggggaccccacacccgaccgggcctctagcgggggctgccctgggcccctcgacagttcaatccctccagggagcggcctggatccgctcggaatcccagaaggggcccgattcccctatccgggggcttatccgcgactgaccccttccacttgcgaggtgctgcatcaggaccgagagaggacgggagctctctcctatttcggggttcagaggagcttccgaccgcgagttggtgaggttacctcaaattctcctcacgaaaccgtttccccaccccgcaggaggcg

SEQ ID NO: 117285 - DNA, 1197 bp, Homo sapiens
ttgccaaatgattggggcttcagagcagccggcagggatttgtccactttgtcagatgaggcgccaaggtcagggttgtaagggaagtcccagtcctcaaggaaaatggcttccagttggctccgcaggccgcccttcccattttgcgtgggttcacattthattgtaacttggaagcccacccttctatcctactcctggagctgtcgtccccamagggctcagagadttagccttgctccacagcaaacagcccagaggccccacctgggcaaaagcaaacaaaacagdtwacgttcctttaccggcaggtggcagatgctctgcccaggcctgcggaagccagctccggtctgtgtgttaattccttcccaggaacttccggcccaccagctccattccagcctccactcggctcagctccgcggcttccthcgagccaggggtgggtcctgcatcgccatctgctgggccgcgcggcacggccggttttcctggagccaagaagaagtcggaggcttgcagggcttgaaggcctcttcaccgtgccctccagggagcctagctggccgaagtattcctgctggaacttctggaagtcttcctcggtgaacgacggtgccctcagccttcttcttcttggtcttggccacaggccggtcacaggccttgcggccccggttctggcgcaaaatctggcgagggtgcgggaccgagggcccatcatttcaagagcagaggaggcccgcaaaggtcacagggtggtctcgacactctcgcttccggtactcgtctgtgggtagcaggcagggagcaccatttcagattcactccccctggaaccattctcagtccctggcgcttctctccccactagggccgtagtccacgaggaccaggacggtggcgtgttctgtcaccttcgtatgtccagggccccgctccgcgcctggcacacagtaggtctagcaataccgggcgaacgcttcaagccctgcctcaagcgccacctcctccttccggggccgtttcaccggagcccctctcggcttggcctgacctggagggtcccggggggctgtaggggaagagagaggaagagacccaggtcagagggcgcgcagcgttcccatgccactggggctcgcccacgagcctcacactacttccgacctggcagtccctgtcgtctcggcg

SEQ ID NO: 117286 - DNA, 732 bp, Homo sapiens
atggcggcgcggccgcggcgaggtccctcagaggcggtaccagcgcatgcgcagcgcggagtcccggcccgggacacaagatggcggcagcggcgctggggagggcgaggcggaggcggcaaaacgggcggtcgagcagaactgcgcagttctgtggacgagcttgttggcattgactattccctcatgaaggatcctgtggcttccaccagcaacctggacatggacttccggcccctagtgtgggttgtgggggcggccatggagctgggcagctgcttcaagacctatgaggacttcaaggagtgcttcagcgcctacaaaagggagaacaggtgctccttcattctcagggactgcgtctccgtccgcttccacaacctcaaccatggcacctccatccgcgaagacatcctgtaagggcgggcggggcggggcgggccaagagggtggggaggaggctggacctccggagggctgcctggaggaggaggggtgcataggcacgcattgggctgcgtggccattcattcaacaggcactcattgagcacctgctgtgtgccttgtgaagagagctaagcctccacggccattggtttttgaccacccactccactttcactccattcacaggcttttctggaatttataactgcagtttctcccattgttttgagcagctgcagcaacccaaatacaaagtatggctttcataaacggataaaaacaa

SEQ ID NO: 117287 - DNA, 1481 bp, Homo sapiens
  misc_feature (1)...(1481): n = a,t,c or g
ccggggaggcggcggccagtccagaggccgagcagtttccggagagctcagagctggaggacgacgacgccgagggcctgtcctcccgactcagcggcaccctcagcttcaccagcgccgaggacgacgaggacgacgaggacgaggacgacgaggaggctggccctgaccagctgcccctcggggatgggacttctgtggacgagcttgttggcattgactattccctcatgaaggatcctgtggcttccaccagcaacctggacatggacttccggtgcctgatctgtggcctgacatgcagcaagtactcaataacttgtggggggctggcctgtgtttgggaccataccacgatcctggagctccccattgggcccaaggaggtactggtacttcttctgccaccggcggcacaccatggcttcaccaaccggctgctggctggtgtgcagcagagccaaaatgtgtcggcatggcaggtggtaccattgttgaaaggaacagctgcagctacagccatctttgctaacctgcgtggccgtcaggcagaagaagaatgtgcccatcgagaaggcccccttcctanaaaggaatttgccgatttcggacccaccatcaaacaggattttcgcctgttggggcaaaccagcgtggaccgcttgctgcaactctctcagggccaggcggtgaagggcaatcagctgttgcccgtctcactggttggcatgctggacaccttgcaccagagtggctctgaactagcctacaagctgtgccacaatgagtgggaggtggtacagaactccacccacctggtggacatggctggctcttcagtggacgttcagctgctagaggactctcaccaggttagcaaagatggctgtagctgcagctgttcctttcaacaatggtaccacctgccatgccgacacattttggctctgctgcacaccagccagcagccggttggtgaagccatggtgtgccgccggtggcagaagaagtaccagtacctccttgggcccaatggggagctccaggatcgtggtatggtcccaaacacaggccagcctgagaagcaaggacggaacgacatgattcaggacctaagcagggagttagcaaacctgctcatgcagaccgaggggccagagctggaggaacgctactccaccctgcgcaagattgtggatatctgggctggcccctcccagccatctgagctctttcagcagccaggagactttaaggacgtgggccgcctccctttcctctggggaaagcaagaagaaggggagggattccctcctgctacagctgtgatgcattattgaagcactttagctgaagcattggaccacaaacacttctccttggaagtgtgagagtttaaagtgggcaggacatactagggtttagcattttagccaatgtcttcctaggtggggctaggaatattgttacagtagagaggg

SEQ ID NO: 117288 - DNA, 2104 bp, Homo sapiens
gacccctggtgtgatcttgggcccgggctgggaccagcccctagtgtgggttgtgggggcggccatggagctgggcagctgcttcaagacctatgaggacttcaaggagtgcttcagcgcctacaaaagggagaacaggtgctccttcattctcacttatctttataaggggtggggggtggtcagcacctttctcattgttacctctaccttccctaggtatgtgcaggtgaaatttgtctgcattcggacccaatcaaacaggaagagaacgcgggaggcagacatgtgcccagcgtacttgctcctaaggtacaacgagagactagatagactatttatcagtgaactaaacacacagcacatacatggtgactctaaagtggctagtcctggaggagacaccactggcaaatctcaaaagacaatgtgcctgcagagactccagcctgtgcagcccacaaccaaaaaagaccttgacactgccgagaagtccctggttgagccatcgttttgcctagataaggtacaagtgtcctcaaagccagagcaggaaggcatcactccttctgacctggccaagatagcaaaagtgatgaagaactttcttaaggtagatgagggttccatggcttccttcagtgtgggtgacagccagcacctggaccggctcagcttccagagcagtaagatgaccgacctgttcatccgcttcccagagaatctcttgctacaccgggtggagaacacccagggccacatcctctatgctttcttggtggagaacaaggaacgagaaagtcgagtggtgcactttgctgtgctcaaggcggagacagtcacctctgtggccaagatgctgagcatcttcacagagttcaactccgattggcccaaggtcaaggtggtctttgtggacccttcattccattaccgggctatcctgcaggagatctttcctgctgcccgcatcctcctttccatctaccacacaacccgactcttggagaagaagttgcatcgtagttcagcaaatccatcctttaaaaggctcatgaaggaagccctgcgggaggccgtgtttgtcacttctgaagccagcctgaaaaatctctgccagatgtcccaggccgtactggatgaggatctcttcaacttcctgcagggcccactggttcacctgtgaactgctgtggtacatgcatgttaggaagggcctgcttgcgtgtaacacctacatggacagcctagacattgtcaccagcaaggtgtcaagcctctttcgggaacagcagtcgctgctggactgcatcctctgctttgtggattacatagacttctttaataccaaaggcttgaagaacttgcccacacctcctcccaaattaaagagagctcggccggcaagcattgccactgaagtccaagaagggttttgggaatctgtggagagagccttaccagcctccctgcagaagagacccaagccagacgcacagcaggtacaggtacagcagcagttcacaagtgccgccctcgcaggttggcatgctggacaccttgcaccagagtggctctgaactaggcctacaagctgtgccacaatgagtgggaggtggtacagaacttccacccacctggtggacatggctggctctttcagtggacgtttcagctgctagaggactctcaccaggttagcaaagatgggctgtaagctgcaagctggttcctttcaacaatggtaccacctgccatgccgacacattttggctctgctgcacaccagccagcagccggttggtgaagccatggtgtgccgccggtggcagaagaagtaccagtacctccttgggcccaatggggagctccaggatcgtggtatggtcccaaacacaggccagcctgagaagcaaggacggaacgacatgattcaggacctaagcagggagttagcaaacctgctcatgcagaccgaggggccagagctggaggaacgctactccaccctgcgcaagattgtggatatctgggctggcccctcccagccatctgagctctttcagcagccaggagactttaaggacgtgggccgcctcccttt

SEQ ID NO: 117289 - DNA, 1149 bp, Homo sapiens
atgcggtgcttctcccacggcttagctgctgtgtgccttgccaccttcctgtggacccgggcactcctgcagccctggtcggagatcggcacgccagtcagcatgaggacagtcagcgaaccgatatatgggtggacgtcctctgaggttgtagaggtctatagcggcccacgagtcagcgcgcccgtggtcgtatctgtcgtcactgctagtcgtgctggtgcttcctcgcgctacagacacatccgacgcgtacgagtgcgctgcggcccggcagctctgctcaccatcctccatcctgtcacattagactgtgccagcatcagtagcatcgtctgtcttattgaattctggcagcgatggtctaggggtgcttgtgtgccccacggtgcagatgagaagtctgatcctgggggtgctggcaagtggaagtgccggccccgtctcctgctgcctgctcatggggccctcgaagcagatgtgggtttgctgagtgaggagaggaggagtgtctcaggatctggcctgcacggtctccttgccccctgccaggcccgcgtgtctctctctgatgacagctcggagggcttccctcgggccgacaccttcctggagaccctggatgtatccggcaatcgtggcaataattcctccctatactaccccatcccagaagcccaagtacccagagttctcaatgttttaagggaagaggcaggtccactctccacctgtgactgcctgaactggagcataatgctggcattgattgagcaacagtcctgttccaagcaccatggcagggcaggatccacgggccgctactttcatctgggcatgtcccagcagcacaggaaactgatatccagggctgcacaggtggcgcagaaatgcgagatccgaggggagagatccctgggcttcagctgcctgggagtccttctggaagaacttgattctgagctgggcctgcagcaccctcatggctgtgaagtggcacctcatggtggtttcgatgtttggatcctgacggcggatgaccttgagcgtttttccccgggcttgttggccatctgcaaatcttctgccctggatgtgtgccaccgtgtgttcctcaaagcaggcctgtgcttcctgtgtggaatttga

SEQ ID NO: 117290 - DNA, 108 bp, Homo sapiens
atgggatgcacctttcctgttcccaagaaaggaaaagaagaggcactcagcttcagccagctgattcaactccgcgttcagggccgagtgtggactggagctctgtga

SEQ ID NO: 117291 - DNA, 450 bp, Homo sapiens
atgggcgatgtcagcctcagtgtgtttgctcagctgctgggctctcttgggaccatagaggactgcagcaccaatggtggaactccaggcgtggtgacaggatgtgaccaggttcccccacccaggtctgtggtcagcctggctgtgctgaatggtggaagcagggagaaagatgaaggtagaaacgcttacacactgaagatgctgctggaacaccgcagggactgggcggacggggacagcgttaacaagggcggctgctgcagtgtgggtgaagggccagaccttgtgtcaggtgcccctgcagatataattcctcgagtccacaaaacaatgcaaccaggtggatctgaacatccccacttcacagatgaggaactcgaggtcagggctgtcagtcttggctacctgcatggccttggggccctgcatggtctcacccctgcctaa

SEQ ID NO: 117292 - DNA, 419 bp, Homo sapiens
tttcgtggctggggtaggggctcattgggagcccacggagcgcggcggcggctcgggggccgagttccctacaacaaggatggcggcgacgggcgcagggagcggggcccggctctccttgcctcgaggctcctctgattccactcgcgtggctgcgcggccctggcagcggccttcgtcccggggctacagctcatcttccacggaccctttcatttcctcctttggaaattaaagacagcacatgctcatttatctcacactcttttatgaaggaacagaatgaaagtcccacagttgagagccaagaacaggacctggggggtacactgattcctagtacacagttgactacagaacaacaacaacaacaacaaaataaaccaagtacaatgggaaaaactgaagaaaatagttaa

SEQ ID NO: 117293 - DNA, 471 bp, Homo sapiens
atggtccacaagtggcccatctggaagacttcatatacgaaagatgctgtggctcttccatatcctctttctcccaaccaatatccgctccttgatgccgcttcaccacgattcaatggggcgccctattcctctccgtgcccccccgattttaacattatggcagggaggcatcagaatcgtagttttcctcttccaggagttcagtcaagtggtcaagtacatgcatttggaaattgttcagacagtgatattttggaggaggatgctgaagtgtatgagcttcgatccagaggaaaagagaaagtccgaagaagtacatcaagagatagacttgacgacattatagtattaacaaaagatatacaagaaggagatacattaaatgcaatagcccttcagtactgttgtacgtgtatcatggacaccctcatgaccatccctcaaagccttattaactcattattttaa

SEQ ID NO: 117294 - DNA, 436 bp, Homo sapiens
gggtgcccagaggatgcgacatcctcatcgtctacagcccggatgccgaggaatggtgccagtacctgcagaccctgttcctgtccagtcggcaggtccgcagccagaagatactgactcacaggctgggccccgaggcctccttctcggcagaggacctaagccttttcctcagcacccgctgtgtcgtggtgctgctgtccgcggagctggtgcagcacttccacaagcccgccttgctgcccctgctgcagagagctttccatcctccgcaccgcgtggtcaggctgctctgcggcgtgcgggacagcgaggagttcctagacttctttccagattgggcccattggcaggagctcacctgtgacgatgtatgccttagacctacgtggcagctgtgaaaaaagccatttccgaaggtaaggatttcttctaa

SEQ ID NO: 117295 - DNA, 888 bp, Homo sapiens
atgaggattcggcgatggagccttatgtttgacagtgtttggcccatgtgtgccttctacagctgggctaaagcttctagaacattcctgaaagcagatgggctccctagaaggaagcagtgggttcttgtagaggccttggcaggtggaggagttcttggggtcaaacaaattacaattcaggttctgtttgaggtgctcctgagaagaggaaaagagtcagaaacctacacaaagatgtatagaagattaggtcctgagagatgccggagatcaaagtatgctggggttgaaaggattgtagacaagaggaagaacaagaaaggaaaatgggagtatcttatccgatggaaaggctacgggagcaccgaggacacgtgggagccggagcaccacctcttgcactgtgaggagtttattgatgaattcaatgggttgcacatgtccaaggacaagaggatcaagtcagggaagcagtccagtacctccaagctgctgcgtgacagtcgaggcccgtcggttgagaaactgtcccacagaccttcagatcctggaaagagcaaggggacctcccataaacggaagcgaattaaccctcccctggccaagccaaaaaaagggtattcaggcaagccctcttcaggaggtgacagggccaccaagacggtgtcttacaggactacccccagtggtttgcaaataatgcccctgaaaaagtctcagaacgggatggaaaatggggacgccggctctgagaaggatgagaggcactttggaaatgggtcccatcagcctggcttggatttgaatgatcatgttggagagcaagatatgggtgaatgtgacgtgaatcacgctacactggcggagaacgggctcggtttgtag

SEQ ID NO: 117296 - DNA, 435 bp, Homo sapiens
tttcgtgcgaaaagcggggagcggaggggggccgctggagccgagtagcgtacagagcggcgtgtgacgcggggacgccgcgtgctcccaacgtcgccccggtttgacgcacacggcaccaaactgtttgatttaattttggatgagatcgttcttgcagcaagatgttaataagacaaaatctagctatagagaagtctgaaaccacttctgaacacacttgtcagctctgtggtggttggtttgatactaaaattggattatcaaatcatgttagaggccacttgaaaagacttggaaagacgaaatgggatgctcacaaatctccaatctgcgttctgaatgagatgatgcaaaatgaagaaaaatatgaaaaaatcttaaaggcattgaacagtcgtcgtattattcccagaccatttgtagctcaaaaac

SEQ ID NO: 117297 - DNA, 606 bp, Homo sapiens
agaccatcattcgcccccaattatgtttatcccctcgttgagtttgatgatcacacaaaatctgaagtctaaatataaacgtttttatattcaaagtcaatattcaagaaaacttttccactaatgttgctaaaccatagatggatcccaacaagagttgtctgtagaagtctcgtaacaagtaacctttagctccaccacctaagtttccaatcactgagaagagtctgggacaactcatcttcaggttcacgggagaagtggagcacacctgctttcctctggcagagtaacttcccagggacacaaaggccagagaatcagacagtttggtgccgtgtgcgtcaaaccggggcgacgttgggagcacgcggcgtccccgcgtcacacgccgctctgtacgctactcggctccagcggcccccctccgctccccgcttttcgcctccagccccggttcccacggcgcaggcgcgctgctttcccgcctctgccgggctgcgggccgcgggggtggccagcgaggagctcccgggaagcttcgcgctggtggagcgtctgggccaattagacaaacgagggcagcggaaacagtgcaccactgtt

SEQ ID NO: 117298 - DNA, 5664 bp, Homo sapiens
  misc_feature (1)...(5664): n = a,t,c or g
gagcggaggggggccgctggagccgagtagcgtacagagcggcgtgtgacgcggggacgccgcgtgctcccaacgtcgccccggtttgacgcacacggcaccaaactgtttgatttaattttggatgagatcgttcttgcagcaagatgttaataagacaaaatctagactaaatgtgttaaatgggcttgccaacaatatggatgatttgaagataaacaccgatattactggtgctaaagaagaactcctagatgacaacaattttatctcagacaaagaggagcggagttcataagcccaanaggattgtcaaacatcatttccagaaaaataatacggttgactctgccttgaagaactgtcaaaggacaaatctgaaaacgccttaagtggaggccagtctagtcgtatttatacatagctcggtgctcctactgtttcgtagtgaaaactttatcttgcctaaaggagctgctgttaatggaccagtttcacactcctccttaactaagacttccaatatgaataaaggcagtgtttcattaaccactggacagcctgtggatcagccaacaacagaatcttgttcaactttgaaggtagcagctgatctttcagctgtctacaccacaggaaggcaagtcaaccaccaaggttttatttttggttatcagatgtagcacatgcttaagaatcccacccattccaataaaaaactacctacctctgcttcagttggttgtgacattcagaattcagtagggagtaatataaagtcagatggcactttaataaatcaagtagaggtgggtgaggatggtgaagattttattggtgaaagatgattgtggtcaatacagtaacgggaatttcctcaggtacagatggatttaggtcagaaaatgattacaacctggattccccaaaaagagttcattcaatttcttatgactaatgaggaaacagtagataaagctccacctcattctaaaataggtctagaaaaaaaaagaaagcgaaaaatggatgtaagcaagataactcgttataccgaggattgctttagtgattctaattgtgtacccaataaatcaaaaatgcaagaagtagactttctagaacaaaatgaagagctacaagcagtagactcacagaaatatgcattatcaaaagtgaagcctgaatcaactgatgaagactttagaatctgtggatgccttccaacatctaatttataacccagatgagtgtggagaagagagttcacctgttcatactagcacttttctttcaaataccttaaaaaagaaatgtgaagagagtgattctgagtcacctgctactttcagtaccgaagagccatcattccacccctgtacaaagtgccatgtgaattttagggagaagaagcacctccacaggcatatgatgtatcatttagatgggaatagtcactttcgccatcttaatgtcccaaggcccatatgcttgtagagaatgtggacggacatttcgagatcgcaattcacttctaaaacatatgattattcaccaggagagaagacagaagttgatggaggaaattcgtgaattgaaagaacttcaggatgaaggaagaagtgcacgattacagtgtcctcagtgtgtgtttggtaccaattgccctaaaacatttgtgcaacatgctaaaacccatgaaaaagataaaaggtactactgctgtgaagagtgtaacttcatggcagtgacagaaaatgaattggaatgccatcgaggcattgcacatggggcagtggtaaaatgccctatggtcacttctgatattgcccagagaaaaacacaaaaaaagactttcatgaaagactctgtagtaggatcatccaaaaaatcagctacctacatatgtaagatgtgtccttttactacttcagccaaaagtgttttaaaaaagcacacggagtacttgcattcatcatcatgtgttgattcatttggtagtcctcttggacttgataaaagaaaaaatgacatccttgaagaacctgtagatagtgatagcactaaaacattaactaaacaacagtcaaccacatttccaaagaactctgctttaaaacaagatgtgaagcgaacatttggatcaacctcacaatcaagtagtttttcaaaaattcataagcggccacacagaatacagaaagctcggaaaagcattgcccaatcaggtgtaaacatgtgcaatcaaaacagctctcctcataagaatgttacaattaaaagcagcgttgaccaaaaacctaagtatttccatcaagcagcaaaagaaaagtctaatgccaaggcaaatagccactatttgtatagacacaaatatgaaaactataggatgatcaaaaaatcaggtgaatcatatcctgtgcatttcaaaaaagaagaagctagttcattaaattctttacacctgttttcatcatcaagtaattctcacaacaattttatttcagaccctcataagcctgacgccaaaaggcctgaaagcttcaaagatcacagacgtgtagctgtaaagagagtaattaaggaatctaagaaggaaagttctgttggaggggaagacttggatagctatccagattttttgcataaaatgactgttgtcgttttgcaaaaacttaattctgctgaaaagaaagatagttatgaaacagaagatgaaagttcctgggataatgttgagttaggagactacactacacaggccatagaagatgaaaacctatagtgatattaatccagagcatgtaaatttattccctttatttaagagcaaagtggaaggtcaggagcctggagaaaatgctactcttagttatgaccaaaacgatggcttttattttgaatactatgaagatactggaagtaacaactttttgcatgagatgcatgatcctcagcatttagaaactgcagatgcgtcattgtcaaagcatagttctgtttttcattggactgatttgtctcttgagaagaaatcgtgtccttactgcccagcaacatttgaaacaggtgttgggttatcaaatcatgtcagggggcatcttcacagagcaggattaagctatgaagcccgtcatgttgtatcaccagaacaaatagccacaagtgacaaaatgcagcatttcaaaagaactggcacaggaacacctgttaaacgagttagaaaagctatagagaagtctgaaaccacttctgaacacacttgtcagctctgtggtggttggtttgatactaaaattggattatcaaatcatgttagaggccacttgaaaagacttggaaagacgaaatgggatgctcacaaatctccaatctgtgttctgaatgagatgatgcaaaatgaagaaaaatatgaaaaaatcttaaaggcattgaacagtcgtcgtattattcccagaccatttgtagctcaaaaacttgcatcaagtgatgactttatatctcaaaatgttatacctcttgaagcataccgtaatggcctaaagactgaagctctgtcagtgtctgcatcagaagaagaagggctgaatttcttaaatgaatatgatgaaacaaaaccagaactgcccagtgggaaaaagaatcagtctcttacactcatagaacttcttaaaaataaaaggatgggagaagaaaggaattctgctatttctcctcaaaagatccataatcagacagcaagaaagagattcgttcagaaatgcgttcttccattaaatgaggatagtccgttgatgtatcagccacaaaaaatggacttgactatgcactcagccttagattgtaagcaaaagaaatcaaggtcaagatctggaagcaagaagaaaatgctaacattacctcatggtgctgacgaggtttacattctccgatgcaggttttgtggcctagtctttcgaggacccttgtctgttcaggaagactggattaagcacttacaacgacatattgtaaacgctaatcttccacggactggagctggcatggtggaagtcacgtcactacttaaaaagacctgccctccattatttgttttcttcattttctctacttaatggccgaagcagctttcataggaaccaggaaaccttttacatagccaggttgaattggatgtaaatttgaaattctttttttttaagccacattaaattatctgtttataaatactaaagcaggaaaatggggggaaagtgaattacagcgacatcagagcaaattgaatacttaaaacagtaaggagtctatatattttatatagggtgggaagatgtgtttttaaggtttatgaagttttgttggttaactgggttcactcagtaaaagagcagtacatgtaagcagccattaataaactgttgcacatggatacttatagacagacttattggacaattatgttttttgcagtgttaccagaatcaaggctcttgttaattcccacaagaacttgcatagaaaaataagatattatattttgtttgtatgtatttagtgttttgtataataccaagaaccgctgactaaatttactcaaattagggcattaaatatcatgtacttcatagtttgagactgttcactcaaataggggcagagtactattctatctaggatgtgtaaggtgtttttttttkaaaatcacatgggaacggttttttttatactaaaaagtgggaggggagatttgtttaaacaagtatttctaaaaggaaatatgtacatagttctggggaaattatttgtgggtaaggggaatattcctttactccagttgcatttctcagacaataaagtggtgcatccatgctacctcctactttgtccaacaaaggtgctatttaccctttacatttttgtatcataatagattttaaaaatctaatggttccttaattggcaagaccattcttttgttaacaggtttgtttctttttaatgttttaccctaaaatttgacatgcttacaggacaggtttgcctcttactttatttaacattgtagaaatgtaattaataaacaatgctcactacacagtttagaatagacgttctcatttatattatcttccaaatttgatcagttagcaaaacttaatacaccaattaaaatatttctacatatgagaatgtttacaatttaaattttagaacttgttttggatgtgattatatgtccgaaaaattgtggaaccctatgctcatgctaagaaccgacataacagaattactgaaataaatgtgctgtgaggaatggaaaatatggtgcaggtgtcttggtcatgataaattgtgattctttttaaaaattttttccaaaaacaattaggtattttaatctgaaatcagattcctttacaaacaacaagtttttgtatgcaagcaccattttatttcatgtagtatggctaatactatagttgaaccaaggatatgcattgattctttgcttcgtatgtaaataaagttaaaaacagttaaaataaggagtattttggtagagtatatacatacctcactgccagtgaaattgctttcctacggtatatctccttaccagaaaaatctctaaataaaaaaaggtttaaaaaaaaaaaaaaaaaa

SEQ ID NO: 117299 - DNA, 551 bp, Homo sapiens
ggtcgacgatttcgtgccaaggggaagctgcggtgtgtggagggagtggcaggcttgtgcatggttttgggggccaccccactggagctctctgcctgttaggcaggtcccccagtgatacaggaccccagggcacccaatgctgccctgcaagtagacaccaccaggctgcggccctgggagtggccacagaccaaggatggtcaggtcagactggccttgtttgataggcaagacaaccctgcagagttcaggtccaacagttcccctagggctaaagtctcttatgggagcaagtcaagcctagagggatggccctcactggccatgctctgctgcggactctcccgcaccaaaccttctgggctccacatcagctggtgtgctgcccctaccacttctctaagcagctctccctgccaactgaagtgtccgtggtggttgaggggtctcctcctgctgggattccagagacccttcgggagagtggattgccccttgccagttcaactcacccattgccccccagagtcactgggggctatgaatga

SEQ ID NO: 117300 - DNA, 505 bp, Homo sapiens
ttacattttcctcctcaaagctttattattattatttttcttctcaaaacactgttttgctttgggggagcgcgggtccttggccacatcttgagtcttgagatatgtcttcagcatctcctgctcctccttgggaaacgctccacccgccagtgggcctgcgccctcctctcctttttctgggttcgggtccacctcgtttcccccaccctctccagggctgactgcaaatcggagggcgactgcagaggcggaattctgggcagagcgggggtctccccagcgggccacgtcccaccagcaggtggcggtcgatctgcaaggcctgcaaggtgcccggacagaaacttgagcacatattggtgccgctgtccgagaagagctcagacgagtctccccgagcccagctatctgcatccgcgaaaaagcggggagagaagggcacgggctctccgctggagcgactctgtgattcagacaccgcaagctgctttcggaagggctt

SEQ ID NO: 117301 - DNA, 306 bp, Homo sapiens
atgagggctgccgtgaaggagcacccgagcacatgtgaggcgtacacgtgtgtccgagacagcccaccacgaagggtgatggggtcagaaaccacttcggtgctcaacaccgggaagaggcccccgtggcacacaggaccctacaccagctgtcatgaggcacagaggggtgagcaaggaaacagaagtcctacagttattccaaatctcacgtggtcaagtgagcaggagggctctgaaaagtcgaaagcaacaacgtacaagagaacactgacaccaggagaccagccacaaacgcaaacgtag

SEQ ID NO: 117302 - DNA, 684 bp, Homo sapiens
atggctaccgccttgtgctgccgcccggaaccgctgggcgcgggtgaaaggtcactcagagcggcgcccggcgcgaccattcgctgcggcgcatcccggcagccaccgcggcgacttggcggcgggtgccatgcgtctggagcttcacattctctgccccccacccaccgcgccggcgctcccttgtcacgcctcgggaagcgcgcacctgccaagcagaatccaatctcagatgtcactgatgaagttgttgcagagaaatatgataacagctgtctagacctatcagttattgaattgagatgtcctgtagcctttgatacacactccttcaccttgctcaccctccacttgtccgcatacctcattcttcctggatgtgggacaaaaactcaggacccgctaaatggcggagctgaaagggctgtaacacaaacagggctgaaacacaccccttgtttgccccatggagggcaacgagagggaaagagaggaaagagaaggagagaagagctgtggcccttcaaggagcccagacctaggagctccctgagccagggctatggctcactctttggggctctgcagtccctggcgtctccaagcttccaggcaccaccacattccctggtgccaccaatggaagctgcttgcagtatgcctggtccagcagcagccttgtag

SEQ ID NO: 117303 - DNA, 973 bp, Homo sapiens
atgactactagagtgagaacttgggttcttggcaccatcactgatgcggctctgtggctcttcccatacgataggaatgaagacacacacgagcatggaaacatccatggtagttctacagaagtgatgaagtccacaaatgcatctgtgctaggtgctggggatagaattgtgagtaaagctaaacagtccctgcctcgtggatgtttacatgctattggaagagacagacaggaaacaattgtggctcctcagcactaccctgcaaccagccatacccagggacacacaggagggaagggagttaactggctccatccagctaagcctcccagtagcattggatgcaggaaaaaatacattgacggtgaaaaacaagccgaaccagttgtagttttagatcctgtttctacacatgaaccccaaaccaaagaccaggttgctgaaaaagatccaactcaacacaaggaggatgaaggcgaaattcaaccagaaaacaaagaagacagcattgaaaacgtgagagagacagacagctccaactgctgatccataavccagaagcctgacatgtttggaagtccttttcaatgaagcacatgattagtgttgttatattggcaagggctgtaaacattctgctctggtcactgtattcagaatacaggttcttttctggtgtcacttttgtaagtagcaactattaaacataagtaagctgtttagcaaaacacacattcctagtaggttttggttttttgatctttataaaggtggaggtttttttcccagttactgtatttaagtatggacttcttttaggaaggttacaaaaaaattcagatgttgatacctttttaggaaatgtgcataccactcatcaaatggaatgctgaaagtttgaggtgcttgtatataatcggataaacaaaactgatcaacccaatgtgattttaaaagcccccaaagaagc

SEQ ID NO: 117304 - DNA, 2605 bp, Homo sapiens
gtcgaccctttccacccctggaagatggaaataaacctgcgtgtgggtggagtgttaggacaaaaaaaaaaaaaaaaaagtctagagccaccgtccagggagcaggtagctgctgggctccggggacactttgcgttcgggctgggagcgtgctttccacgacggtgacacgcttccctggattggcagccagactgccttccgggtcactgccatggaggagccgcagtcagatcctagcgtcgagccccctctgagtcaggaaacattttcagacctatggaaactacttcctgaaaacaacgttctgtcccccttgccgtcccaagcaatggatgatttgatgctgtccccggacgatattgaacaatggttcactgaagacccaggtccagatgaagctcccagaatgccagaggctgctccccccgtggcccctgcaccagcagctcctacaccggcggcccctgcaccagccccctcctggcccctgtcatcttctgtcccttcccagaaaacctaccagggcagctacggtttccgtctgggcttcttgcattctgggacagccaagtctgtgacttgcacgtactcccctgccctcaacaagatgttttgccaactggccaagacctgccctgtgcagctgtgggttgattccacacccccgcccggcacccgcgtccgcgccatggccatctacaagcagtcacagcacatgacggaggttgtgaggcgctgcccccaccatgagcgctgctcagatagcgatggtctggcccctcctcagtcatcttatccgagtggaacggaaatttgcgctgtggagtatttggatgacagtaaacacttttcgacttattgtggtggtgccctatgagccgcctgaggttggctctgactgtaccaccatccactacaactacatgtgtaacagttcctgcttgggcggcatgaaccggaggcccatcctcaccatcatcacactggaagactccagtggtaatctactggtgacggaacagctttgaggtgcgtgtttgtgcctgtcctgggagagaccggcgcacagaggaagagaatctccgcaagaaaggggagcctcaccacgagctgcccccagggagcactaagcgagcactgcccaacaacaccagctcctctccccagccaaagaagaaaccactggatggagaatatttcacccttcagatccgtgggcgtgagcgcattcgagatgttccgcgagctgaatgagcgccttgtaactcaaggatgcccaggctggggaaggagccaggggggagcagggctcactccagccacctgaagtccaaaaagggtcagtctacctcccgccataaaaacctcatcgttcaagacagaagggcctgactcagactgacattctccacttcttgttccccactgacagcctcccacccccatctttccctcccctgccattttgggttttgggtctttgaacccttgcttgcaataggtgtgcgtcagaagcacccaggacttccatttgctttgtcccggggctccactgaacaagttggcctgcactggtgttttgttgtggggaggaggatggggagtaggacataccagcttagattttaaggtttttactgtgagggatgtttgggagatgtaagaaatgttcttgcagttaagggttagtttacaatcagccacattctaggtaggtaggggcccacttcaccgtactaaccagggaagctgtccctcactgttgaattttctctaacttcaaggcccatatctgtgaaatgctggcatttgcacctacctcacagagtgcattgtgagggttaatgaaataatgtacatctggccttgaaaccaccttttattacatggggtctagaacttgacccccttgagggtgcttgttccctctccctctccctgttggctggtgggttggtagtttctacagttgggcagctggttaggtagagggagttgtcaagtctctgctggcccagccaaaccctgtctgacaacctcttggtgaaccttagatcctaaaaggaaatgtcaccccatcccacaccctggaggatttcatctcttgtatatgatgatctggatccaccaagacttgttttatgctcagggtccaatttcttttttcttttttttttttttttttctttttctttgagactgggtctcgctttgttgccccaggctggagtggagtggcgtgatcttggcttactgcagcctttgcctccccggctcgagcagtcctgcctcagcctccggagtagctgggaccacaggttcatgccaccatggccagccaacttttgcatgttttgtagagatggggtctcacagtgttgcccaggctggtctcaaactcctgggctcaggcgatccacctgtctcagcctcccagagtgctgggattacaattgtgagccaccacgtggagctggaagggtcaacatcttttacattctgcaagcacatctgcattttcaccccacccttcccctccttctccctttttatatcccatttttatatcgatctcttattttacaataaaactttgctgcca

SEQ ID NO: 117305 - DNA, 445 bp, Homo sapiens
ctcacttggaactgagatccttgaatcatagaggcttggggagcaggaagaagacgagaaattgaaggtgatttgacttatgatcctcagtgcacaacacttttccaagaagagcaacctttctctctcccacacacagtggtggtctcccgtattgcgacttgcagacaggcagggagggagctgccggggcggggagcggggggggaatgcgtccggtccatttttggctggaggtgcgcttcctgctacccccacgttcccgggcggtgacaatgcagcaaaatccgagggctcaaacaatgtggcccctccatccccggctccagggcattctgattgctctgccgctttgacgtcccggccacttggctgatattcagagccatgatgcgcggtgtctctgtcttgcacacaggggcacgaaatcgtcgacccgggaatt

SEQ ID NO: 117306 - DNA, 646 bp, Homo sapiens
atgctctctggtgtcagcccaatgcagactgaggcgcgctgtgcccggaaccacaggaagccgggcatctctgcagcctgtgtccctgccagctccccctacgcgctgaaattcggcagggaagaagttatggtgcccagcctctgtgtgcaagacagagacaccgcgcatcatggctctgaaaatcagccaagtggccgggacgtcaaagcggcagagcaatcagaatgccctggagccggggatggaggggccacattgtttgagccctcggattttgctgcattgtcaccgcccgggaacgtgggggtagcaggaagcgcacctccagccaaaaatggaccggacgcattccccccccgctccccgccccggcagctccctccctgcctgtctgcaagtcgcaatacgagaggggcatcttctgaggagggacagaacgacccgggacctggtttttgtcttctctcatcacagggagaccaccactgtgtgtgggagagagaaaggttgctcttcttggaaaagtgttgtgcactgaggatcataagtcaaatcaccttcaatttctcgtcttcttcctgctccccaagcctctatgattcaaggatctcagttccaagtgaaagaactgaatagcagatct

SEQ ID NO: 117307 - DNA, 417 bp, Homo sapiens
  misc_feature (1)...(417): n = a,t,c or g
caggtttattttctccttttttgagatttctagaaaaaatgctgcttgcacatgttggttcttgaaaccttagctagaagaatttcaggtcataccaacatgtggataggctatagctgttcagaggtctcctgggggagcttaaaacgggggaaacactggttttcacagatgctccacatggctgtctttaaaagactcaaaacttttttttgtcctctttgttatgcttggaagctnnnnnnnnnnnnnnnnannnnnnnnnnntttttcaaaaaaaccctttaagggggggnnnnnnnnnnnnnnnnccctttttgggaaaaaannnnnnnnnncggggggaaaatttttaaaattttttggctnnnnnnnnnnggttccttcctttgttggnnnnnnnnnnnnnnnnnnnnt

SEQ ID NO: 117308 - DNA, 1197 bp, Homo sapiens
atgggtatccgaagaaccaaagatctcccggtctaccgccgccagaagacccggattctgatacgcctcgtgctggagcatcacgccatcgatatggtgcatgggtgctttggcctctgccagcgacttgaggccaacgagtttttgcggcccgctggtactttggcgaatcgcatcttccacatcgctattcctgtgaccgagctttatacggtgcaggaagaggataaaaccgtggagcggaaacgaagttttatccatttttggttacctgagtcattgatggttgatggcaatcagaagcgggaggaccccccccatcaaaaattgagtgaaggatatgaacatacacttgctcaaagtgaagatattgatgcagccgacaaacatatggaaaatatgctcatcatgtcctttggtgggacgtggatgaagcttgaaaccatcattctcagcaaagtatcacaaggacaaaaaaccaaacatcgcatgttctcactcatagacaaagtcttgctctgtcacccaagtcgactttatcttaaagcccaccatgagtgtacagatcagaaagtctaccaagctgtgacagatgacctgccggccgcctttgtggatggcaccaccagtggtggggacagcgatgccaagagcctgcgtatcgtggaaagggagagtggccactatgtggagatgcacgcccgctatatagggaccacagtgtttgtgcggcaggtgggtcgctacctgacccttgccatccgtatgcctgaagacctggccatgtcctacgaggagagccaggacctgcagctgtgcgtgaacggctgccccctgagtgaacgcatcgatgacgggcagggccaggtgtctgccatcctgggacacagcctgcctcgcacctccttggtgcaggcctggcctggctacacactggagactgccaacactcaatgccatgagaagatgccagtgaaggacatctatttccagtcctgtgtcttcgacctgctcaccactggtgatgccaactttactgccgcagcccacagtgccttggaggatgtggaggccctgcacccaatgaaggaacgctggcacattttccccagcagtggcaatgggactccccgtggaggcagtgatttgtctgtcagtctaggactcacctgcttgatccttatcgtgtttttgtaa

SEQ ID NO: 117309 - DNA, 3597 bp, Homo sapiens
tttttttttttttttttttgcaagggatgtaactttatttttctagcataataatttaaagtatttacacactgcacactcactgttttacacagatacgtattcatatatttatgaaccacatttaaaggtttctttgcaaagactcgacaccactgtggtgatggggggggagcttccaagcataacaaagaggacaaaaaaaagttttggagtcttttaaagacagcccatgtggagcatcgtgtgaaaaccagtgtttcccccgttttaagcctcccccaggagacctctgaacagctatagccctatccacatgttggtatgacctgaaattcttctagctaaggtttcaagaaccaacatgtgcaagcagcattttttctaagaaatctcaaaaaaaggagaaaattaaaccctggcccttacggtagagaaatacatcttatttcctgaaagtaatctgtggggattgttttacagggacaccgattacaagggcagaatagcaaaatacactattactagtgatgccagggtgcttttaaatgtcacttccagctaaaatggatatggccaaaataaccccaatcttcttttcccaactatcaggtaagggtggttgttattttccctgaaaagagcaaaggtataattaataagtgatacacactctaaacccagatcctatagaaatttcttctattgcttttacttcactttcatactatttgcacaaaaatagtggttatcctccgtattttttcctcgcttgtactactcaattataaaacaaattattaacggatagcttctgaatttggtacatggcatcataggtgaacaaaaaaagccacagttcagagctgatggtcagtccgtctctagtccagcttctataaaaggaaggcgggtttaggtttcaactctctatagttgaatctcccatgagtaagaagggagatgccttccttaatttttcccagactgcccaaggattattctctcatcaacacaaggtagaggtttgccacctctacatgaattcacaactccactctgtgactgggtggcacatcagttcgctaagaagttaaactttacaaaatgacgtcctcttcctcttgccggtatgggcctctggcagtgtcactgatcaataggacatggcacaaagtaactacctggagaactaaaactaagcataatcttggcctgaactactacggtaaagatagtatcttttatttctgtttatgtaaacttatcaacaaattattaaagcagaaactctatcacttcttggaactaaagatttacatctagctataacaatagaaacctacctatcctggagttaactttctcagattactgctcctgacttttgctgttcttttccttttgcaagggggtgccaacaatggatggaagaggcaaggagatcttactttataggaatttctccaagttacaacgagcaactgaccaaatcatattcaactacaggtgttgagagagagagtacctgacttcagaccacctgggaagcacaatgcttagttaacaagaatatctggattaagcagtgccgaagtggcccgcacaccgagtcaggcccaaggaaagctcctcctgtccattgcccgccccaactctgttcccactttgccatggccagaccatatccaaagactgtgatggaaagatcatggtggacaaggaagaatgaaaaaactttgtgatgggatctgggccctcctacatttagagaaagaaccctaacaaacccccagttcctttggattccgtaaggtgaggctgaggagggccttactggagttggagacagggagagctgtgtttctgggctcaaagccaagaaacggttaagaagaggggcttgcatcagtcatatagattaaaaagagcaaggcatgataattactaaatttatagtttcatgttttaacacagaagagtcagagggaaaactgacaatttaaaacggggcatgggatgagaaaaagtctaggagttcctaataagattaagttcttatctccaaaacttccatccctagacccttttgacctacgagaatagcagtttctatggttcaacctaatacactgtatgggctcaaatatataacaattagaattgagagtaatcagaataccaataatacccccccttctgaaaaagtaacagctcttagatgaagagagcttcttaagatcagcgtttaagagtcaaagcacctgtaagggagagttaacgaccctttcaaatcaagtgagggcagaagggtgagggcatagttcaaaggaacgaggcagctccaccggaaggtggcgagtaaaagctgcacaccgtggcaaatcagtagcaatgggaaagggcaggaaggtacagccaagaatagctacaaacaactggtcaccttcaaaggaaacgctgcatatggatgtctgtgtatatgtactatacatatcaaccaagcacacacataaatatttaatatataaaaaataaagtgctttctaacaggtccctgggcagggacattataaaacatttcacagaactgcaaaacaaaattgatacaatcaaagaacactacatccaacatatgtgaaaacagccaaacacagtatgtacaatctggtgggtgtcccaggacaaacatcctgtcatatacatggtatatacatatatactcttttactcaatatattatgacaatatatattttaaaattttgttatagaccaaaaaataaaaaaccaaaacaaaagacaacccctacaaaaacacgataaggatcaagcaggtgagtcctagactgacagacaaatcactgcctccacggggagtcccattgccactgctggggaaaatgtgccagcgttccttccttgggtgcagggcctccacatcctccaaggcactgtgggctgcggcagtaaagttggcatcaccagtggtgagcaggtcgaagacacaggactggaaatagatgtccttcactggcatcttctcatggcattgagtgttggcagtctccagtgtgtagccaggccaggcctgcaccaaggaggtgcgaggcaggctgtgtcccaggatggcagacacctggccctgcccgtcatcgatgcgttcactcagggggcagccgttcacgcacagctgcaggtcctggctctcctcgtaggacatggccaggtcttcaggcatacggatggcaagggtcaggtagcgacccacctgccgcacaaacactgtggtccctatatagcgggcgtgcatctccacatagtggccactctccctttccacgatacgcaggctcttggcatcgctgtccccaccactggtggtgccatccacaaaggcggccggcaggtcatctgtcacagcttggtagactttctgatctgtacactcatggtgggctttgaagataatagtgatcttcacctccaacatatccaacatctctggtacaggtggtggagggaagacaactgtgcacaccatgaccaacaggaaaacaaaccctacctttcccaaggaaggggaggagagggccat

SEQ ID NO: 117310 - DNA, 609 bp, Homo sapiens
atgcagaaagtcatgtataagggactcgtccccgaggataaaacattgagagaaataaaagtgaccagtggggccaagatcatggtggttggctccaccatcaatgatgttttagcagtaaacacacccaaagatgctgcgcagcaggatgcaaaggcgaggaacaagaaggagcctctctgcaggcagaaattaaaggagaaattagcattcttgaaaagggaatacagcaagacactagcccgccttcagtctggacgatacatagtcgaagtagggcccagcatccgaatcggtcccttcgccatacagattgtcgcgagacctgtcaatgagcagaatcggccgccgtgcattgcggtcatttctactccattcacgacagtcgttgtgcaggcatctgggaacaaagtcagtcgccagtcagtgttgtgtggaagccagaacatcgttctcaatggcaagacagggatagagaaatgtaagtggatgcccggctttggcaaaggcatccgtgacaaattccgaacaaaaccacgactttttgtctccttattcaccgaggaaatcaaaacggcgacctgtatgatgatttcgccaatgtgctga

SEQ ID NO: 117311 - DNA, 418 bp, Homo sapiens
atttattgtacatgccggacagcggtaccgttggcaggcgctcctgaaggcacgagagaatgtattgttggtgtttttcttcttccagttaaaggagaaattagcattcttgaaaagggaatacagcaagacactagcccgccttcagcgtgcccaaagagctgaaaagattaagcattctattaagaaaacagtagaagaacaagattgcttgtctaaacacgatctctcaccgcagctaaaacactcagctggacttgtctgggttatgtctgtgggcaccatgtgctctagcttcctgctgggtttggataatggggacagggtgagatcagagtatgccctgctgtccttgtcacaaagtcctcacgggctggctgtgttcctctaccgaagccataatgactccaaattctga

SEQ ID NO: 117312 - DNA, 561 bp, Homo sapiens
atgaggagcatacttctggagcatcagctgaattccacgccattctggggtgaattcatgtctttaaaaaccactcgactacaggctgttgcgtctgcttttgtcttgccaacacctacatctctctcaggccttgatcaaaacattagttcctcaaagaggccttccccaaccccaggactaggtgagatccctctagcatgggctgccacggacaggcgctcctccacgttggcttttggttatttatcctcagtgcacgaggacatgtgtggagtctgcttgtcctgcatcctcagtgcccaaaagtgtgactggcacatagtgggtgctaaatacatccaaaagaatatcaatcattctattataaagcaccaccagctctttccaggagagtctaaagagattctgagtgcaccagactatggcaaaatgggagaaagacactccaagctcgtgccacactttgcctccagagcaccaaagcccctcatggagcctcttgagagcaccttctggacctcactcatcaactacaccatctacccaccatcaggataa

SEQ ID NO: 117313 - DNA, 922 bp, Homo sapiens
tctcacacaaaaatgagaatcagcaagcgtttagcaagcaggtgcacctaccataagctgctctctctcgcaattcatctgttgtcttgaaaccttaagattaagcatctaggttggtgccaatattgcgacattgcaagtacaataacaatggtggctcagtccaggtgtcctgttgtttccattcgacattctgtcttataattccacgcaggtatcgcagtctgctttgatatctgaatgctgagtccgatcaaggaagctgtaagttccactcgcatgagttcttagaccagtttcctagaactcccggcgagcccggctgcggtcacgttctcggccccagacccccgaattgccgtgcgctctttgcacccccagccacgctcaccataagctgcaggcggcggaagggggtgctggtttctcacgcactgtccgcaacttcgcgggcaggcaattaagcaacttggcaataaaagcaaccacatttttcctggagcagttcacggagaacacagaacagcacaggacagatgttgaaccaaaacgcaggaggctgacctggaccaacaacagctatgggcttcctggtttggacaatggagagcaccagcagagacggaggtgcttcctggtgggtttggacaatggagagcaccagcagagacggaggtgcttcctggtgggtttggacaatggagagcaccagcagagacggaggtgcttcctgcaccaccagctctttccaggagagtctaaagagattctgagtgcaccagactatggcaaaatgggagaaagacactccaagctcgtgccacactttgcctccagagcaccaaagcccctcatggagcctcttgagagcaccttctggacctcactcatcaactacaccatctacccaccatcaggataa

SEQ ID NO: 117314 - DNA, 643 bp, Homo sapiens
  misc_feature (1)...(643): n = a,t,c or g
gtacggctacacgcccccgccccgcctgctgcccaggaatactttctccaggaaggctttcatgctgaagaagccctccaaatactgcagctggaaatgtgctgccctctccgccattgccgcggccctcctcttggctattttgctggcgtatttcatagcaatgcatctgctcggactcaattggcaactccagcctgcagatgggcacacctttaacaatgggataaggaccggcttaccaggaaacgatgatgtggcaacaatgccatctggaggcaaagtgccctggtcgttgaaaaacagcagcatagacagtggtgaagcagaagttggtcggtgggtaacacaagaagtcccaccaggggtgttttggaggtcacaaattcacatcagtcagccccagttcttaaagttcaacatctccctcgggaaggacgctctctttggtgtttacataagaagaggacttccaccatctcatgcccaggtatgaccatgtttgatgtaatcaagcatttaaaaaannnnnnnnnnnnnnnnnnnnnnnnnnnnntatgccacttcacatgcactacaatgcctataattaaaagatggacaataaaaatgttggcgagaatttggagaaataagaaccctt

SEQ ID NO: 117315 - DNA, 537 bp, Homo sapiens
atgggaaacaggttgaaggaattgggagataaaaagaaatacacttcaaaactgaaggtgaggccaggcacagaggctcacacttgtaatcgctgcgctttgggaggccaagtcaggaggaaagggggaaactgtgctattgcctacaaaaagcaaaatttccctcagtcttcggtcctttacttgagaggaagcagctttcctttccatctgtggtcctgctatagaaggaggatggtagcagagtactggctgatgaaagaagactttccagaaatgagcagtttggacattgctcggccccctgacaagttcttccatagatccaggcccgtgggcgggtgtaaaagcagaatgccagccctgtgcaaactagatgacccaggtctttacgagctcagcagagatgcccagttcctacccacacagctggggtcagagaacttttatgatctgctcctccatcagaccctctctgtgccaaattctctcagcgtacaaacatcctggaataaattactctggaaagctgaataa

SEQ ID NO: 117316 - DNA, 2676 bp, Homo sapiens
ttcccgggtcgacgatttcgtacaaatcactagtaatactgctggatttacgattaatgggttaacacttaaggttggtacgaatacacctattgaaccaggttaccggatgctttctgtatatgctacatatacagaacgggcaacaggtaataaagcgattgttagtgcagatgctaagctaacaactacacagactgtaggagcaggattaacactggacttatactctattggcggagagattattattgataacattccagaaaaggtaaccgttgttggagatgtatatagaaatggtgaagttgtcaatgatgatagacggttcaagttatttgcgcaagaccccacagtatctgacactatcaattcaggttacgataaggatggtggtttgggctggcgcaagataactaaggattctaacggatatagcttgacagtagattttgacactgtggctaactcatctatcggaatttcgataaagccagaagtagttcttaacatccaaaactacaagctgcttgtatatacgaaatcgtcgactgtgaggccccctctcccacccccatcacaaccacacgctgtcccattaccactccgtccgccaactccctcaacaggaactcactgaccaatcgggggagtcagatccacgccccggccccagcgcccaatgacctggccaccacaccagagtccgttcagcttcaggacagctgggtgctaaacagcaacgtgccactggagacccggcacttcctcttcaagacctcctcggggagcacacccttgttcagcagctcttccccgggataccctttgacctcaggaacggtttacacgcccccgccccgcctgctgcccaggaatactttctccaggaaggctttcaagctgaagaagccctccaaatactgcagctggaaatgtgctgccctctccgccattgccgcgggcctcctcttggctattttgctggcgtatttcatagcaggaccacagatggaaaggaaagctgcttcctctcaagtaaaggaccgaagactgagggaaattttgctttttgtaggcaatagcacagtttccccctttcctcctgactggagacagacagtgcaggaaatgatgggaaaaagcaaatcatgctttatgtttgagaggcacctcatgactctgtggtggacagcaggcattattagctgcattttacaatggcagaaacaggcctgggcaggggaaagaacttgtccacgacacaaggctagcaaacagcaggatctcaggacaattaagaaaaaaatagttgatgctacatatgacttcatggaacgtctggacgggaaggagaagtggagtgtggttgagtctcccagggaacgccggagcatacagaccttggttcagaatgaagccgtgtttgtgcagtacctggatgtgggcctgtggcatctggccttctacaatgatggaaaagacaaagagatggtttccttcaatactgttgtcctagattcagtgcaggactgtccacgtaactgccatgggaatggtgaatgtgtgtccggggtgtgtcactgtttcccaggatttctaggagcagactgtgctaaaggcatctcttctgtcacacagtatggtgaaagcttcgataaacttaaaaagaaggcaagctgtgcccggaattccctggctctgccagtttctgtgactgcaggcagccggcagactcaggccctcctgccagggggagaatttgccacgttagcaagagagactcccatcacatccaagcaaccggatatgtgtccaagacagccccctgatacaggcctgtgcaacccaggccagaggcactggctagagctggagccagcggctggggagatgaggaggaggctacaacttgactcactccttcatcccccttcttgtttctcctccactctgaaatgtggaaaagctgcagctgcagcttgcgacagcagtgaccagatccaagaaagactgcagacaggccacctgccctgtgaagccagccataccatatgccctccgaaccaccacagccagtcgactctgaggccccctctcccaccccctcacaaccacacgctgtcccatcaccactcgtccgccaactccctcaacaggaactcactgaccaatcggcggagtcagatccacgccccggccccagcgcccaatgacctggccaccacaccagagtccgttcagcttcaggacagctgggtgctaaacagcaacgtgccactggagacccgcttctggtgttgccagagatttttggtgttccctggcctacagctgcaacacctcactctctctctgcctgtgtggtcacacggtgctctccctgtgtctctctgcatctttacgtggctgtcttctcataaggacaccagtcattttggattacgagtccacttgctcagtctgccgctggaagcaaaatattctttctatcctggatgtccagtcttggaaccagctccgaatccattgaaaggcccctggtgtctctggggggttggtaccttcagacgttattgtactacatttttgttcaatgagtcagagccaaaggacttggttggtgaaaaatttaaatcagatcgcctttgccgagaagcgcatctccaggagtag

SEQ ID NO: 117317 - DNA, 739 bp, Homo sapiens
tctgtaccgtcccgcaattccctggtcgacgatttcgtatttgcagcagactcagcactctgactgcctgcatccacgggtctgcggcgatgctctaccccatgtactggcagcacgtgtacatccccgtgctgccgccgcatctgctggactactgctgtgctcccatgccctacctcataggaatccatttaagtttaatggagaaagtcagaaacatggccctggatgatgtcgtgatcctgaatgtggacaccaacaccctggaaacccccttcgatgacctccagagcctcccaaacgacgtgatctcttccctgaagaacaggctgaaaaaggtctccacaaccactggggatggtgtggccagagcgttcctcaaggcccaggctgctttcttcggtagctaccgaaacgctctgaaaatcgagccggaggagccgatcactttctgtgaggaagccttcgtgtcccactaccgctccggagccatgaggcagttcctgcagaacgccacacagctgcagctcttcaagcagtttattgatggtcgattagatcttctcaattccggcgaaggtttcagtgatgtttttgaagaggaaatcaacatgggcgagtacgctggcagtgacaaactgtaccatcagtggctctccactgtccggaaaggaagtggagcaattctgaatactgtaaagaccaaagcaaatccggccatgaagactgtctacaagtt

SEQ ID NO: 117318 - DNA, 1440 bp, Homo sapiens
atggtgggggtcatctggcagccaagggaggactggagcagcagcgacggcatggccccccagcatctctggaccaccatcggcatgccagcccctgctcttggggtagggattccaagggatgtcaaagtaaatgctcggtgtaatgtttctaatcaaaatcaattgttcaaaggtgcaaagatgctggaaaccatcaccaaagaggatcggaagcagcatgggaccagtggaaaaaccatcctgactgacacactgattaagctgctggacctagaggaccaagtagagcagcctgccgtcctgagctgggaaagccgaatggcggctcagctctgcgtctcaggaccacctgttggccccaaacctctgtctggccagacaagaaatgctttggaaaaacaatgtgctttcctgtttttgagattcccagtcatggaacggccacaggggcactcacagtacccgaccgtgccacatgctgtcaaggccgcttgcctctgcatgtgctacttcctgccccctgctcctggggagtcctattcctccgacgcacacattccctatgggactttagaaaaaagccttgatgcctactttatccagatctcttccctgaagaacaggctgaaaaaggtctccacaaccactggggatggtgtggccagagcgttcctcaaggcccaggctgctttcttcggtagctaccgaaacgctctgaaaatcgagccgcatcaaaatccatctagagtttcagtattctttttcaagcacatcggcgatgggttaatggtgacattatctgacagctcccagataacacaggcaaagagagatgggactcatcaagaaacaccgcctcagctagacttagcaaggaaatctccactgactgactcattggattctatgaccagggtcatctccaatgcctctatctccttctccttatttctgagaagttgcctacctcagatgaacctacctgtaaggtgtcgacaagacatctctgcctcctcatgccttgtcattcctctcctggacgagaaagctgtccccttcaaagacttggctcaaaaatacagagtaatgtcctatgactgcactgcccgccatggccccagcagtgcggcctgccctaaagtcagaaacatggccctggatgatgtcgtgatcctgaatgtggacaccaacaccctggaaacccccttcgatgacctccagagcctcccaaacgacgtggtagggttgttggaagaattcaacgccatcacagatgtaaaggagatggaccagtgttcaacagtggcagctatcttcatcacttatgttactgacagagcattttcccctccacagttccaggaatttcccctcatctccttcctcctctctgagtgtcagtgtctgcctctgcccagccctcaagctttcatttga

SEQ ID NO: 117319 - DNA, 752 bp, Homo sapiens
cccgggtcgacgatttcgtcaggcggcggagcggccacaatcacagctccgggcattgcgggaacccgagccggctgcgccgggggaatccgtgcgggcgccttccgtcccagtcccatcctcgccgcgctccagcacctctgaagttttgcagcgcccacaaaggaggcgaggaaggaggggctgtggtgagaggagggagcaaaaagctcacccctaaaacatttatttcaaggagaaaagaaaaagggggggcgcaaaaatggcctggggcaattatagaaaacatgagcaccaagaagctgtgcattgttggtgggattctgctcgtgttccaaatcatcgcctttctggtgggaggcttgattgagccccgagagccggtgactgtgaatgtccccgtcctcttttggcgcttaggagagcgccctcagctcccaccacagccccccgcagttcctctggcagccctccctaaagatccctctgagacaaagtcagaaatggcttccctagggaccaagagagcccacaggctcttcctgctgctgctgcttctactcctgtattttgctcagctctctaagtttgtctcagctccaggtgaaacaggaatgctacagaggtctagagttggctcagtgctttcaccccaggtcaccaaactcgagaagcaaaatcagcacctgatggcaattgctgcccatcactcagagatcctggacttgaggctgaatgctgtgatgggatag

SEQ ID NO: 117320 - DNA, 804 bp, Homo sapiens
atggctggtgccaagcaagggctgaactgttccttgcaggcagatttcaaggaaggcgtcgacacctttcatgtgccgatgaggacaaatccctgtgcccagattagatttccagaaacacctgtgaatcttgcccacacacctgcaagaagctggtgtttctctctatggaattgtgacgatgacctgcctcctccattagttggctgtgctgcccaggctggggttgccgatggtccgctctgtgccagctggcagactggccggctggctcggcagagcaaagtgctaattgaaaggcgccctcatcacccaaggctctcagtcgtctccttggaatggctggtgcttctgacaatcttatcagccaaggctgtggcccacattggtgaaccggggacatgcaaacccccagcttcactttggcaagagaggcctggcatttgctgcaatgccaggaggggatctggatcttcctaccgccctgatggcagtgagcgtgctccggcggctggcatggagagacgacgaaatggatgtggagtgtctcagagccctggggaacagggagggcagcccaaacaaactaactcagcggcttatgtctggtttgcagagagagaatcaccagaccaacccagcaccccagacagatgggccatggtgactgccagctggcccctggtgctcgccggccatgcccaggagaaaaagcacctttgcttcccctttggtgtcttgcttgtgatggtgtgcaatgcttgctggttgaataagcacactgaccgaatgggccatgtctag

SEQ ID NO: 117321 - DNA, 451 bp, Homo sapiens
cgcgtcgacgatttcgtgtccgttacgactcagaggacggagagaaagtctaagtcaccttcctcagtatccaggccggaaggagactctcagctactcgccctgaacatgcagagcagcactggcttccctgtctctggatgccgcaggggcgtcctgtcaggagttgtagtgtcaagattccagttcttcttatgcgacttgctggagaagcaggaagttgctgtttattggagaagtcgggctagggagggaaacaatcccgcggagccatatggagagggcaggaggtgtctagatagtggctctattccgttcgctggttcgccacctcaggggaacgatggccatggagtccacagccactgccgccgtcgccgcggagctggttctgccgacaaaattgaagatgctcctgctccttctacatctgcagataaagtggagagtg

SEQ ID NO: 117322 - DNA, 1122 bp, Homo sapiens
atggccacggagtccacagccactgccgccatcgctgcggagctggtttctgccaacaaaattgaagatgttcctgctccttctacatctgcagataaagtggagagaatcgagaatggtgtattgggaaacaccttggatggtgtgcatgtggaagaggaagaaggagaaaaaacagaagatgaatctctggtagaaaataatgatagcatagatgaggaagcaaggaaagagttgagagaacaggtttatgactccatgggagaaaaagaagaagccaaaaaaacagaagacaagtctttcgcaaagcctgaaactgataaagaacaggactgtgaaatggagaagggtggaagagaagatatggatataagtgaatctgcagaggagccacaggaaaaagttgacttgactctaggttggttaactgaaatctctgaaggggcaaaaggaggaggagcaccagaaggaccaaatgaagctgaggtcacttctgggaagccagaacaggaagtaccagatgttgaggaagaaaaatcagtttctgaaactgatgtccaaaaagagtgcagagaaaaaggaggttgggagaagcacagagaggtaattgtgagcatagaggagaagccaaaagaagtttcagaagagcagcctgtggtgattctagaaaagcagggcactgcagtggaggtagcagcagagtctttagacccaacagtcaagccagtagatgtgggtggggacgagccagaggagaaggaacagtacctggaagcctacgaccatctccttgcagagacccactaccagctgggcttggcttatgggtacaactttcagtatgatgaggcagtggcacagttcagcaaatctattgaagtcattgagaagagaatggctgtactaaacgagcaggtgaaggaggctgaaggatcgtctgctgaatacaagaaagaaattgaggaactgaaggaactgctacccgaaattacagaaaagacagaagatgcaaaggagtctcagactactgggaatgtagctgaactggctctgaaagctactctggtggagagctctacttcaggtttcactcctagtggaggaggctcttcagtctcctga

SEQ ID NO: 117323 - DNA, 768 bp, Homo sapiens
atggggagaaaccaaagcagagaagctgaaaattctaaaaatcagagtgcctcttcttctccaaaggaacgcagctcctcaccagcaatggaacaaagctggatagagaatgactttgacgaagaaggcttcagtcaatcagtaatagcaaacttctccgagctaaaggaggatgttcgaacccatcacaaagaagctaaaaaccttgaaaaaagattagatgaatggctatctagaataaacagcatagagaagaccttaaatgacctgatggagctgaaaaccatggcacgagaactacgtgatgcatgcacaagcttcagtagccaattcaatcaagtggaagaaagggctctattccattcactggtttgccacctcaagggaacgatggccacggagtccacagccactgccgccatcgctgcggagctggtttctgccaacaaaattgaagatgttcctgctccttctacatctgcagataaagtggagagaatcgagaatggtgtattgggaaacaccttggatggtgtgcatgtggaagaggaagaaggagaaaaaacagaagatgaatctctggtagaaaataatgatagcatagatgaggaagcaaggaaagagttgagagaacaggtttatgactccatgggagaaaaagaagaagccaaaaaaacagaagacaagtctttcgcaaagcctgaaactgataaagaacaggactgtgaaatggagaagggtggaagagacagatatggatataagtga

SEQ ID NO: 117324 - DNA, 2743 bp, Homo sapiens
tcaggagttgtagtgtcaagattccagttcttcttatgcgacttgctggagaagcaggaagttgctgtttattggagaagtcgggctagggagggaaacaatcccgcgcacccatatggagagggcaggaggtgtctagatagtggtaggccggcgggggacggagggtatgggtggtgagtcctggccctttaaacccgagggggaggatccggaagtggatgggcggggcgaagggtcctcgtatataaaagggccccggccgcgcggggtctctaatctgccattttctgtccctgagtgagtctctggcgtcccaaattgcctgtttttctcgcaggctctattccgttcgctggttcgccacctcaggggaacgatggccatggagtccacagccactgccgccgtcgccgcggagctggtttctgccgacaaaattgaagatgtccctgctccttctacatctgcagataaagtggagagtctggatgtggatagtgaagctaagaaactattgggtttaggacagaaacatctggtgatgggggatattccagcagctgtcaatgcattccaggaagcagctagtcttttaggtaagaagtatggagagacagctaatgagtgtggagaagccttctttttctatgggaaatcacttctggagttggcaagaatggagaatggtgtgttgggaaacgccttggaaggtgtgcatgtggaagaggaagaaggagaaaaaacagaagatgaatctctggtagaaaataatgataacatagatgaggaagcaagggaagagttgagagaacaggtttatgacgccatgggagaaaaagaagaagccaaaaaaacagaagacaagtctttggcaaagcctgaaactgataaagaacaggacagtgaaatggagaagggtggaagagaagatatggatataagtaaatctgcagaggagccacaggaaaaagttgacttgactctagattggttaactgaaacctctgaagaggcaaaaggaggagcagcaccagaaggaccgaatgaagctgaggtcacttctgggaagccagaacaggaagtaccagatgctgaggaagaaaaatcagtttctggaactgatgtccaagaagagtgcagagaaaaaggaggtcaggagaagcagggagaggtaattgtgagcatagaggagaagccaaaagaagtttcagaagagcagcctgtggtgactctagaaaagcagggcactgcagtggaggtagaagcagagtctttagacccgacagtcaagccagtggatgtgggtggggacgagccagaggagaaggtagttacctctgaaaacgaggcaggaaaggcggttcttgaacaactggtaggtcaagaagtaccacctgctgaagagtcaccagaggtgcaaacagaggctgcagaggcctcagctgtagaggctggatcagaagtctctgaaaagcctgggcaggaggctccagttctccctaaggatggtgcagtcaatggaccgtcagttgtaggagatcagactcctattgaaccacagacttctatagaaagactgacagaaacaaaagatggctcaggactagaggagaaggtcagggcaaagctggttcctagtcaggaggagactaagctgtctgtagaagagtctgaggcagctggagatggggttgataccaaggtagcccagggagctactgagaaatcacctgaagacaaagttcagatagctgctaatgaagagacacaagagagagaagaacagatgaaagagggtgaagaaactgaaggctcggaagaggatgataaagaaaatgataagactgaagaaatgccaaatgattcagtccttgaaaacaagtctcttcaagaaaatgaggaggaggagattgggaacctagagcttgcctgggatatgctggatttagcaaagatcatttttaaaaggcaagaaacaaaagaagcacagctttatgctgcccaggcacatcttaaactcggagaagttagtgttgaatctgaaaactatgtgcaagctgtggaggagttccagtcctgccttaacctgcaggaacagtacctggaagcccacgaccgtctgcttgcagagacccactaccagctgggcttggcttatgggtacaactctcagtatgatgaggcagtggcacagttcagcaaatctattgaagtcattgagaacagaatggctgtactaaacgagcaggtgaaggaggctgaaggatcgtctgaatacaagaaagaaattgaggaactaaaggaactgctacccgaaattagagagaagatagaagatgcaaaggagtctcagcgtagtgggaatgtagctgaactggctctgaaagctactctggtggagagttctacttcaggtttcactcctggtggaggaggctcttcagtctccatgattgccagtagaaagccaacagacggtgcttcctcatcaaattgtgtgactgatatttcccaccttgtcagaaagaagaggaaaccagaggaagagagtccccggaaagatgatgcaaagaaagccaaacaagagccggaggtgaacggaggcagtggggatgctgtcccgagtggaaatgaagtttcggaaaacatggaggaggaggctgagaatcagctgaaacgcggagcagcagtggaggggacactggaggctggagctacagttgaaagcactgcatgttaa

SEQ ID NO: 117325 - DNA, 1714 bp, Homo sapiens
atggtggcagcaagatgcttggaccgaaagccactctgtcttacatcattagcaaatcctggcagcttggccctgaaaccgtatctagaatctgcccatttttcccaacctctgggtcaagccactggtagctcacacctgggtgatcacagtgtcctacagtcacctgctcccaccttccccactgtggtccgttctcagcccaacaagagtgatcctgttaaggaagctgttcagaggactgtgagggtctggcacacacgggctccagcacgcgggccaagcgccgtggcccccggggaccccacacctgctgctccctctgcaggagagctcctccctgaccccacgtggctcctgaccccggttcctccgggttatgaggactatttccgaaggaaagaaagtgacttgcccaaggtcacctggcgagttccaacaagagcagaaccaagacccaagtgtcctgcccacctctcccgctctgagcagagtcactcctctcagaagtttctatctaactgtgtagttggggcttcgcttgaagaaattacagaggaagaggaagaggaagatgaaaataagtcagctatgctggaagcttcctcaaccaaagtgaaggaaggcacattccagattgtgggcacgctgtccaagcctgacagcccgcggcctgactttgcggtggagacgtactctcattctgaattcagaattccatcggatgaatttaacaaagagattgaaataatttttaaaaatcaagcagaaactccggagctgaaaaatgcaattgccatactgaagaatgaatcagagtcctttaataacaaaattgatcaaagaagaaagaatgagcttgaaaaccccctattaaaaaatacagtcagaggaaaaaaacagagcacctcttcttctccaaaggatcgcagctccttgccagcaacagaacaaagctggacggagaatgactttgacgagttgacagaagtaggcttcagaaggtcggtaataacaaacttctccgagctaaaggaggatgttcgaacacatcgcaaggaagctaaaaaccttgaaaaaagattagatgaatggctaactagaataaacagtgtagagaagaagaccttaaatgacctgatggagctgaaaaccatggcacgagaactacatgatgcatgcacaagcttcagtagccaattcgatcaagtggaagaaagggtatcagtgattgaagatcaaattaatgaaatgaagtgagaagagaagtttagagaaaaaaagagtaaaaataaatgaacaaagcctccaagaaatataggactatgtgaaaagaccaaatctacgtttgattggtgtacatgaaagtgacaaggagaatggaaccaagctggaaaacacttttcaggatattatccaggagaacttccccaacctagcaaggcaggccaacattcaaattcaggaaatacagagaacgccacaaagatactccttgagaagagcaactctaagacacacaattgtcggattcaccaaagttgaaatgaaggaaaaaatgttaagggcagccagagagaaaggtcgggttacccacaaagggaagcccatcagactaacagctgatctctcggcagaaactctacaagccagaagagagtgggggccaatattcaacattcttaaagaaaagaattttcaacccagaatttga

SEQ ID NO: 117326 - DNA, 631 bp, Homo sapiens
agcccaaacatcagtgtgccctctatgtcctttgttgaagatgtcaccataggagaaggggagtcaatacctccggatactcagtttgtaaaaacatggcggatccagaattctggtaagtacataatgggcaatcctcccttgcctagttttcaccaactcctccaactagtgccattgttcctgcgaccacagttcattgatgttatcaggggagatcaccccattgtttatattttcactaccacccaaggtctaaacttttactgccttttatattcatgtggtctcttcgggggagaccaatttggacatgtgaacatggtgatggtgagatcgctagagccccaagagattgcagatgtcagcgtccagatgtgcagccccagcagagcaggaatgtatcagggacagtggcggatgtgcactgctacaggactctactatggaggtgagtatgtccttgtgcagcccagggtaaaggaactaaggtaacatcttataacatccccagtgttgctcacagagcctaacaacaacaacaacagcagcagcagcagcagcagcaacaacaacagcaatgtgaaatgactgtactgttcagattaacctctaaaatgcatatatgtgg

SEQ ID NO: 117327 - DNA, 676 bp, Homo sapiens
tttcgtggcagagtgagtttacccctatgagactgtaagaggcccggggcctacctcaaaggagcggggtcgcgaagctagctagcagcggcccccctccaggtccccgggcccggcggcgcggcggcggcttggttgtgaagaggcggggaagcgggtgtccggtccccgccatggagggcatggacgtagacctggacccggagctgatgcagaagttcagctgcctgggcaccaccgacaaggacgtgctcatctccgagttccagaggctgctcggcttccagctcaatcctgccggttgcgccttcttcctggacatgaccaactggaacctacaagcagcaattggcgcctattatgactttgagagcccaaacatcagtgtgccctctatgtcctttgttgaagatgtcaccataaggggaagggggagtcaatacctccggatactcagtttgtaaaaacatggcggatccagaattctgatgtcatctgggtgattctcagtgtggaggtgggtggacttttaggagtaacgcagcagctgtcatcttttgaaacggagttcaacacacagccgcatcgtaaggtagaaggaaacttcaacccttttgcctctccccaaaagaaccgacaatcagatgaaaacaactttaaaagacccttgtggctg

SEQ ID NO: 117328 - DNA, 384 bp, Homo sapiens
atgactttgaagcctcctggcacagggatttcaccctctgttccttcctctctgttgtccctctacctggagctcccatcctggtctcactcgactttgcccttcacgagaatgtttcgcgagaatcccaagggtatccttcccacgcccatggccgtggtgttcctaaggcttctggaagcctggggccaggagaagggcagcactacgagaaagaaggggaatgggaaagccatttgcttccttaaagatggcgggaagctgtttgaattatatcggtcagccatcaccggagggggcagatttctaagagaaccagacaaactccattttggctctttcactggcagccccttcctcaaggacttaacttgtgcaagctga

SEQ ID NO: 117329 - DNA, 664 bp, Homo sapiens
cagattaccttgaaaacactgcatagcttctgtcaaacttatgtatcttaagactcaatatagacccccttgttataactgaggaatcaatgatttgattccccaaaaacacaagtggggaatgtagtgtccaacctggtttttactaaccctgtttttagactctccctctttcctttaatcacctagccttggttccacctgaattgactctcccttagctaagagaaccagacaaactcccaccttggctctttcactggcagccccttcctcaaggacttaacttgtgcaagctgactccccagcacatccaagaatgcaattaactgataagatactgtggcaagctatatctgcaattcccaggaattcgtcccattaataacgcccgattaataacgcccaaagccccgcgtctatcaccttgtaatagtcttaaagccactgcacctggaactgtttactttcctgtaaccatttatccttttaacttttttgactacttaacttctgtaaaattgttttaactagacccccccatccccttcctaaaccaagatataaaagttaatcaagccccttcctcggggccgagagaattttgagcgttagccatttcttaggcgccggctaaataaacagactcttaattcgtctcaaa

SEQ ID NO: 117330 - DNA, 485 bp, Homo sapiens
aggccaagagcctctgcaggatcttgaggcccatgatgttgtttgctcacagcccacttcactcactgtgggacctgcttggtgcctggcgtggagatgtgcacgggacactcggaggccggatgctcaacagagtggagtgccgcgacggtgtggccgcagcctggctgtgccttcacgacgcagctgcaatcagaggagctgtgggacgctgtcccacgtggacacagcccactcactggacggtcccttgcaaacccttgcagtccgccatatccatctttcccactggattccagttctccaaggaaaagccacggcctggagccagggccacgctgcccggtgtcccagcccagcaggcatcaagaccacagagctgcttccagatcctggccatcctggacacctggagaactaccagtcgggatctgcaggaaaacgtgggcattcccataaacgtcattcgttttgcagaaatctga

SEQ ID NO: 117331 - DNA, 205 bp, Homo sapiens
tggcacccagaactaacacccgtgaccccaggacccacagcaaccccttaccgaagcgtctctcctcgaagcctctcttctcagaacaaatggctgataaaagagaggtgagttgatctagattccagctacctctaaaccacagctcagtatctctgaggacactgcagccacatgcacgaaatcgtcgacccggaaattccgg

SEQ ID NO: 117332 - DNA, 728 bp, Homo sapiens
  misc_feature (1)...(728): n = a,t,c or g
ttttttttttttttgaggacctacatttaataaatcaaactgtcctggcatcatcagaatattcacagtttgcaacaggatcagcgcgttttctcccttgcagactcggaggtatttcaggagaaggcgacgtgagcgcaccattccgatgcttcattcttgaccctctctggggctttcaatgtgtcattgtgtcagatccctctccccttcaggttttcacggtgctcctcatgcctccgccctctgggatccctttgccgtcttccggtgtggaagctttggctgctggccggctggcctcgaaggagtccaggtgagatttagggagctccccctgggatngccaggcctggcgggcctggccccgtctcactcctctgaccttatatggaaatctctcttctgacctcttccagttctgcagctgcctgttcctttgtcagtttaattatttccctcccaaggctgtttacttcttcctcagaaggtaactggggtaatgaaggatgaaagagcttgcattggttcccgcggctctgatttgctggggagttgacagcgggcctcccagcatcctcaggcgctgtcaacgcctcagcagcggcacaactttcatcttcttcttgcttctgagcctcccttgctttgtgatcaggataggactctctgatgccccttctggacctaaccagcaatgcttgctctgcatgagtggggagcagcat

SEQ ID NO: 117333 - DNA, 921 bp, Homo sapiens
atgcttaaggtcttcaaagagcttcagttctccatgttacaactaacaaagagagagagaaatgggagccacagggagagcgaggagaaggagaaagggcagcaggaggaggaggagaggagcagcagcagcacctaccacccggggagcgcgcttcagccgccccccgcgccgccgcggcgagacgagtcggcttcgctacggtgctcggttctcccgccggctcggcgagcggtggcggcggtggcggcggcactgggaaaatggcggccgagctccttttccctccccccctttaatctgaagcggagggagaatggagcgagcgagcaagcgggcgagcgccggggacacggggaggagggacagcagcgcctccgccggctgcggctgcggcggcgaagggccgctccaccccggcgcgccgccagggggcgcccgccgcgccgcccccgcgggccgccaggaggcgcggccgccgccgcctcagtcatggctcctcgccgtggccgatgtttttgtacctccatctgcggaggccgcggcgcccggccccagctgccccggacgtgcggcgacggcacgcagcactgcggcagggggaagccagccctcgctgcggccgagccccgccgcttccagggccctcggcggcgcccgctccccgggccccgcggccccccgcctcccagccgggccgctccctcgagctcgtcgggtcagggacacctcctctacctcaccatcaccctggcccactcgtgcccccacccccaggggcaccagtgccaaaggcagctcccccagccccggacctacctgcacggttcaaccaagcctagaagtgggggcggggaatcttccgccctcctctggcgcccattggcccttcaggggcacatcgtgagcgccattggctga

SEQ ID NO: 117334 - DNA, 535 bp, Homo sapiens
gcggccgccgccgcctcagtcatggctcctcgttgttgccgatgtttttgtacctccatctgcggaggccgcggcgcccggccccagctgccccggacgtgcggcgacggcacgcagcactgcgacaggtgggaagccagccctcgctgcggccgaggaatggccatgagatgtgagtagaagccccctggacagccctccaaaagagaactgtgagaaaaggttcttcaatcctaaaaatgatggaggaaaaaaacagtccctcttcctcagacagtgacacctcaaactgctacagtcacctttgcagcaagcgctgaagatgccaccaacatcaaagggaatagagagttggtccttggtgatagcgattaagccactgtatcaaccaatcctgacagatttgtatgacttctggatttccagccacagtacaagcaatgtaacaataaacatttgttaattgcttaagccaatttgagtttaggttccttatataataaatgaagtcaaaaaccaaaaaaaaaaaaaaaaa

SEQ ID NO: 117335 - DNA, 922 bp, Homo sapiens
ggagttcccgggtcgacgatttcgtggccccgaatgacactttacccgcctttttccaatgttgcacttgtttttttagactggaatgggctaaacaatgatttgctgcagggggtatcacttttttatattttctgcctgcttctgtgtcagtcttcacgccccaggtcagggagaggcaagccaggcccggagatcgactgcgcccgttggaacatcctcttctcgggaggctggaaggccatggacaatcacctatccccagcaaggggggacctgccctggaagaagaaaccagaccaggtgttggctacgtttgaggatataagagagcctgagggcctgagaggcagcctcctgagaagccctttccgagggcattcggaaccttctcgtcctagaggtgaagctgaactgtcaccaggacttatgacccgcggcttcgctcccattctgcccgtcgagttccacaagatgggctccttccgcaggcctagaccgcgcttcatgagctcccccgtgctcagcgaccttccccgattccaagcaactcggcaggctctgcagctgagctccagctcagccagcagggccgccagcgaggtgagggaggaagacctgctggcttgcaagaaagcgggggctgcttttgagtcctttcgcctttggtcttcctttctctccaaggacactgcagcacttcttgcaagctgcctcatcgtctttaacctcatgtgggaagagagttgggacaagcagcgggattttgccaccttgggtctttctctgtgtgcaaggcagactgactccatccgaggtgatttccctctgtcacttccgcgcttgcccactctgctgccatcctgctgtccctgcgcctctccaccagcttgattccagcttttagtaatgcctcctttac

SEQ ID NO: 117336 - DNA, 477 bp, Homo sapiens
  misc_feature (1)...(477): n = a,t,c or g
atgcggagtgntgataggctccggatgtatgagccctgtggctcaagggcgctgttctctctgctccgaaatagaaataatacctgtctcacagagctgttgaaaagctccactgaaataatgaccgcaagtgtgaactgtaaagcaatgagagacgtggccgatagaagccgagtggcagtaactctaagttggagttacacggtggagaaggaagcactgactcagactcgggaaatatttccatgcaaacgctgtcctcatgtggtcggaaccagttacttcaaagaagatattccagtggaatataaaataatttgtgttactatggaaagagaccaaggctcaacactcaagtttcaaggctgcctctccccaccgaagactggcttgctggcggcagtggaaggaaggggaaccgaagacaggaggacatggctggccaggccagctctggctgtaacaactgtcatgtga

SEQ ID NO: 117337 - DNA, 1062 bp, Homo sapiens
tcccgggtcgacgatttcgtctggcacgttgggagtttccctagcgactcacttcgggtgggcgttgggcgcctgagtcagccaaacaggctactcggggttcttgggtagcctttggggtgaggggacttgggcggtcttggtctgtaagctctgcgttcccgggcgtggaatagactggccgcgcacatgcgtttctgtggttttcctggtttggggaaagcggctaaatggtggctggctgcggctaactgggccgcgctaaaaggtatcccaaggcaggtggattacctggggaaacagctggagcagtggtcctgggccgccagtccgcggtcatcccgggagcttaagatgcggagtggtgataggctccggatgtatgagccctgtggctcaagggcgctgttctctctgcttcgaaatacaaatattacctgtctcacagagctgttgaaaagctccactgaaataatgaccgcaagtgtgaactgtaaagcaatgagagacgtggccgatagaagccgagtggcagtaactctaagttggagttacacggtggagaaggaagcactgactcagactcggtgcgcaggacgaaagccatctggtagctttgcttgcaagaccagattaagaaagcaccagcacaaaaaccacaaaggagaagatgaagctgtatttccggaggaaagcaaagatttctacccaaagctgagaaattggaaagctggacagccggataactggggtcatggccatgggccaggagaagactgtgctgggttgatttatgctgggcagtggaacgatttccaatgtgaagacgtcaataacttcatttgcgaaaaagacagggagacaggtctgtttggctggggcagctttgttccaggtgtgttcactctagggccctggccacaggaacagaggcgaaggccaggggaactctgcacggtgatggcagatatgcaagagggcaagcccagtgaccctggtgctttccaaggctttggctgtatcacatccaccaacattggccaaagcaaggcgcgtgactga

SEQ ID NO: 117338 - DNA, 892 bp, Homo sapiens
ctctcaggaacaggtccgagcagaacatccctatggagggaatgactgtcctcagctgacccaagaaggagaagagatcggtacttcatctacatgtgacccaggaaagccaaacatgtcttccagggcccatcaccaatgtgctcagactcagctgctgagcaaactgatgactcacattgagcctacaattgctgccttgactgggctccaccaaactaccatagcaataaagtatctccctaaaccaaggctcagcaagccagggcatctcctgccagatttctgctccatcccatatgacatctactttaacctgaggccttatgcacagatagcaacactgaagtgcccccagaagacccaaagagggcaagaccactacaaaagttttgaggatgatggaagtttcaccccggaggactggtttttcccactggtccctggccctgcctggggcagcccgtgtatcaagctggaaggagggcatggggaaagtcccaagaattggttgtcaagaattaccatctggcccacaccaactattgggcttttcgggcacccttcacctttactcgaacttcactgtcctgatgacctgtgtgcttcaagcttctgtaacaaaaccttcagggtggagacttttgcccatgcttttctggaagttttgggtgtccgctgcgctcctgatccagtgaggcacccattgccgctccagatcaggctagagattctcttatcaccagggaaaggcctgtacaactgctcagtaagccttggccgtaaggtatgctccctaatacagaataaagggcaggatgccacagtgcggccagcaggctcagtcccatggagagcagcccagtacggcttaagctgtaaagacaagtaa

SEQ ID NO: 117339 - DNA, 918 bp, Homo sapiens
atgaacagacacttcccaaaagaagacatacaagcagccaatgagtatatgaaaaaatacccattatcactaaacatcagagaaatgcacatcaaagccacaatgagacatcatctcacactagtcagaatggctatcattaaaaagtcaaaaaacaacatactggaactcctgcttgtgaatatgcctcagaactgcccatacctcaaagggagtctgtccagagaagaggccacggttggagagaaacacatgtcttccagggcccatcaccaatgtgctcagactcagctgctgagcaaactgatgactcacattgagcctacaattgctgccttgactgggctccaccaaactaccatagcaataaagtatctccctaaaccaaggctcagcaaggtagaattttcttcttttgtctatgatcgtggtctgaaggatgacttttcagcagcagaagggactggaatggaagcgctgagacgcaggcctttcctggcgcgaagcgactcgccccggagctcccctgcaccgtcctgggtgtcaggacgcgtcaacccagatgacccgacccggagatcctggatcctctgccctcttccccctaccaagtccttaaccggagagggaggagctaccaatgtcctccagacgttctccaaagcccgagctgccgggagaagcttgctcaaggcgggtgcgcccctcagacgtttgtttgcacgcaggggttttgacgtttcgctaagcaacagcgtttgccagggaatcagggctgtttcgaagagcttgcgtctatttgatgctcccatcttgaacaaatcgtttccattcgatttgtttaaccaaggcgagggcggactatgttgttacttaaaagttattcttcatccaagctgtcctcagattttcatctaa

SEQ ID NO: 117340 - DNA, 1122 bp, Homo sapiens
atgggcctgcagttcattgcacctgatatattcgaaaggcttatttgggcccatcctgctgcccaagaaggcccactctctgagtgcagtcattggccatgggccactgatagaggtcaatctgagaaccatctagggaatgaggaccagggaaaaggctcccctaaccctccatctggtgtgaactgcctgccagaacacatggagaaccctccctctgggagctgcagcactcgagcagcagcaaggaaagaaaaagccagctacccctggaacttgaaagtaattggacaatcttcccattctggaagaaatcttcatatttgggttgtagatcacagactctccaacagagaagtgggcctaagtcagaaaattgtactatggcctgatttagagttccctccacaggaactcctgcttgtgaatatgcctcagaactgcccatacctcaaagggagtctgtccagagaagaggccacggttggagagaaacacatgtcttccagggcccatcaccaatgtgctcagactcagctgctgagcaaactgatgactcacattgagcctacaattgctgccttgactgggctccaccaaactaccatagcaataaagtatctccctaaaccaaggctcagcaagccccgtgaagaagacagtggacaaagaaactgtgcgctgagacgcaggcctttcctggcgcgaagcgactcgccccggagctcccctgcaccgtcctgggtgtcaggacgcgtcaacccagatgacccgacccggagatcctggatcctctgccctcttccccctaccaagtccttaaccggagagggaggagctaccaatgtcctccagacgttctccaaagcccgagctgccgggagaagcttgctcaaggcgggtgcgcccctcagacgtttgtttgcacgcaggggttttgacgtttcgctaagcaacagcgtttgccagggaatcagggctgtttcgaagagcttgcgtctatttgatgctcccatcttgaacaaatcgtttccattcgatttgtttaaccaaggcgagggcggactatgttgttacttaaaagttattcttcatccaagctgtcctcagattttcatctaa

SEQ ID NO: 117341 - DNA, 342 bp, Homo sapiens
atgcttttaactgggaacctcgacataaaagtcagggcactgatgctcaagggccctgaccagggtctgtgccacatccctgcacccggagaaacaactcaaggtagttgtccctatggcagtgggcagaaggaagggacggagagagcatctgggccagaagaatacatggcccaggtcccggaaaacagccgcgccccgttcaccgtgcttgaatttccagaggcagaacaggaaatgtccacggggctggagctcaagtgcgaagtcagctgggtctccggctcctttccgaggggcgcctcctacgtgctcccaacgctggccctgtctggaatttaa

SEQ ID NO: 117342 - DNA, 798 bp, Homo sapiens
atggcacataagtatgacactctgaacacagccagatgtatgagagcacctcctttttctcaggcctccaagccagacatgaggcttactggctctctcctatgttcacagttctgcctctgcatggctgaagccatcctactcttctcacctgaacactccctgttcttcttctgctcccgaaaagcacggatccggctccactgggcagggcagaccctagccatcctctgtgcagctctgggcctgggcttcatcatctccagcaggacccgcagtgagctgcctcatctggtgtcctggcacagctgggtgggagccctgacactgctggccactgctgtccaggcactgtgtgggctctgcctcctttgtccccgggcagccagggtctcaagggtggctcgcctcaagctctaccatctgacatgtggactggtggtctacctgatggctacagtaacggtgcttctgggcatgtactcagtatggttccaggcccagatcaaaggtgcggcctggtacctgtgcctggcactgcccgtctatccagccctggtgatcatggcaccagatttccagatcctacttgccgaggaagaaaatggaaataatttggaacaagtgaacaattctaaacttttcaactgctacgtgtttcagaagaaccaagacaggtataaattggttattgaccaaactataagtctaactcaggatccttggttattaatgttcacacagaacctgccttatagtactagtacagaagcagagccagtgggacaggtcttctga

SEQ ID NO: 117343 - DNA, 624 bp, Homo sapiens
atgcccgtattgctggctttgaagatggaggaggggccacaagccaaggaatgccgacagtctcaggaagttggaacaagtaaggaaagggattctttcctagggcctccagaaggatttccaagctcttcagtagccgcaccccagatgttccagtgccagcaggtgcaccccagctctggcccacacaggagcgatgagctctcccagccccctgaccattccctggcagcaaggaatggagctgggggctccaggacaaggactcgctcccaggaggacggacgaggtagcctggatgcttcggaggggcgctctggggcaaggaaggacgtgcttctggaagcgacgcacaagggggctcagggtctcggcctcctgggggtagggggggacacgcctcgagatctttccacacaccctgaaaaagttcccgtccagagcgcccagactggcgctaggaggaggccagttctcggggacctagcgcttccctccatgagaccttctggacctgacccaccaggtcaggcgccgccgccgccgcggtcacgcgtgcagccctggattccagcgggcggcggcggcggacacgcgacccggtaccctggtctcctggcctaa

SEQ ID NO: 117344 - DNA, 756 bp, Homo sapiens
atgcccgtattgctggctttgaagatggaggaggggccacaagccaaggaatgccgacagtctcaggaagttggaacaagtaaggaaagggattctttcctagggcctccagaaggtgacaacccgaagctcagagagaactcccggcgagcccggctgcggtcacgttctcggccccagacccccgaattcccgtgcgctctctgcacccccagccacactcaccataagctggaggcggcggaagggggtgctggtttctcacgcactgtccgcaacttcgcgggcaggcaattaagcaacttggcaataaaagcaaccacatttttcctggagcagttcacggagaacacagaacagcacaggacagatgttgaaccaaaacgcaggaggctgacctggaccaacaacagctatgggcttcctggtttggacaatggagagcaccagcagagacggaggtgcttcctggtgggtttggacaatggagagcaccagcagagacggaggtgcttcctggtgggtttggacaatggagagcaccagcagagacggaggtgcttcctgcaccaccagctctttccaggagagtctaaagagattctgagtgcaccagactatggcaaaatgggagaaagacactccaagctcgtgccacactttgcctccagagcaccaaagcccctcatggagcctcttgagagcaccttctggacctcactcatcaactacaccatctacccaccatcaggataa

SEQ ID NO: 117345 - DNA, 624 bp, Homo sapiens
atggttgatgatggctcctcaccacctcttgcctgccccatgaccctggaggagggtgatgtaaaaaactgtacgttctacggacagcaagattattacaacattactgaaactttatacctgttgattagatcagcaaatctcatttccctggcccctgagaccctggccacaaccttctactctctgctctatgagtttgacgattttagatccccgaatccctcatgcagtaaagacccccgaattcccgtgcgctctctgcaccccagccacactcaccataagctggaggcggcggaagggggtgctggtttctacgcactgtccgcaacttcgcgggcagcgccgccgccgccgcggtccgcgtgcagccctggattccagcgggcggcggcggcggacacgcgacccgtaccctggtctcctggcctaaaggggacagagggtgaaagttggatgcggggcaatgagcccaggactttcacctgcgcccgtcctcgtcctggtagccccaggctttgccagccacatccttcccttgctctcaccaccccaggcacgctggccaccttgctgttctcggatgtgcagagccctctccttcctcccccgggcttctga

SEQ ID NO: 117346 - DNA, 459 bp, Homo sapiens
  misc_feature (1)...(459): n = a,t,c or g
nattgattacaattcgcncgngcggnggaattccaggaagtgagagttctgggccataaattccgaaatccagtaggaattgctgcaggatttgacaagcatggggaagccgtggacggactttataagatgggctttggttttgttgagataggaagtgtgactccaaaacctcaggaaggaaaccctagacccagagtcttccgcctccctgaggaccaagctgtcattaacaggtatggatttaacagtcacgggctttcagtggtggaacacaggttaccggccagacagcagaagcaggccaagctcacagaagatggactgcctctgggggtcaacttggggaagaacaagacctcagtggacgccgcggaggactacgcagaaggggtgcgcgtactgggccccctggccgactacctggtggtgaatgtgtccagccccaacactgccggg

SEQ ID NO: 117347 - DNA, 767 bp, Homo sapiens; identical to SEQ ID NO: 67724
  misc_feature (1)...(767): n = a,t,c or g

SEQ ID NO: 117348 - DNA, 777 bp, Homo sapiens
cccattgacactgaagactttgcacgaggcctgctgaccaaggtgctgcaggagagggatggcttgcggagagtgcacaggccggcagtcctggtgaagatcgctcctgacctcaccagccaggataaggaggacattgccagtgtggtcaaagagttgggcatcgatgggctgattgttacgaacaccaccgtgagtcgccctgcgggcctccaggggtgccctgcgctctgaaacaggagggctgagtgggaagcccctccggggatttatcaactcaaaccattcgggagatgtatgcactcacccaaggccgagttcccataattggggttggtggtgtgaagcagcgggcaggacgcgctggagaagatccgggcaggggcctccctggtgcagctgtacacggccctcaccttctgggggccacccgttgtgggcaaagtcaagcgggaactggaggcccttctgaaagagcagggctttggcggagtcacagatgccattggagcagatcatcggaggtgaggacagcgtctgacgggaagcctgatctggaaccttcccaaggactcaggcaagcctttgtggctggatcatgagaggagggactccatcttgagccatgtcccccagccatggcatggctgcactgtaaacgccaatcggggggtcaccaggatcaaccgcaggctttcttcagtcccttggtcagaccataaactgcatttttgattcttttgtggattcaaaccctaggatccatcagtcttgcag

SEQ ID NO: 117349 - DNA, 478 bp, Homo sapiens
tgtgcccttgggaacggcccggaattcccgggacgacgatttcgtggagcatggcgtggagacacctgaaaaagcgggcccaggatgctgtgatcatcctggggggaggaggacttctcttcgcctcctacctgatggccacgggagatgagcgtttctatgctgaacacctgatgccgactctgcaggggctgctggacccggagtcagcccacagactggctgttcgcttcacctccctggggctccttccacgggccagatttcaagactctgacatgctggtagtgctcccagacaccctatacattaaatacaaaggcgaaggctgcagtcccctaaacttctcagctgggactgatctttttgaaaaccagaaccccaagaagggagagttctgggccataaattccgaaatccagtaggaattgctgcaggatttgacaagcatggggaagccgtggacggactttataag

SEQ ID NO: 117350 - DNA, 1015 bp, Homo sapiens
ggctgctggacccggagtcagcccacagactggctgttcgcttcacctcctggggctccttccacgggccagatttcaagactctgacatgctggtatggatttaacagtcacgggctttcagtggtggaacacaggtacgggccagacagcagaagcaggccaagctcacagaaggtcaggtttgggggaaggcctgcgcggctgtccacaggtggtttggtcaagggcagcctcgaaggtggcacaggaaagggtgtgcggggtgcaggcctgaccagcgatgttgcagatggactgcctctgggggtcaacttggggaagaacaagacctcgtggacgccgcggaggactacgcagaaggggtgcgcgtactgggcccccggccgactacctggtggtgaatgtgtccagccccaacactgccgggctgggagccttcagggaaaggccgagctgcgccgcctgctgaccaagcctgtctggacagcgggtctctgtggcataggagagtagtggaaacagactgagcccggccatcgtgggttcaaatcctggttccaccacttactacctgggggcctcagacaagacactgtaattgggttgtgccgagttcccataattggggttggtggtgtgagcagcgggcagacgcgctggagaagatccgggcaggggcctccctggtgcagctgtacacgccctcaccttctgggggccacccgttgtgggcaaagtcaagcgggaacggaggcccttctgaagtggttggtcagttgggacctggtggtctgctggtggtcgtttgggaatttccaggtaagaaatgccttaacccagtgaaagatctgctccagatgacccttaaaagtgactctaatgccaactacaaacacaacgacaccctaaactgtcgaccaaccactttactggtactctacaacaagacccatacactgttcgcaacaacaaccacaacccagaaaaaaccagaaaccgtgctcgtcacctaa

SEQ ID NO: 117351 - DNA, 841 bp, Homo sapiens
gagttcagtgagtggtttacctggaaatcttgacttcagatgacctgaaaacggtggcttatagaggtgagagaaaagaagacctgtaattatggcaacccattttaaagatagtttagggaaactgaggcaaaattattttctcaagtggtgctttaaaattccttttaacagaacaaatccccaaaccggggggaaaaaccctcatgacctttagtttacgatatcagtctatccgttttcagaaatggggaacgaggtttgcagtgaatggatttctcctttcagagctcgcttaggaagcctggcttgcttctattcttttctcctcctcccccctacttcaagcaaaagcacttgagattcaggaatgtttttaaattcaaatacaaagagaaggaaaggaagccaaacgacctgagacaggggttgtggcttagaacagaccaaggttcattcctcgagcctcctctctctcagtctccaagtgtccccccattcccgggtcccggtgcagatgatgctgtgctgcggtctgaagactgagcaacaggagtccgcccccctcgcagctccctccccgacccgctatctccagagtctgaatgagcatcttgagtgcataggtatagagcatttgctgcttcataccacgggtaccgagagacactacagctcaagtatttactacagctgcagcgttgatcaagctgagggagtaaatgaacatgtagcacgtgagagtgcatcaaaatcccccccttctcgcgggccacctttcctgagagaggggagtacggttcgggttgttatagattccacgaggcctgtgcatgcataa

SEQ ID NO: 117352 - DNA, 320 bp, Homo sapiens
ggagaatgagtgcaaggttttattgagtggaagtagctctcagcagatgggggagccagaggggagatggttttcccctggagtcaggcaacattctcgggatgtccagcagcttgtcttcttccaccagtgtgttcctctccccacacagaggcttctgtctctgccttgctagggtcttgggtttttataggcataggatggaggcatggcagccaggggtggtcttgggaaatgcaacatttgggcaggaaatgcctgtcctacctagtcggggggggggtggagccctaagcagggaccacgcccttctctacgca

SEQ ID NO: 117353 - DNA, 1212 bp, Homo sapiens
atgcctgtggctgcacagataggagaacctccagcccactcagataaaaacttgcacaaacctccagctcattcagaccaccctggcctgccctgtccccatcttgtgcctataaaatcccctgaggccctagtgtgcagagacaaaagtggctggacgtcgagagaaacacatcagaggaagaacacacaagtggctggatgtcaagaggacgtcgaggggagcatgctgacggaagagcacagtgacagatgccggcaggatggcaggccattggctggcagaatgatgtggagtttggccggggagaacttaaagaaaattaagggggaccttggcaagtgttcagatgaccctcatagatatatagaggccttccagaatttcaccaagatatttgaattctcctggagatacgttattttgcttttgaatcagaacctgatggacactgagaaacaggccactctgcaagcagcagagagatttgggaatgagttttgtatcacgtatagcatcagggaagggggtgactattatccatctggaagagaaggagtaccagtgagtaactctaaacgggatcccaatgacgagatggaagactggaaaaggagacactttcaggtgtgcataatggagggtttatgtaggaccaagaccaagcctctcaattatgctaagttgtccattattgaccagggatttgatgacaattctactgcttatctggaaagcttaagagaggacttggtaaagcgcacctctctgtctcctgattcagtcaagggacacctaattctaaaggaaaaatttattactcgggcagctcctgacatcaggaagaagttgcagaaattggccctaggaccagatagcacattagaggacgctcctgaaagtgaacaccgagaccctagcaggcagagacacaagcagctggaagttgagaggaacacatcagtggaagaagacacagtggctggacatcaagaggacacctgcggaagagctcaccgacaggccattgataggaggaatgacatggagtttggctggggcagacggaggagagactggaccactgagcagcccgattccaaaagaatagcaccttcccgctccatctcccttctggctcccccgtctgctgagagctacctccactcaataaaaccttgcactcattctccaagcccacttgtcctctga

SEQ ID NO: 117354 - DNA, 495 bp, Homo sapiens
ttatgagcttggagaatgagtgcaaggttttactgagtggaagtagctctcagcagattggggagtcagaagggagatggttttcccctggagtcggaccgctaggtggactgggctctcctctggctgccctagccaaatgtcgttctgctggtgggtggcctgctggtgtgctggtgcctcctgatgtgcttctcgccatgtccagccacctgtgtgtctgcctgctggggtcagctcagacaccctctcctgccaggggctgagcccacagtcaggtggccacaggatccacacctgcgtgcaagccaggagtggcccagtgggccagttgtgcagggcacctcctttagcacgggacgctgctttggggggatcgccctcgacacagcgcccctcccggcacctggccagaacctcccagggcgaaggtcggggccgagaagcttgtgagtaccggggcagtgagggagggatccctaagtgcagacgaaa

SEQ ID NO: 117355 - DNA, 564 bp, Homo sapiens
tcaaggcttctgaggctttttctgttcgggactgtatttcccagcggccaccgcgccagtccacttccggtctccggggtcgacgacatagcggggtaaggtcttcacgtctgaggaagagatctgtggctgcgggagatctctgcggattggggctccagcctgactgacccgacagtgcgggtggcctagggggaggcgctcagagtaggaacccgggggtgcagacgggatctgccggatccccaggcgtgtgtgtgcgcgggtatcagaggagggggattgtgagatcatgagtgacggaggggactgtgagtgtgtgcgtgaggttctatgcacaggcccgggagggcgtgtggacgcagcgcactttgctgagtgacactgtgccggtgcccctaggctcctgctgcttcctccctctttccgcttcacagctgcggggactttccacttaatagtcacaaaacaatttggcaaatcgttcacaccttcctgtgcgctctctttttcgaagctccttttcaaaacagggaagaatggagatggttggatgatctccat

SEQ ID NO: 117356 - DNA, 647 bp, Homo sapiens
cggaattcccggttcgacgagatcgagtgctttcccttcctggggatctggctaaaaagcgggttctgattctttaggtctggggtttccagagtccgcggctttgctaagaagccgcagtgatgttgacgcggctggtcctcagtgcacacctgagtagcacgacctctccgccctggacgcacgctgccatcagctgggagctggacaacgggctgatgcctagtcccagaatctggccccaggtgactccaacagctgggcaggatgtgcatgccatagtaaccagaacctgtgagtctgtgctgagctctgccgtctacacccacggctgtggctgtgtgaggaaaggacaagtctctgggttcagtgtagcagaagtggacaggctgcagatgtgcgtgtgtctgccctggtcccaggtcctagtgcagaagcctgggaccgaggacagggccattttccagaggagaaacaccctggcgggcgagcggccaaaccgatcacctgtccagctggagagcaggctgccagaaccgatgcttcctgctcagtataatggcggctacagcttctccttggccttcccatcgtctcctttggtcctgctgctgctggagtggctgagcagcgggcactgggtgtga

SEQ ID NO: 117357 - DNA, 686 bp, Homo sapiens
atgaattctgaagaggacacaaacatccaaaccatagcagtcaatgccttagcccttgatgttgctatcaacctgagattcggggatcaaggaaggacagagaccacctcgctcccgggactcgccagcgagggatgccgccggtcgccggggtgtcttctccaggaccaggagagaaatcctctctccgcttcacgacgcggccactcccacccctgagacgcccacctggcggactctgagggaggattcggctgcgtctaataccacctccacccctcatccctcacaatgcgcggaaaaccacaggcggctgtgcgcgcagcgtcggctcagccaccgcagctcctcccctgggatgaaaaagcactctgacgtcttgaaagctggcagctctctgtttggaaaatctctgcccagtgaaaaaaatgtaccgacaaagattactaagtaacacagtcttctgggaatgccttatcaatgccagctatttgaagagcacccaaaagtcaaactagtgctccgcgctggcagtctggaaaaggcagatgtatgtgagtagagaaactgatagacaactagttgctggccagttggcctgttttcgtgctacaagccttcagaaaacagtcgcctccttttaccacgtttctatttctaaaccaaaatgaaaaggacgtttgttc

SEQ ID NO: 117358 - DNA, 690 bp, Homo sapiens
atggggtttcgccatgttagtcaggctggtcttgaactcctgacctcaggggtcagcagcgcccctgccccgcctcccgtcaccgcatcctacctgcggctggtgtgggacgctggcagcctccgaaaagcgcggggactgacgtgcgcctgcgcgctgctgtcgccctcggactcgcgccgcagggagcgggcggcgggagaggagcggatccacttaggtcagcggttaaaacgtcgttacaagaggccaccccggcatcgcggggcctgtgggagtaatagtagtcctgacaaggttcttatgaagattaaatacgagaaccaggcaaagagcttaacgtggttcttggcacatgatggaaaaggaaagtcaagagaggctgaacaaagtctccagtatcccggtgtttgcagcaaaatcatgtcttgcgtgcatgaacaggcagtaccatggacagatccacagtgcatggttgccatccccactccgggcttgtctcatcactttgtgctcttccaagggctcaagtctcctctcctgctctgctacctgcaggctttcccacggctgcagctcctcctcgcctcagagctccaagagtcagaagacactcagattagtgaggctatggacaggccgctgtcctccaaggagggccagtggcagaggtgtgggatggagccttga

SEQ ID NO: 117359 - DNA, 930 bp, Homo sapiens
atgcctttcagccccaaggctgccacctgctcccttgagaggctacactctatacttcaggtggtcctaagggagaaagtgacccaagagctaatatccattagacattttagcagacatagccatagtgggtatcttggtttatctccagaaagtactaaaacccaggcccagaataaaactgaaggatgtcggaccggcactctcactgtttctaggcttccaggaggtcctggtgtcttagctgtggatctcccaatacctgcagaatatttttggcgtcacgaacaggattcaaaaaccaaactgtgccactttttggccacaaggacagggctggaaactcgaggaaatcccaaatccagggatgggaactccccaatatcactgtcaattcctacaggattgaacgaaggggacgaatgcagaaatgaagacaaagacaaaagatttgttttaaaagaagggagacaaaggagacacgttttatccatggacccaactccggcaccggtcatggactgggaaggcagccttcccttggtgtttaatcattgcagggacacctctctgattatacactcacgtttcaagggtgtcagaccacacagggacacctgccttggtccttcacccttagcggcaagtcccgattttctgaggaagggacaaagggggatgtgtcagggtcacaagacaattgtggggagagggtcagccgacaaacacgtgaacaaaggtctttgcatcatagacaaggagcttgctacacgtgccggaaatctggccactgggccaaggaatgcccgctgcccaggattcctcctaagctgcgtcccatctgtgtgggaccccactgaaaatcggactgttcgactcacctggcagccactcccagagcccctggaactctggcccaaggctctctga

SEQ ID NO: 117360 - DNA, 811 bp, Homo sapiens
atgccgcgacgttgcttgatcctctagagcggccgcaatacactccttgcttaaatttttaagtattttcgcgataactcccataaatttttaatagaagaaaagaggaactaggaaccccataaaccaaaccaaagctcttcccattcgtgaacccgcaccccgagtcaggattctcccctgaccaccctcccgtggtccctgcacaatctgggagagacacgacgctgcgggtgcagagctgcccagagagggctccaggccagggcaccgtcactgcgcagggaagagacaggacgcccgggggtccggctgccagcgcagccgccaatctgatggctgaaggggactgaggctgggctgggcaaggcgaacttggggcgcagattgtggagccgactgcggggaggcctgagtcccgccacagcctcttgccaccggttccaaccagccccttcccctctctcgggatgtcggacccggcactctcaccgtttctaggcttccagggggtcctagcgtcttagctgtggatctcccaatacctgcaggtcacagggccacagaggctgggcctctacgagcagaggacacagaagcgcgaagacgagaccagtaactccggctgcagcgagagacaaagaccccgccacatcccggaagccgccctttccgctccaaccgcgtgcctgattggacagttcccaggccagcgtctctgacttgttaacgtttaagatccctcgccctcacgccctgagtgacagaagatgtgaccaaatgctgggctgaatgaagaaagacgaattcc

SEQ ID NO: 117361 - DNA, 471 bp, Homo sapiens
tttcgtgcacgagacccttacaggttgtgggaggatgctggtcagggcttggtggggtgcacagctgccctgtcaccctgcagggaacacccggcatcttactattaatagctcctccagctcacaccttggaagagggtcctcagagggtgtctccccaccccccagccgcaagctggtggtacagattcctgagatcccctcccgacataccacagcagccttggcaaggagatccaggaaccttcaccgggagaagcttcccaggatcatcctcccactcagcaccgaggactgctgctgaggggagcacaggagccagcccggaagcccagcagggcttgtgaggaaggagcaggcccttcaccgaagatgctgctgacgtcaagtcagcacagaaggtctagagaaacctgcagaatcgtttcctggctgctctgaagagagtatccagccctgctgtgaaacttc

SEQ ID NO: 117362 - DNA, 1104 bp, Homo sapiens
gcggctacaatttcctgcgcgcggaggcggacgtcgcgcccagcctgtgcccacacattttcgtttagccaggcgccggacccagcttcagagcggctgaaatcttggagggaagaaaacacatcccaccctgcctccgggaaggggcctctcctggacatgtctcctgcagctgctgctgagccagatggggaccagcaggacagacacgtcagcaaactcatcctctgcttctttgtcttcggcgccgccttgttgtgtgtgggagtcctgctctccatctttgggttccaggcatgccaatataagcccctcccagactgccccatggtgctcaaggtggcggggcctgcatgtgccgcggttgggcttggggctgtgatcctggcccgctcccgggcgcaacttcagctccgtgcagggctgcagagaggtcagcagatggaccccgaccgagccttcatctgtggagagagccgccagtttgcccagtgccttatctttgggtttctgttcttgacaagcggcatgctcatcagcgtcctgggcatttgggtccctggatgtggctccaactgggcgcaggaaccgctaaacgagacagacactggcgactcaaagccccggatgtgtgggttcctttctctgcagatcatggggcccttgattgtgcttgtgggattgtgtttcttcgtggttgcccatgttaagaagagaaacacgctgaatgctggccaggatgcctctgagagagaagagggacagatccagattatggagcctgtccaggtcactgtagctgctcagagccgcaaggggctggaagttgggcagggtgggaggtcccatgtcaaagctgaagatgaaagagaaaccaggccagcagtcatccaacaagatctagtggccctgatgaagccagacaaaaatgtaatacagatgacacaggccagccaggcgaggattcaagtacagcacgtcacaggaccctgtcagtggccaccactacctggcaatcctgagatgatcaacaaaatcagaaaaggtccggatgacaaaatcagactccagaggaaggtggttcatgggtccacgtggatgtga

SEQ ID NO: 117363 - DNA, 593 bp, Homo sapiens
actctgtctacctttttgggctttttcagtgatgtttctccagcatttcaaaggcaccatggtatgggtagttaggaatatgtgctgtggtgccagactgtctgggtttgaatcctggtctactgtccactaactctgtgactctgggcaagttgctgagcctctttgtgcctcagtattgtcatctgtataatggaaatcgcggtagtgctaacttcatagagttttgtgagattaaatgtattaatacatgtacgacacttaaaacaacggttacttgtctattaaccatttggtatatgaaagagacaacaaacctggggtcagacactccactgcctgtgcatcttgcctgtttccggatccgccgtgtcacagacattttctatgtcagtgcctatggctctacccagtggttggcattttactttcggtgctacagagtggcagcaagctacactgtttctgtgctgaggttgttgtctgagagagatttatctggccctagcaaaagtatcggaaaaaaacaagtgcaagcacttccttctaatattggtttagttgtggtcaaaaacaggaattatgagtcatga

SEQ ID NO: 117364 - DNA, 87 bp, Homo sapiens
atgcggcccctgctctgcgcgctgaccggactggccctgctccgcgccgcgggctctttggccgctctttccaccttgctgcactaa

SEQ ID NO: 117365 - DNA, 819 bp, Homo sapiens
atgcgaagtttgattgtgaaggatggtgtcaagtctgcaaagaaaaatgtttctaaatcagtaaggcatattctcacattaaaatgggtggcagcagcacacgccagcgtgcaccgccctgagcatttcaaaaagccgaaaggggctgcggggataaagggaaggccaggacccacgataggaattgtggatggggtttctgtgcgtcaaagaggggatggtgacagcgttccagaaaaaaatcgtgtccacttatttgaaggcaagaaaaagagctggctgtctgttaaagatggtcatttggacagtgtccttgaatggccattttggacaaaactggttgtggtagccattggcttcacaggaggtcttgtcttcatgtacgtacagtgtaaagtctatgttcagttgtggcgcaggctgaaggcctacaaccgtgtgatctttgtacaaaattgcccagacactgccaaaaaactggagaagaacttctcatgtaatgtaaacacagacatcaaagatgctgtggtagtgcctgtaccacaaacaggaagttccggtgcaacaatcgatttctgtttaagcttcccagtttgtggtattttgctacagcagcagccctatcagaaagaatacgccttccccactccacaatactgccagcattctgtggcattggtgctgtttcctgcaataagcaataaactcagccttttcttaatgatagctcatgctagttatattggagatgccagcattcagcaagagcctgctggatttgccactcttttaaagctgtcaagaagaacttttgaataa

SEQ ID NO: 117366 - DNA, 1321 bp, Homo sapiens
cggacgcgtgggcggacgcgtggaggaaatcaagcaatgcaattacaatggtgtccttgaatggccattttggacaaaactggttgtggtagccattggcttcacaggaggtcttgtcttcatgtacgtacagtgtaaagtctatgttcagttgtggcgcaggctgaaggcctacaaccgtgtgatctttgtacaaaattgcccagacactgccaaaaaactggagaagaacttctcatgtaatgtaaacacagacatcaaagatgctgtggtagtgcctgtaccacaaacaggtgcaaattcactgccatctgcagacgggtggcccccctgaagttgtatcaatcttgaggaaccttggtgggagtttcttcaccgaagaatatctttctaagccctcagccactacaaatgacagaagtgatcttgaattatttactcccttcaggtcctcctttctcctacatgacacatttttccctgacttttgttcaaagaggaaaggagaaaaacaaacaaacagaccaaatgcccagggagcccatgaagtaatagcgtaaagtaaagtatgatatgggaaatgtgaagtttgcaagaggaatgatttccaagacaattaaggaactactggggggcaatgaatgcttttagggcagtaatcaaagattaaatggacccatgatactcttcttcacagtaacaggggaaaagttcaagaatacagacttgaattgcgatgtgtattacttctagggccttgtaatgttaactgtctcatctggaaatataataactaacatatttggttttaagcctgaaattgtctgcattatccctaagtcacattggaagtgaacttggaggatgcatattttgatatgctttgacagctaacagatttgtatggtttagtggagtctggttattttgacagatgcatgtttttttttaaatagatgcaatatacatttgaagacattgatatttggaattaattatgtttgtttaagtcacgcaaaagattttcagaaaatgttcggatataattagctctgttaaatacccacagaactgttatcaggtcttatatttattttcatctggttcctctaatacagtgctgtccaatagaaacacaacagccacaaatgcaggcccacaggatacaaaatatttaacttccccagtagcccctatttttaaaaagtaaaaataaatgtttttgtttgttaaaatgaattttgattttttaaaaacactatatgttatttcaacgtcatcaatataaaaaattgattggttggaaaaaaaaaaaaaaaaa

SEQ ID NO: 117367 - DNA, 318 bp, Homo sapiens
atggacagaggagcaatagtgagggacttggaaaacctgggtgaacgagcgcttccttataggatctctgcccacagtcagcagcacaacagaggcggaactcaggttatgggtctcccatctgcattgccacaaggacccagcaagacagtctctgcagatgtgctctgcgacgagaatgctgcttgtagttatgtgagtcgagctgtcttgtgcagccctagaggctatgacacgtatccgaaattacggcaaggcgctgatttgaaacctgacagtggtgtgcgagagccagcttttggctggctaatggagtga

SEQ ID NO: 117368 - DNA, 1020 bp, Homo sapiens
ttttttttcctacaatcaagtttattactcaaagcaaaagttgtccatataatacattggtcgtcaatttttatttccacatggttacacaggctgaatgactagctcacaatcccaggaggtattataagttttgctcttcaaaaaatggtgttactgttgtaaggggaaaagtcctcaatgacaaagaaatgacactaatgaaaacaaaatcaagaacgatccactggtactgcaggttacagagaagctgtcagtgagcagttccccacctctcgcaagcaaaggggatcaagggctaaaaataccttagaaaaatcaaacagcacctgcaacacatgcttatataaaggccaaaacttgcaaattcttcccttctcgtccatgctgccccaaaatgtgaaaggaattacatataagggttaaaattcggggaaatcttcccacttcttacctcttctttgtggaatataattttttctgcgaatgggaactgggacaatccctttcaacattcttttaagttcctgggtccaagagggtgtttgaacaaaaatcccctcctaaatcaacatctaatatctcgaaaacaagtgctcccacccatgcctttcaaacagctgcggtgggtgccataaaaatcccaccaagaaatacccgcctcttgttgtgcttgctgactgtgggccagagatcctataaggaagagctcgttcaccccaggttttcccaagtccctcactattgcttctctgtccctcagggccctctatcgtacgtttcaaagtagcagcagtcctctggccgctgcatggctttttaggattaaagccagctcgtagcggggcatgcctggaggatcggcgagtgcggctcggaagccaagcggttcccgggacgcgaagggacagtgacggcggggacagtggggacctagaaactgctgcgccggacggctcccaggcggcgaaagcacggtccgagagcgcgagcccgggcttaaaggcgctggcagctgcg

SEQ ID NO: 117369 - DNA, 478 bp, Homo sapiens
agtgccgcggaatttttgggaaccaacaacgaaacagatggtgagaatgtgaaggtcagattttcaccttgcattatgcacatgatttacagctgtgatggtttagcagttgctctgctacttgagatgatggagagcaggttcttttaactcaagttacagtcgatcctgggagagcaaggagccagcaagtctagacattccagagccacaggccctgggattctatccaagccacgagggattttatgtccctgggcttagattatggtgcgtcagggcagcctttcaccctttagcacagagctttgctgttccaaagaccacaaggggttttagacccttgaccctggacatatttcaagactcttttacattatgtcagaatgcaagccctgcctcagcttctcccaacactcagcttttcgcaacataatcccagcactttggaacgctgggtggattgcttgaacccagg

SEQ ID NO: 117370 - DNA, 1194 bp, Homo sapiens
atgtccagggtccaggatctaaaaccccttgtggcctttggaacaccaagctctgtgctaaaacgtggaagacttcatcaccctcacgacctggtgttgggtctgatcaccccaacaccgaagcttcttccactaaattatgcagacagctatttgcaacgagtatcttctacaggaacaaaaactcagttggctgctgaagaaccccgaagtgtgaggacacagcgttcggtcctttttgctcttctgtttcttccaccttgtgagaatacatcccgtcccacttgccccttctggctgtgtaaggacacagcaacaaagtaccatcttggaagcagagagaacagtcctcaccagacaccaaaatgctggtgccttaatcttggacttcccagattccagaactactgtaccacaagcatggcactcgcatctgctcagtttctggtgaggcctcaggaggcttttactcatggtggaaggcaaacaaggagcaggcagtcacatggcctgtaccatgtggaccaggcagcttccgcagccagaggagacccacaggcagagagctgcaggaaaccttccaagcatggaactgtctccagggcgggtcaccaggatgtaggcaaagtcagacagaatctactagaagcccagtgggggaacgcggatgcagagcgatacacgcggaggactttgaataaacacaatcaacagtgtcagctgagaaaagcttggcggtggccaggtggcctcatggacgaagagataatggaagtaatgacggtaggtgtccggggcgccagtggggagagaaaggaatatttctttgctccggcactggatctaatccctacttacagcacgctgctgtcagctggtgccaagcttagaggcctccgctactacatggataacacagttagcgaagcgtgcattcgaagacaaaagcaactttccattgtcacgctgaaaagagagggaaagaagtggagccatcccatgtcctgcaatatcatacaactaaagctgcaccagagttgccagggcctttggcagattgccaggcgatatcctgcaaagatgcccatctctgtgcatgctggtgaagtggcagtaagagagcagcaggacctacatcaaatccctggtgtttcagtaacagctgcaggaaccctgcaggttcctgtggaataa

SEQ ID NO: 117371 - DNA, 1800 bp, Homo sapiens
atggatgatccagggtgttattttgaggatcaggtagctctggccgtgaccagtaaaggtatggaagagatgattatcccaggcagtagtgttcatgatagtctcaagcagtgtggtaagactagaaaaggtgtaaagaggtctccaacaacagcagtggcaaacgggagtttctgtggcttcattagacaagaggctaacatttccaatgatcactggccatctttggttcaagaggctacaactgaggccttgaagctttgcttttgtccactggctgttcttttacaagctttgttacaattcaaacgcaaaatgggggcaagagagacacggcgtcttttggaaagagtggtatatcagcctgggtatcccaaatctattgcatcaactgcacgttggtacctactgagacacttatatgccaaagatgactatgagcttattgaccttactccatctggaagcatttctcttatcaaatcaatgcatttaattaaaaaccctgtgaagacctgtgataaagtttattccttaattcagagtttgacttctcaaatcagacatcgaatggaagatcctaaatcatcagatattcagctttaccatagtgaaacattggagcttatgctacgtagatggtccaagttagagaaagactttaaaacaaagaatggaagatatgatattagtaaaatccctgacatatatgactgtataaaatatgatgtccagcataatggttccttgaaattagaaaacacaatggaattatataggctttcgaaggcattagcagatattgttatccctcagatgagaacaccaacaggaagcctccagtcagctggctctcttccagctgcttattgtctcttattggcctgtgccataaggcttcagccccagtttagggatggattgtcagaaagagctccccaggagggcgtggtctttgtgcctgatatggtttggctgtgtccccaccaaaatctcatcttgaattcccatgtgttgtgggagggacctggtgggagaaagcgtcttgccgagttttataactgcagaatctgttttcaagcaccaagagggcaggccatgctcttgaaatctaatgatgagtcgatgaagacgccaccggatctctcagtggctctgagaccattcggatctgactggggtcctctagagtggacctgcagcatgcaagctcctcacatcagagacgtaaataaagcggatcggtaccggggatctctagagtcccccgagtctttttataagtatatacttgcaaacatgagagcatttttaaaagttaagtgctacactaacgatgtatactgctgtaagcatttttgttacaatcatgtgaatttgaaaacaaacatttctggaaaaatttgtgcctataatacaaataataaggaagagagccccctgagtgtgtctagcccagagggtactggtacctggctgcattataccagtggtgtgggtactgggcgtcgaagacgcagatcaggggaacaaatcacttcttcccctgtctcccccaaatcattggctttcacatccagtatttttggctcatggcaacaggtttttaaactttacttcattaaacatttttcctccctgcattcagagcaacaaacagctgtctttgaggacatctatctacggtctgctgctgatctgacaggaggggcagctcaggtggtagtgcttgcttgctggctgctcacctcctgctgtgtagcccagtttctaacaggaatacacatatccaggggttga

SEQ ID NO: 117372 - DNA, 577 bp, Homo sapiens
tttttttacaaaagaaagaggtttaatcggacttacatttccacatggctggggaagcctcacaatcatggcggaagacaaacaggagcaatcacgtcttacatggatgacagcaggcaaagagagagcttgtgcagggaaactcccatttttataaaaccatcagatctcatgagactcattcactatcacaagaacagcatggggaacacctgcccccaaaattcaattacctcccactgggtccctcccacaacacgtgggaattcaagatgagatttgggtggggacacagccaaaccatatcattgttaaaaatgcaaattatcggtaccccagacctattaaatcagaaactgggaggcagccatatgtgcttcagcaagccctccaaccatttccaatgcttgctaaagcttaagaaccactgcttccggccacgttgggagggccaaggcgtgagccactgcacccagccatatactctaaaatctcaagtcagctgaagtctttcaaacttgaaataaatgtacatgagacagctacatttaagaccatattagaatagtcaaaactg

SEQ ID NO: 117373 - DNA, 1764 bp, Homo sapiens
atggccatagggagatgtgggtatgtagcctctattgaaatgggcctttcttcagaagagagggttcctcgggaaatcattaatattgtgctattatcatcatcccattctataggtggaaagcaggattatatcattttgcaagactatccagctgctcagacagcacgcagggctgtcagcacccaagtaagttcagagaccaaggacattctgatggagtgcagcaacaaaaccatctcacgattagaacaaccaccatactgcatttctcttattactggaggtccctcgcagctcctacccaactgcctcggaaagaggccaactgagggctctcaacccatgcagaagacatgggggtatgaagatgtagacaggcccagctgtatgccaagggactcagggatggacgactctccatccaatcagagggcaagtcacaagctgaatccacctgctcagaacagttgtcagatgagaacaccaacaggaagcctccagtcagctggctctcttccagctgcttattgtctcttattggcctgtgccataaggcttcagccccagtttagggatggattgtcagaaagagctccccaggagggcgtggtctttgtgcctgatatggtttggctgtgtccccaccaaaatctcatcttgaattcccatgtgttgtgggagggacctggtgggagttgtcacatggagacaagcccatcagggacaagactagaagtagacaaaccagtcaggccgagtcaagagagaggggctttgatgggatctgttggagaatatgacatgtgtccccttaagttaggaggacacactgaactggtgtctgactccttcctaggaaatattcagggcactgaactaggaagcagagatttagcaaagaaagcccatgctctcatgaaacttacttttggtaaacacagatttagcaaacacagacgagaacttcggacagagacaagtgctataaaacagcagaagcaagaaagagcatgggcggctgcagggaaggaaaccaaacaaaaagctttctacttagaacaagaagagaataaactgagtggcactgcaaagccaggatggtacccctggtgcactgatcccacacctacccctatgaataggcgaaggttacagccactacagcagaagaagccaaccacagtcaatgttgactacgcgtcaagttgccagaggccacaggaaatggactaccttggagaatcatccctgccaacatttctgaatggctatgtcactaccaatggggccacaacaacaacacttgcaacccaacctggacttcctttgaccaaaggaagaaatctatctttgcccatgtcagacgaaaggagtcatgcttttctccccatcattccaaacacccagagaggtcagctagaagacagactgaacaaccaggcgcgtaccatagctttccttcttgaacaagccttccgcatcaaggaggacatctctgcttgcctgcaggggacccatggctttcgaaaagaggaatcgctcgccaggaagttactggaaagccacatccagaccatcaccagcatcgtcaaaaaactcagccaaaatattgagattttagaagaccaaataagagctcgagatcaggcggccacaggaactaactttggcagtacacgaggttaaacatcaaacaccttacaagggagttgggagatcttcgaggaagagtagccagatgtgattcaagcattgtgaact

SEQ ID NO: 117374 - DNA, 375 bp, Homo sapiens
agagacttaatacaaactttggcaattaagacaggataccagttggaatggatcaaatattccatccacacgttaaacaaaagcaattgttatgcttgtgcacacagcaggccagaggcccagaatgtcccctttccactaaggtggtcctccagtcgaccaggcatgggctgcatggtagctcttttccaggattctacagcctggaatagtaagtcatgccaagctctctctgctatatcccgaagtctggcaccctgtgggtcagcccccgagggccatccagcttcagtctgccaacactaagatcacttcgtggccctcacgactggggaggagattaagcataccttggagacctgaagggatgcagtg

SEQ ID NO: 117375 - DNA, 507 bp, Homo sapiens
atgaccattcgatttagcaataaggagatcaataacgacctcagggagggcagtatcagcaggaggatcgtagaagttaaagacttaaaacaaactttggcaattaagacaggataccaagattcaaatgcctggttggaatggatcaaatattccatccacacgttaaacaaaagcaattgttatgcttgtgtgcacagcaggccagaggcccagactgtcccctttccaccagggtggtcctccagtcgatcacatgtggatttccaggattctacggcctggagtaacaagttgtgccaagctctctctctgctatatcccaaagtccagcaccctgtgggtcagcccctgagggtcatccagcttctgtctcccaacactcagttcactttgtgtctctcacaacaaggaggaaacttagcgttccttggagacctgaagggatgcagtgagcttaagaattttcaagagcttatcaatcagtcagcccttgttcatccctga

SEQ ID NO: 117376 - DNA, 374 bp, Homo sapiens
ggatcaaatattccatctgcactttaaacaaatgcaattgttatgcttgtgcacatggcaggccagaggccctgattgtcccccttccactaaggtggtcctccagttgaccaggcatgggctgcagggtagctattttccaggtttctacagcttggagtaataagtcatgccaagctctctctgctatatcccaaagtccctgcgggtcagcccctgagggccgtccagcttccgtctcccaacactaagttcacttcatgtctctcatggcagggaggagacttagcattccttggagacctgaagggatgcagtgagcttaagaattttcaagagcttatcagtcagtcagcccttgttcatccccgagg

SEQ ID NO: 117377 - DNA, 845 bp, Homo sapiens
tggtctacagctttactacaatatttgaagctctctcagaatctcctacagagcttataaaagcacagataactgttcctctatccagaagttctcattcagtagctctacgacagagcctggtaacttacctttctaacaagttcccagacaataaaatacctaggaatccaacttacaagggatgtgaaggagaactacaaaccactgctcaacgaaataaaagaggacacaaacaaatggaagaacattccatgcttatggataggaagaatcagtatcgtgaaaatggtcatactgcccaaggtgcacagtgcatgctgtcagtgaatcttccatgctggagtgtggaggacagtggccctcttctcacagctccactaggtggtgccccagtaggcactctgtgtgggggctctcaccccatatttcccttccacactgccctagcaaaggttctctatgagagcactgtgcctacagtaaacttatgcctggacatccagccttcttccaaaacctctcacaatggaacaattgctcctcctccatctaatgacaagaccaagatagctatcatagaagttaaagacttaaaacaaactttggtaattaagacaggataccagtatgcaaatgcctggttggaatggatcaaatattccatccacatgttaaaccaaagcaattgttatgcttgtgcacatagcaggccagaggcccagattgtcctctttccactagggtggttctccagtcgactgggcctgggctgcatgatgctaacactcctagattataacacatacatccaactgccaaaaaccctgataccaaacatctag

SEQ ID NO: 117378 - DNA, 867 bp, Homo sapiens
atgaaagggatggggagtatagaggaaatgtttgtagctttagactggtggtcaaggacatctcatggagaaggcatgtcttgccaagccatgaggacatctgggaagggagctacaggcagaggaaacagcaggtacaaacacctcggggtttctgcagttgttgcccattttcctcttggtcattgtgctggagacctctactgggaagcctggtggaagaacagaatcttagccaaacctgaactggggcgtagagcaggttattatctcaaaccctcaagttctcccccttttctaagccagttcccttcttctatgggggctgaggtttcagggacagaccctattagattatttgaaatgcgtttctttgatcccccgccacctgcaccttcctctaagccttcttccaaaacttctcacaagggaacaattgctccttctccatctaatgacacgactgagatagctatcgtagaagttaaagacttaaaacaaactttggcaattaagacaggataccaagatgcaaatgcctggttggaatggatcaaatattccattcacacgttaaacaaaagcaattgttatgcttgtgcgcacagcaggccagaggcccagactgtcccctttccactaagcagctgatcctccagtcgaccacacgtgggctgcatggtagctcttatccaggattctacagcctggagtagtaagtcatgccacgctctctctctgctatatcccgaagtccggcaccctgcgggtcagcccccaagggccatccagcttccgtctcccaacactaagttcacgacagggaggaaacttagtgttccttggagacctgaaaggatgcagtga

SEQ ID NO: 117379 - DNA, 375 bp, Homo sapiens; identical to SEQ ID NO: 117374

SEQ ID NO: 117380 - DNA, 864 bp, Homo sapiens
atgaaagggatggggagtatagaggaaatgtttgtagctttagactggtggtcaaggacatctcatggagaaggcatgtcttgccaagccatgaggacatctgggaagggagctacaggcagaggaaacagcaggtacaaacacctcggggtttctgcagttgttgcccattttcctcttggtcattgtgctggagacctctactgggaagcctggtggaagaacagaatcttagccaaacctgaactggggcgtagagcaggttattatctcaaaccctcaagttctcccccttttctaagccagttcccttcttctatgggggctgaggtttcagggacagaccctattagattatttgaaatgcgtttctttgatcccccgccacctgcaccttcctctaagccttcttccaaaacttctcacaagggaacaattgctccttctccatctaatgacacgactgagatagctatcgtagaagttaaagacttaaaacaaactttggcaattaagacaggataccaagatgcaaatgcctggttggaatggatcaaatattccattcacacgttaaacaaaagcaattgttatgcttgtgcgcacagcaggccagaggcccagactgtcccctttccactagggtggtcctccagtcaaccgggcatgggctgcatggtagctctttcccaggattctacagcctggagtaacaagtcatgccacgctctctctctgctatatcccgaagtccggcaccctgcgggtcagcccccaagggccatccagcttccgtctcccaacactaagttcacgacagggaggaaacttagtgttccttggagacctgaaaggatgcagtga

SEQ ID NO: 117381 - DNA, 1449 bp, Homo sapiens
ggcacgagacagctaacaaaatttgtggaaagggaactgttcaagcccgatgaggtacctgaaagacataattcatctttttttccaactgtaaatgatataaaaaatcacatccatgaggtacagaaatccttgacaaatggagatacggcatataactcatagattattccagcaacgcttcaatggactacagacagtgggaatattctcaaagagaccatgacagttacatttgcagaaggaaattcaccaggagaatcaattaccaccaaagtggaaacaaatcacaccaggggttctttgtctcctgagccaacccacttgctctcctcactctcctcatttcagcccaaaatatttacacaactacagggtttgcagttacaaccaaggtacacctctcctgatgaatcaccagctgtggtatcagtaaataaccagccgtcctctagtccttcaggacttctggatacaataggaagtgctgtaatgaataataattctctactgcttggtcaaagtcatagccttcaaagagatacatgcttaacccaaaacaatagtactgcctccaccatgggtaaccttccagaaccagatcaaaatctagttgcaatggacgagctggtagaagttggagatgttgaggatacagggaatctgggaagggaactgttcatcgggttctgttgggagatgtgaaggacctatttccaataccagaattattagacaagccactcagctcttattgaagaaaatccagaaagtaccatttctgtgagccaagttaaacaagaacccaaagaaccagcattgtctatggaagcaaaaaaaactgtggactataagaaattatccggcctacataaattattgaagccttttccagaatttaccaactctggtgaccttctgatgcccttagaaaggaaggtgaatatagtcaaagcgtggcattgagataattggactgaagacccagtttgatgagaagcttttatttaaaactgatatatttgttgcccagttcccatatttttaccttccttaagagatgttttactcttcttattttgtataatttttatgctctttgattatctaataaggccagtatttcaaaagctgttctgaatttatccacagtaatatagtctgaacacaaatagtttacttaacttatccttggaaatattcaattttggttattacaaaacagaaaaaaacaacagcaacaaaaacattgtgtgaatatatgtttgtatgtgtgtatgtatatcatgaattttttttttttaaggtctgaaaaggacttgttctctccttaaagttgtgaagaaattgttaattgccagacaggtaagaaaatgtttataatctatctcattaagaaagatgaagtattagattttacatcataacacaaagtccagcagctacatc

SEQ ID NO: 117382 - DNA, 189 bp, Homo sapiens
atgtcctgtgcagaaaagagccacaagccaaggaagacaggcagccactacaagctgaaaaaggaagagaatgatcatgaagggcaaatggcagtgaagcaagaagagctggcttcaggctcagaagagaatgctgtgcctcttcctcatggtttgcggtgccctgcatgttcagagaaacttctctag

SEQ ID NO: 117383 - DNA, 406 bp, Homo sapiens
agacaagctgggagggttcactgagccttggggacatgatcatgacttgggccaaggcgatcactgaaggctgtgagaaggccatgtgcttagctgctgccgcaaaggtgtgccggaggaaggaggcccctgcaggtccttcaggtggggagacgggcagctggtggcctctaggggtgaagccttggaacttggggtggccccaggctcctctacacttcaagtccactgtcccctctgtagcctcacagcatcccctgcaggccaggcagtgtgaggcacacctacctctagctttgtagagaaaaactcaaaaatgcacgctaacctgccacatgacccagaattcttctcctgtatatttagccaagattaatggtatactagaatgttccggacgcgtggg

SEQ ID NO: 117384 - DNA, 389 bp, Homo sapiens
cagggcggccattcagctatgcaggagacaagaatcgccagcttacccgttacagcgatacccgctggcatgaagattccgtgcgtaaccgctggttcagcgtgatggtggggccgtctgtgcgcgtgaatgaatggttcagcgcgtatgcgatggcgggtatggcttacagccgtgtgtcgactttctccggggattatctccgcgtaactgacaacaagggaagataccggatgtaccctttggatgtgccccgtgccccaacgaagaggaagaggcgcaccatgaaacggaaagtacaaaagtaccggacacccacccagatcccaaatagaatccgccaaatcctgcgggaaattgtaatcccattcaccagctcctacatttaa

SEQ ID NO: 117385 - DNA, 597 bp, Homo sapiens
atgtcaaaacccaacccggacccccatcccaattccaaagccagacccaaaacccgattcaaaagccagacccaaaatccaaacccagacccacttccgatcccaacgccgacaccggttccggagaaacgcattacgccttctacggcagccgtactcaatatggcagcaacattaccgttgacgctgaccggaatgacagtggggatcgacagccgtaatgatattcctgaaggaattaccacgctaggcgcttttatgggctattcccattcacatatcggttttgatcgcggaggacatggcagtgtgggcagttattctctgggcggctatgccagttgggaacatgaaagtggtttctatctggacggtgtcgtgaagctgaaccgttttaaaagtaacgtagcaggtaaaatgagcagcggtggagccgccaatggcagttaccacagcaacgggctgggcggtcacattgaaaccgggatgcgatttaccgatgtaagtacaaaagtaccggacacccacccagatcccaatagaatccgccaaatcctgcgggaaattgtaatcccattcaccagctcctacatttaa

SEQ ID NO: 117386 - DNA, 606 bp, Homo sapiens
atgattgatgtcttaggggcggagaaacgcagacggcgtaccacacaggaaaagatcgcaattgttcagcagagctttgaaccggggatgacggtctccctcgttgcccggcaacatggtgtagcagccagccagttatttctctggcgtaagcaataccaggaaggaagtcttactgctgtcgccgccggagaacaggttgttcctgcctctgaacttgctgccgccatgaagcagattaaagaactccagcgcctgctcggcaagaaaacgatggaaaatgaactcctcaaagaagccgttgaatatggacgggcaaaaaagtggatagcgcacgcgcccttattgcccggggatggggaacgaaccgatgactggatggatggccgccgcagtcgtcacactgatgatacggatgtgcttctccgtatacaccatgttatcggagagctgccaacgtatggttatcgacgggtatgggcgctgcttcgcagacaggcagaacttgatgtaagtacaaaagtaccggacacccacccagatcccaatagaatccgccaaatcctgcgggaaattgtaatcccattcaccagctcctacatttaa

SEQ ID NO: 117387 - DNA, 426 bp, Homo sapiens
atggggagaatactcaaggttcacacgacagtggccgtaggaagaagcgatattttttctcatcaatgcgatgagaaaacaaggttgaatgaaacattattcacttacctggtgcttgagtgtgtgggcctaggtgaggcagcatttgtttctgcaatgtctttcagcccctggcctccctctagcataaccccaccctacagcagcacacaacggtggcatcgagaggagcacatcactggaggaacacgcaggtggctggacattgagaggaacgcaccgacaagcaccagcaggccaaaaagccgccaatccactggcagagtgacactaagtacaaaagtaccggacacccacccagatcccaatagaatccgccaaatcctgcgggaaattgtaatcccattcaccagctcctacatttaa

SEQ ID NO: 117388 - DNA, 792 bp, Homo sapiens
atgcttcaaagcaaccgaaccgccgccagccattcaccatccatccagccagccatccagccagccatccagccagccaaccaactatccatccacaatttgtggacacaattccggcattcaaccaaaattccagttgaatgggtgaatggtgaatggctgaatggacgaatgccaggggatcaacatgaatggcaatgcaactatcagccagccatccagccagccatccagccagccaaccaactatccatccacaatttgtggacacaagtccggcaatcaaccaaaattccagttgaatgggtgaatggtgaatggctgaatggacgaatgccaggggcacgtcatgaatggcaatgcaactatcagccagccatccagccagccatccagccagccaaccaactatccatccacaatttgtggacacaattccggcattcaaccaaaattccagttgaatgggtgaatggtgaatggctgaatggacgaatgccaggggatcatcatgaatggcaatgcaactatcagccagccatccagccagccatccagccagccaaccaactatccatccacaatttgtggacacaagtccggcattcaaccaaaattccagttgaatgggtgaatggtgaatggctgaatggacgaatgccagggggtagtcatgaatggcaatgcaactatcaggtaagtacaaaagtaccggacacccacccagatcccaatagaatccgccaaatcctgcgggaaattgtaatcccattcaccagctcctacatctaa

SEQ ID NO: 117389 - DNA, 513 bp, Homo sapiens
atgggcgaagcgattgcagacggcattccgctgatgggctacaccacatggggctgtattgatttagtttccgcctctacgggtgaaatgagcaaacgctacggctttgtctttgttgaccgtgacgacgcaggcaacggtacgctgacgcgcacgcccttccagtcgttgataaacggtttctaccgcatctttaatcggctgggtcatcgggtagtaaaaaccgacgatatccggctgaatgccgaggaaaacgtttcgccaaaactcgtcgaacaagaacgcgccagcgatactgacattcttccagaaattaatcatatttggcccaaccgcatcgccggtcatatcccagtaatggtgaccaatcaccgccgtacccagcgtgtagaaaataaacagcaccgccagcggacggtaagtacaaaagtaccggacacccacccagatcccaatagaatccgccaaatcctgcgggaaattgtaatcccattcaccagctcctacatttaa

SEQ ID NO: 117390 - DNA, 676 bp, Homo sapiens
atggtgaagggctggcggccggtccggttccttttaagcatttgtggctatcttaaattccttttaaggttggtccctaatcggccaagcaccatcttattctccaattgggaatccccccctccttcaataagtacaaaagtaccggacacccacccagatcccaatagaatccgccaaatcctgcgggaaatgcctctgtctgaagtatgggaagacattttagcctgcaggctcatgcctatgcagtaccagagggaatgtggagggcgcttgccatgcaccagcagccctattctcacctgtgtgattatatctaactttagaattgcagccccaagatggttatctgaaatacaaacccacttgtttgcaactttctgcctacctccccatggcatttgtgcagtctttatgactgggatttggcctcaacgtttcctccaatatctcagtaacccagctggggatgagtctcacttggaaatgcagttcagctgtgctgatctcttccccagcttggaggaggcctgccttccctcaagctggccgcctggctggcttcctgatcatgctggacaatctaccctgtaaagttccacgttgtcagctgcccagacactgtgtgctgaaactgacaggacacaatgctcctggaacccctcggacgcgtggg

SEQ ID NO: 117391 - DNA, 324 bp, Homo sapiens
atggggccctccctgagaagcctcctggcctgcaagttcctgtgtgctcctgagaggtgggaagcagtggtggcactggaaaagttggccaaccagaccgttcagctggatattacggcctttttaaagaccgtaaagaaaaataagcacaagttttatccggcctttattcacattcttgcccgcctgatgaatgctcatccggagttccgtatggcaatgaaagacgtaagtacaaaagtaccggacacccacccagatcccaatagaatccgccaaatcctgcgggaaattgtaatcccattcaccagctcctacatttaa

SEQ ID NO: 117392 - DNA, 879 bp, Homo sapiens
atgagggatgaggggatgtgtcgagaatgttttcgtgcagagaatgaagagggtagaggaatgtcaggctatgttggtttcttcaatcaacccttatttttctttgctgtgaggaccaggaaggaaccaatctgtttaaaaactgttgcccgctggtggctcgttgccaggtctgagataacactggtggtccctctgagggctgaggacgcattccccgggaggggcatcccaggagaaggcagagtccaggaggcggatgttgggaagcaaatcctgaactcatcaagtcccatagcccctttgtctatggaccttctgccagcatcttctgtaagaggcaggattgatggcagcttccaggctcacttcttcccatattcatcatcagagtcaaaggggtacctctggtgtcaacttcagacaggactcgcattggcctatgttgatcccgtctgggtctcttgggccaatcctacgtggggcatgatgactggcctagttgggccacatcctcacccatgtaaacagatgtggggaatacctgctttgagaaataaagaagctgctgaatctacagaattaggctccacagaatcaactcctatgtgggtgttcccctgtggcacaatacaagttgctaaggatgcgatgatgatgatgatgatgaaacatggaggctctgtgtccacatcagaatgctctgcatccccatcagaacgttgtgtaccatggagaaacaatataaataaatcatgtaataaaatgacctttcccaaatcacgttttggcgagaagatgctttttacagctgtctctttgctctccctgcagatgccaacaacagtggaacttttacaagtcctactagaagtttga

SEQ ID NO: 117393 - DNA, 405 bp, Homo sapiens
atggtccccaaattctttgacacttctccagttgagagagccccagtcccagatgtgacaaacctgaagtcccatgagtgtgcctacttgctggcagacatcaagaaaaacacaaaagtgggcatttctgcttgggaagttaaaagaaatgacacttttatccacccagcttcacacaatgacgaatgcccccaaattcaggaaaaggattcagataccaggtccaatcatgcgatgcatctaactaaggacacaggatggataaaacaatgcaatgccttttactggctcaacgctacaccccagaccacagaccacaccaaagctttgcaaggccaaccaagagttcagcagttgacagagctcctatatttacagccaggaggcactgcaagcaaagcatag

SEQ ID NO: 117394 - DNA, 408 bp, Homo sapiens
cccacgcgtccgggaaaaatcaaaagcaaaatatgcaacaccactccctgccctccagtactcccacagtattatttattgaccactctgggtgtgcttggcttaacagacaacagaaaggaagtgaaggctcttccctgagggtttgctgatgcgattagagagccatttagaaagataactcgaaatctcagacagacacaggaatctaacttttattctggtgtcaaaaatgatttgaaaccttttttgtatgatgacgtttgtcagtactccttttattcctctcacagcagccggtgggcgtctccatgcctgatgcagacaatatagaatccaaatgcagttgcaaaggtgaatgacttcaggtggctttgcgccgccatcgtcatctgcacaaaatgtgga

SEQ ID NO: 117395 - DNA, 429 bp, Homo sapiens
atggcagtattcaagggctcacctgatgtagggtgccttaccagctgcccaggctgcagcttccaaagcacagcccactctttcccaaggctgtacctctgtcctgctgttcctgctaccctgaatgccattcctctctttgcatacctgacaaattcctattcatccttcaagaaccaacttcttctggaagccttgcttgacccccaacccttaaccacaggtcccttcctcatactgctcctctcacctgtgagcacagaccaggccaacaccaccactgctgagatccacagccagctcaccccacggctaaatctcaccatcctatcatcccagggggcaagtcttcagcagagggtcacgtaccatcgaaatcacaagtacggccagacccacccccaaaaggccgaaatagttgtcggctga

SEQ ID NO: 117396 - DNA, 5025 bp, Homo sapiens
gcccgggactatcccttcgcggtgtagcggcagccggagacctggctgaggaggcaaccgcgtagacacctccctgcttagaaaacaaacactgaaccagaccgatcccagttggagggttcgaaaatgttccagacagcctgtcgggaggggttgttgttgctgttggactaaatagctattcctgattggtcatgtatagggttttttaaggcgggtggggggaggagggggtagaggaaaggctccaaacacctgcaggttgggggcggaaagctgtttgcgattccctggactggttggtcggggacaggaggtaattcccagccattgacccccatttctctctctccctccctcttgccctgcctctttctctccacccctatctttcctggaaactcgctttgggcgcggcagatcgcccaggaccacaccgcagcgtaactgcaggcctctcagcgaaaaagggggaaagcaaagacccgggtgtgcatcctcttcctcggcttccgcccctttccggcggagtggagatcctattcagaggggccggtctctctaaatatgccccaggatgaccgagcggccgccgagcgaggcggctcgcagtgacccccagctagagggacgggacgcggccgaggccagcatggcccccccgcacctggtcctgctgaacggcgtcgccaaggagacgagccgcgcggccgcagcggagcccccagtcatcgaactgggcgcgcgcggaggcccggggggcggccctgccggtgggggcggcgccgcgagagacttaaagggccgcgacgcggcgacggccgaagcgcgccatcgggtgcccaccaccgagctgtgcagacctcccgggcccgccccggcccccgcgcccgcctcggttacagcggagctgcccggcgacggccgcatggtgcagctgagtcctcccgcgctggctgcccccgccgcccccggccgcgcgctgctctacagcctcagccagccgctggcctctctcggcagcgggttctttggggagccggatgccttccctatgttcaccaccaacaatcgagtgaagaggagaccttccccctatgagatggagattactgatggtccccacaccaaagttgtgcggcgtatcttcaccaacagccgggagcgatggcggcagcagaatgtgaacggggcctttgccgagctccgcaagctgatccccacacatcccccggacaagaagctcagcaagaatgagatcctccgcctggccatgaagtatatcaacttcttggccaagctgctcaatgaccaggaggaggagggcacccagcgggccaagactggcaaggaccctgtggtgggggctggtgggggtggaggtgggggagggggcggcgcgcccccagatgacctcctgcaagacgtgctttcccccaactccagctgcggcagctccctggatggggcagccagcccggacagctacacggaggagcccgcgcccaagcacacggcccgcagcctccatcctgccatgctgcctgccgccgatggagccggccctcggtgatgggtctgggccaccaggatcagccaggagggcgttcttaggctgctgggatggtgggcttcagggcaggtggggtgagaattgggcggctctgaagcaaggcggtggacttgaactttcctggatgtctgaactttgggaagcctttactgaccctggggctggcttttctgtttcctgtaccagtaggagatcagaaaaatggagcaaagtggtaggtactttttgtgaagacggcacggtcttccctcttccctcagtcccaaatccttcccaagtaagaggctggagttgtcactgcttttggcctggagtttgggatccctgtctttcctaagacctggggttgtcagctctcatctgaggcatccagcagtctctgccttgcctttagcccctcccaagctggctggggtggcctgtgtggccacttctgtccatatttataggtacccaatagctgcccatttcgtgagccccatcttcacccaggcctatgttgatccatccagcttgccagatgctgcagagtcacaagcctcgaggtgccttcttcagggcctggttgaagaagatgatcagtggacagtctgctctagatgagctgggccggagggtcaggaaacccagtcgcccttacttcttgccctggggatcaaagttctgctttctccccaatgagacttgccttcctaagcctgtggctgtggagaccatgtctgcagccctgagaaagccctgtcgggctttgtgtgaaggcagagaaagggacaatgatagtagagtgatatggagcaagagatattttgggcatgtgggcttcaactcctcgacatcactgttcatgctggcgagtgaatgccagtgtgctgatgggcgtacgctggtgctgagtagatgcgcagccccatctgtgcattctcctggatgcttagagggatttctttgctgtaagatgtctgtttgctgatggtctggtctatgttccgaattggagcacaaaacctgtcctatgaatgctttgcatttggaatttttgcttgacttcagttattggtggaatctttagcgctcaataggaccaggatccagcctcacttctagggtatgggaaatccaatcagagaccgaggccctggctaagacccaaacatatgcacattcacttagcagaaccttaaacacccctcagttgtgcagcttttggtcatcaagggtccgtctgggaggttggtttaatgcaatagaagtgctcccctctgaaagttgtacatgaaatttttgtaaatcacatccttatccttcatcttttaaagaaataaccactgcaagtccttttgtaaagtgaagaatccttttgtagaatgaaccactgccccttcattgatttcctgtgtcaatccagatggtgggatgtggttttcttaaggtgaggcctgtctgtgacctgcatctaagcccatgggacaaattgcacagaagtcctgtatgtctgtcattgtacccttaagtcaccctagccctctccctctaggctctgccttcgaggtcagaggagagatagcctgtggccctgtcctgccatgcaagaactcatcactgtggctgtctggaaagcccccccttatagtttgggcttcagcctagtggcttgtcctcaccatgatggggccctaattcagccatgtacagacagagaatatgtctgctcctttccccttccttttaagtaaggtccaattctcgagcttggggcaacattgattcacctttgtagcactcaggctctccattcaatttcaggctccccagatcatgttttggtgaaaattagggttggttcctttccaacgtttggaagatcctgtgaggagccccatctgtctaaagatagagtcattgctgtaggatctaaggctgtttgcttcaccgtggattcgcttgagttaggaatgagaagtagccacagtatggatgggtggatgggttttatgagatggatcacatattttattaagaactcaaacttctggctccctcttctttcagacttgccatgtgactctggcttggcctatctcctagggctatggtgtggactgaatgggatcatgaaagtagacagttttgagaacgtaaagaactttttcttttccctcaatctcaatcctgcagtggggtttcgcagcctgagtccacgacctaggcagtaggccggtgtgcctgactgcccagcatttgggtaatttagattgtaaaccgctttggcctgagttattgagattgtcctcatttctccagattatctatttgtgtgtgtgtgtgtgtgtgtgtgagagacggtgtcttgttctgtcactcaggctggagtacagtggtgccatcattgctgtctgcagccttgaactctgggctcaagcaatcctctcacctcagcctcccgagtagggaggaccacaggtgtgagccaccacacacctggctaatttttacttttttttttttttggtagagatggagtcttgctatattgcccaggctggtcttgaagtcctggcttcaggcaattctcctgcctttgcctccagaagcactgggatcacaaggtgtcagccattgcacccagcccagattgtcttaatttcctatcttgttccaaggccagggacagtaataagaatggaaaagagatatgggagcgctggcagactgtgtaaaatgtaatgcaactacccaaaacaagcctggtaggaaagggcaagtctttaggtctttgtaagaactaaagaagatctgtaatttttattttcaccctctgtaccccatgaccttatccttcctctccttccttgttacccatgaaaaactgggcaacattccaagaatagcatctgtacaaaggggaaagaacataaaggtaaaacaaaacaaaacaacattttgagaacaaagatgaccataaccactgaaggaaatcacatctttttaaggacaaattcatattcttttatttgttatgggcagatgacaagatgggtacaacctttattcttttccaaaataaaaccaaggggcacagcatctgtagtcagccgacaactatttcgggccttttgggggtgggtctggccgtacttgtgatttcgatggtacgtgaccctctgctgaagacttgccccctgcccgtgtacatagtgcaattgtttctgtgggcgggcccagtactttccgtcaacgttgtactgtatgtgatgaattgcgttggtctctgcatttttctgcagaagaggagtaaccgctcccaggtaccttgacctttgtacagcccagaggccaacactgtgggtgtgtgactctttagcaaaaaaaacccatgtggtgatgatgtgtatatatatgtgaggatgtatcgggaagatttctaaataaaagttttacaaaggggaaaaaaa

SEQ ID NO: 117397 - DNA, 288 bp, Homo sapiens
atgcccaagagaggaaagcgactcaagttctgggcccacgacgcctgctctggacaagtgactgaggtggattacgccaactcggatccagcggtcgtgaggttaaagagcaaatgtacaggaggattgcagccccctgttcagtacgaagatgttcataccaatccacaccgggactgctgcctactgcaggccaccaccctcaatctcatcttcattccgattgtcatgagaatgatatttactctctttactatcaatgtgagcaaggacatacggcatcattga

SEQ ID NO: 117398 - DNA, 1479 bp, Homo sapiens
aggaagaagagaaatctaaaagtctggaaaacatatttgcgctaataatcgatgaaaatttccttggctttgttagagatctagacatccaaatccaagaagctcaaagaacacctgggaaattcatcacaaaaagaacaccctctaggcacataatcatcaggttacttaaagtcaagacaaaggaaagaatcttaagagttgtgaggcaaaagcatcagctcaacgctgttcggcaggaagtaaaatctctttgtggcttggaagcctctcatgttcctgcagaggaagctctttctggggctggtgagccctatgacatcatcgacagcagtgatgagatggatgcccaggaggaaaacatccatgagagaactgtctccagaaaaaagaaaagcaagagacacaaagaagaactggacggggctggaggagaagagtatcccatggatatttggctattgctggcctcctatatccgtcctgaggacattgtgaatttttccctgatttgtaagaatgcctggactgtcacttgcactgctgccttttggaccaggttgtaccgaaggcactacacgctggatgcttccctgcctttgcgtctgcgaccagagtcaatggagaagctgcactgtctccgggcttgtgtgatccgatctctgtaccatatgtatgagccatttgctgctcgaatctccaagaatccagccattccagaaagcacccccagcacattaaagaattccaaatgcttacttttctggtgcagaaagattgttgggaacagacaggaaccaatgtgggaattcaacttcaagttcaaaaaaacagtcccctaggttaaagagcaagtgtacaggaggattgcagcctcccgttcagtacgaagatgttcataccaatccagaccaggactgctgcctactgcaggtcaccaccctcaatttcatctttattccgattgtcatgggaatgatatttactctgtttactatcaatgtgagcacggacatgcggcatcatcgagtgagactggtgttccaagattcccctgtcccatggttggtcggaaacttgcgcagtgaacagggtgtgcaagtcatcctggacccagtgcacagcgttcggctctttgactgtcaggcaccgtgtatgaaatctaacaatgcgctcatcgtcatcctcggcaccgtcaccctggatgctgtaggcataggcttggttatgccggtactgccgggcctcttgcgggatatcgtccattccgacagcatcgccagtcactatggcgtgctgctagcgctatatgcgttgatgcaatttctatgcgcacccgttctcggagcactgtccgaccgctttggccgccgcccagtcctgctcgcttcgctacttggagccactatcgactacgcgatcatggcgaccacacccgtcctgtggatctacccactagtcaattcaccatcttgttga

SEQ ID NO: 117399 - DNA, 1435 bp, Homo sapiens
agcggcctccggtgtgggatggccgcggagccgggcggagctggcttgcggctcccggggccggctctccggccggagacatggcccgggggcccggcccgctaggcaggcctcgccccgatacggtcgccatgcccaagagaggaaagcgactcaagttccgggcccacgacgcctgctccggccgagtgaccgtggcggattacgccaactcggatccggcggtcgtgaggtctggacgagtcaagaaagccgtagccaacgctgttcagcaggaagtaaaatctctttgtggcttggaagcctctcaggttcctgcagaggaagctctttctggggctggtgagccctgtgacatcatcgacagcagtgatgagatggatgcccaggaggaaagcatccatgagagaactgtctccagaaaaaagaaaagcaagagacacaaagaactggacggggctggaggagaagagtatcccatggatatttggctattgctggcctcctatatccgtcctgaggacattgtgaatttttccctgatttgtaagaatgcctggactgtcacttgcactgctgccttttggaccaggttgtaccgaaggcactacacgctggatgcttccctgcctttgcgtctgcgaccagagtcaatggagaagctgcgctgtctccgggcttgtgtgatccgatctctgtaccatatgtatgagccatttgctgctcgaatctccaagaatccagccattccagaaagcacccccagcacattaaagaattccaaatgcttacttttctggtgcagaaagattgttgggaacagacaggaaccaatgtgggaattcaacttcaagttccaaaaaacagtcccctaggttaaagagcaaagtgtacaggaggattgcagcctcccgttcagtacgaagatgttcataccaatccagaccaggactgctgcctactgcaggtcaccaccctcaatttcatctttattccgattgtcatggggaatgatatttactctgtttactatcaatgtgagcacggacatgcggcatcatcgagtgagactggtgttccaagattcccctgttccatggtggttcgggaaactgcgcagtgaacagggtgtgcaagtcatcctgggacccagtgcacagcgttcgggctctttgactggtgggcatcctcagtacccattctccctgagagcgtagttactgcttcccatcccttgggggcagcctcgagtgtagtccattagtaatcagattccagtttggacagggtggctggattgtatatctcgttagtaatgtacatgctcttcaggttctagggctcctgttaggggagggagaaatgttgaatcaagagggaaaacaactactatgatttataaacatattttaatgtaaaaatttgcatttaaaaa

SEQ ID NO: 117400 - DNA, 708 bp, Homo sapiens
gatcatcagtctgttagtccttcgctagcggctgttgcgtttaaacccaacccgcagccgctgctgcttcgccgagctcccggagctgggtgggggtgccccacgcctgaaagagagtgatggagtgcccagtgatggaaactggctcactttttacctcaggaattaagagacatttgaaagacaaaagaatttcaaagactactaagttgaatgtttctcttgcttcaaaaataaaaacaaaaatactaaataattcttctattttcaaaatatctttaaagcacaacaacagggcattagctcaggctcttagtagagaaaaagagaattctcgaagaattacaactgaaaagatgctattgcaaaaagaagtagagaaactgaaattttgagaacacatttcttcggctaaagctaaataacttgaataagaagcttatagacatagaagctctcatgaacaataacttgataactgcaattgaaatgagcagtctttctgagttccatcagagttcctttctactgtcagctagcaagaagaaacgaattagtaaacagtgcaagttgatgcgtcttccatttgcaagggttccattaacttcaaatgatgatgaagatgaagataaagagaaaatgcagtgtgacaacaatattaaatcaaagacattacctgatattccctcttcaggatcaacaacacaa

SEQ ID NO: 117401 - DNA, 729 bp, Homo sapiens
atgtacctggtttgtacattcacgctaaacaatgataagctcaagtctgatggtttaatagaatcttttcgagtggcctccattagtggccggattcccaatgctacaccgactgctggctgtccacatgatctgctccggttcctaattatctacagcgccggtgtggtcaaggcacacaggggcacatgttgttactttgatcagagcatgggcagtcactatgaatcacaggggtccagtggcagttggcagctgcactgtcactgggggtcattgccacttgccagggtgcatcaacactctgcgtccaccaagctatgggagcacaccaggtcctgggagtgtggctttgatgagggacaggaaaagtcccacatcaggccaatgcttgacttcacttgcgtcggcgtctcagacggcacggtgtcgggtttgagcacccaagatccaatgcggaagaagagggatcaggaagaggctctacatagaaccttgtggcgtacacctgcagctctgactggtgcccaatgcagccggactttcctcattcaagttggtgcctgcgtcagcccctctctttcagaggcacatgccatggcctccttgagaatctccagtggcctccgtgcccgaggcgagggcacaacacagatgtcctcggccaagcagagacatgggcccagtgacatcacattttcagatttttctgaaaagccagatacttga

SEQ ID NO: 117402 - DNA, 777 bp, Homo sapiens
ttttgaaatgcaggaccaaaaaatcaaattctggtttgcagacaggaaaaaagtatcaaaaaccagaattcctaacagagcagctagaaaggggcaattttataaaccttatcagctgaatatcatgaggtgattttcacctgattgcaaaactgccatagtttgaaacacttttcaatttaccagacacactctgtcaagacttcatatacttccaacttgcaagcctgtgttttgccttctccaacctaaaaaggaaaagctttaaacgatgaacttacattctattaaaccatcagacttgagcttatcatctgtttagcgtgaatgtacaaaccaggtacatttccaccaaacacatagaaaaatcttgtgcatcacagttcagctaagggtggtaagacaatccttacaatcctccttggatttcttttttaaagatgtcaaagaagcaggtaagcaacattgttcatttgttactgggtgttctagatcaaaccttcacaagctatatatatagcttcatatgctatagcttacaaatggggtaacaaagtaaaagaaaagaacaaattatactttgacactttatagtcaaagtataattaaaaaagaaatcctacagtgggtaatggagaaatagataatttttccagcagctatgcctgaaatttttggtatttttttccttgctaaatatgctttttttctttttttagtttttaagccaccagttttcagagttcaaagcacaagatttgagaataaaacagtaag

SEQ ID NO: 117403 - DNA, 480 bp, Homo sapiens
acatgcctaaaagctctcagtgggtcaatcacagcctccagcagtcaagagtttcttaattagtatccaagatcctgagaaaggtggcaatcaggaggccagaggctgggcctgactccgtgcagctcctcaaatccttcccggaccactctccacctgctgcccctgccatgaatgaggccagtcacccagactgtcctaacaaccagcccagcaccctaggaaaattcacccagcagatgccatacaaattttcagaagtacttaagcccacagtatcccagagctcaggtctaatgagaaagggagacaataaacagaaccaagtattttgtttctgctgcaggagcgggaggtgaggggtttcatgctgcaggagcaggagatgaggagggcacaaacagtgtgtatacgagtagctcccacctctctggattcttacttctgcagggttcaaggatttacattaggaaaccctga

SEQ ID NO: 117404 - DNA, 1098 bp, Homo sapiens
atgccgcgggtgccgggcatgggggctctgggcccgggccctggggtgcttggaggtgctgtggaggaggggtggggctggcttggagcccatgggattcgattggaggccatggaaacagtgctgctgagaacccaggtgcacaggcagctgctgcagtccccaccctcccttcttctggggatatcaggtctgctgattttatgtctgaaggtcatgggccactgtcccttccctatgcccttgaatctcttccatgggacctaccagggccagtgggtcggtggcatgcgccagggctacggcgtccggcagagcgtcccgtatggcatggccgcggtcatccgctcacccctgaggacgtccatcaactccctgcgcagcgagcacaccaacggcacggcgctgcatcccgacgcctctccggcggtggccggcagcccggccgtgtcccgcgggggcttcgtgctcgtggcccacagtgactccgagatcctcaagagcaagaagaaggggctgtttcggcgctcgctgctgagtgggctgaagctgcgcaagtcggagtccaagagcagcctggccagccaacgcagcaagcagagctcctttcgcagcgaggcgggcatgagcaccgtcagctccacggccagcgacatccactccaccatcagcctgggcgaggctgaggccgagctggcggtcatcgaggacgacatcgacgccaccaccaccgagacctacgtgggcgagtggaagaacgacaaacgctccggcttcggcgtgagccagcgctcggacgggctcaagtacgagggcgagtgggccagcaaccggcgccatggctacggctgcatgaccttcccggacggcaccaaggaggagggcaagtacaagcagaacatcctcgtcggcggcaagcgcaagaacctcatccccctgcgggccagcaagatccgcgagaaggtggaccgcgccgttgaggccgctgagcgggccgccaccatcgccaagcagaaggctgagatcgcggcttccaggtgggggccccagcacctgcatgctgacctggtccccaggacgcagatgctgctggcctga

SEQ ID NO: 117405 - DNA, 1637 bp, Homo sapiens
atggcgccggttgctggcccactcgccctcgtacttgagccgtccgagcgctggctcacgccgaagccggagcgtttgtcgttcttccctcgcccacgtaggtctcggtggtggtggcgtcgatgtcgtcctcgatgccgccagctcggcctcagcctcgcccaggctgatggtggagtggatgtcctggccgtggagctgacggtgctcatgcccgcctcgctgcgaaaggagcctgcttgctgcgttggctggccaggctgctcttggactccgacttgcgcgcttcagcccactcagcagcgagcgccgaaacagccccttcttcttgctttgaggatctcggagtcactgtgggccacgagcacgaagcccccgcgggcacggccgggctgccggccaccgccggagaggcgtcgggatgcagcgcctgccgttggtgtgctcgctgcgcagggagttgatggacgtcctcagggggagcggatgaccgcggccatgccatacgggacgctctgccggacgccgtgccctggcgcatgccaccgacccactggccctgggatcatcgtcttcattacctgcgtccatgttcttgaaaatcattgtattgtgtattttgtctttcttgttttgtttcaggcaagaaggcagggttctgatagctctgagaaaaatgcttgtgggaaggagtgcatcatcatctttgctgtttgggtgaccggccattcaagcctgggggctttggtaccggaaaaactgaggcaacgagggtctagaatagaaccccagcaactgcagcagccctaccaaatagtggccagcctgttaaaagaaaaacagcaaccagataaacaacaacaaaaacacaaaacccccaaagatcaggaactcaaatatcgaagggccaaggcgaatacaccggctcgtggagccacggcttcgaggtgctgggcgtctacacctggcccagcggcaacacgtaccagggcacctgggcgcagggcaagcgccacggcatcggcctggagagcaaggggaagtgggtgtacaagggcgagtggacgcacggattcaaggggcgctacggggtgcgggagtgcgcgggcaacggggccaaatacgaagggacctggagcaacggctgcaggacggctacgggaccgagacctactcggacggagagccggggccggaagccagggagctgcctgctgctgctgctgctgctgctgctgctgctgctgctgctgctgctgctgaagatggtttctgtgcagggaaccttggccggctctgcagctgcccgcctgcctggactctccgatatccactcctcagtgcacctgacacgcatggagccggtcctttcctggaagccagaccccaaacaaactggcttccccgaccagtccactcccatgtgggagcttatcctcagaggcactgggtcctctgcctccctcgggcggctcgcctgtttcaggcatggatgcctgggaagggagtgagacgcagcaatgacttgtgcttctgccgagaataaaaatcctgagcgtacgtgtgctctagtcctccccgcccgctcgctgcctccgagtctcatgaagaaagctcggaacacctgctccacgaaa

SEQ ID NO: 117406 - DNA, 933 bp, Homo sapiens
atgcttgttatagatgagcaaagaaagtggtttcctgagatggaatctactcctgttgaagatgccgtaaacactgttgaaatgacaacaaacgatttagaatattacataaacttagttgataaaatggtggcaattttgattccaattttgaaggaagtcctactgatagaggcaagaggcagacaaaggcctaggcagatagggaagggtccccggagaatctccaactcgccccacaagtgtttacatcagatgttttgtgcagataagggaacctgcacaggggacttgcctgagcatgcccgcagtgaactggaggcccacaagcactgggggaatggggtggagccaccaggaattcgtgtcttatgcaggggaggagcctggctaaggagcctagataaggagcaaaaaaatcctgcatcactactgtgtggccctagcaaacttgcacagaggggccgtgggaaccagcagcccacatccttctttggtgactgcacactgaccttggattcctggcatccagttgtactctttcaggttccatctcttctgcatacctcatgctcctggcacatttttgaatggttatgccaggtccagagcccaggaccccacaggatattttgtgataaggcggtagccttcaagaaagggtacactcaccagcagttttgccacgagagtacgccgaacaaaggagacaaggtcatttataacctgacacgtccactctattgctgtgtccagtttccaatggctggcacaggacctcacattctgtatttgtcccgattggctagcaacttagaactttttaaaaggggcaaaggcagaggagaacaaagcaaggaggaagtaacttgtggaatgctgagaaaggtaaaaacaccttcaaataaggaagaggaacaggctatgacctaa

SEQ ID NO: 117407 - DNA, 1989 bp, Homo sapiens
atggctcaggctgcatggccactgcttccatggccatcaccccaacactctgctcctaaccacggtgggacacctccggaggaggcagcactgcagaagtggcccccaggggctgtggaagcagaaggctttggaggaggagctgctctgcgccgccaccagggggcagtctatcatcccatcaaagagggtgggaggaaaaacgcctccatggcttgctgttgttgcctcttggagaggtgtaagctcaatcacactcgatctgtgctctccatttccctgggtggcaagaacactgggaaaatcatagctaaccttcttttggtcggggacacccttttccacctcaggtacttgctttcagctggggatgtgcctttccacagtgggaggcttggagggcgggacagtgctaagaagataggagccggcagcttggacttaggagagaactcagcatgggagggcagaggggctctgcggctgcagcgagctggagagagaagttctgttccttacgtacgaactgcctacaggccacctttgggcacgacctgttggtgggaacctagtgatagtaagatctcagtcacaggtttaccctatggcgtgtctctccaggagtctttgaacgggcatcgacagctttcccaagaagcgcttgatgatggggcggctcttggcaaacttgtccttcacctcaatttccagcaccgagatataaaggggggaaatgaaaaacaggtttcattcacaagaggctgcctggtaccattcagccaatgccattatttattactaatggaaattaaatggactggacatggtgctttctgtgtaaaagttctacctggaggagaaagagcaggcaagaagcaaatggagcatgtgaactatagctacttttccttagaaccttgcaatgtatgtgactttcagttcagagtgcccagaacacagaaggaagaaaagagctattattctaactttgccttctgcacgtgctttgttgataaactgtcatcttcagtgatgctcctcatctgtatatcttggtcaaccttggtcaaacttcaggagcccatatccaatcagtcaaagttgaaaaatgatgctaacagacaagtacaaggaacactttggcaagtgaatatcaaacacagagttggagagtctatgttccacacctcaccagcagccatcattgttgatcttcttcagtttggccataccattgcacactgccaatcgggacaaatacagaatgtgaggtcctgtgccagccattggaaactggacacagcaatagagtggacgtgtcaggttataaatgaccttgtctcctttgttcggcgtactctcgtggcaaaactgctggtcacagacaaacaaaaagacagcagtaacctctgcagacttaaatgtccctgtctgacagctttgaagagagcagtggttctcccagcacgcagctggagatctgagaaccggcagactgcctcctcaaaaggaaaactaacaaacagaaaggacatccacaccgaaaacccatctgtacatcaccatcatcaaagaccaaaagtagataaaaccacaaagatcgggaaaaaacagaacagaaaaactggaaactctaaaacgcagagcatctctcctcctccaaaggaacgcagttcttcaccagcaacggaacaaagctggatggagaatgactttgacgagctgagagaagaaggcttcagacgatcaaattactctgagctatgggaggacattcaaaccaaaggcaaagaagttgaaaactttgaaaaaaatttagaagaatgtataactagaataaccaatacagagaagtgcttaaaggagctgatggagctgaaaaccaaggctcgagaactacgtgaagaatgcagaagcctcaggagccgatgcgatcaactggaagaaagggtatcagcgatggaagatgaaatgaatgaaatgaagtga

SEQ ID NO: 117408 - DNA, 675 bp, Homo sapiens
atgggaaaaggccgtcgatcgctctggcttcttcctgctgatgggggaagtagcgggaatgggaacgaactccaagggacatctccccatgactatttttccattgcaattaagtccacgcacattgggttggaataccccaccagtagacagagtaacagagtcagcccccagtccaagagaattaggcagccacttgggctgccttctggatccatcactgaaagggggccaccaaacaacaggcagaaagggtacactcgccagcagttttgccacgagagtacaccgaacaaaggagacagggtcatttataacctgacatgtttactctactgctgtgtccggtttccattggctggaacaggaccacacattctgtatttgtcccgattggctagcaacttagaacttttcaaaagagacaaaggcagaggagaacaaaggaaggaggaagtaacttgtttccacaagttacttgctgagaaagagaacaacccccctttttcctttatctacccaaatcctataaaacggccccacccctatctcccttcgctgactctcttttcggactcagcccacctgcacccaggtgaaataaacagctttatggctcacacaaagcctgtttggtggtctcttcacacggacgcgtatgaaagaaacatttaa

SEQ ID NO: 117409 - DNA, 559 bp, Homo sapiens
aggttctcaacgtgtggccctgggaactgtagcatcagcatcaccagggaacttgttagaaatgcaaattcacagtcccaccccacaccaactgaatcagaaactccgggaatggggcccaacaatttgtgttttaacaagcactatagattatgatgtactccaaagtatgagaaccagtccttctcaaactttaatgtgcaaagggtacactcgccagcagttttgccacgagagtacaccgaacaaaggagacagggtcatttataacctgacatgtttactctactgctgtgtccggtttccattggctggaacaggaccacacattctgtatttgtcccgattggctagcaacttagaacttttcaaaagagacaaaggcagaggagaacaaaggaaggaggaagtaacttgtttccacaagttacttgctgagaaagaagggtgttcaggaatctctggccttaagaacagcagcagtagtagagacagcagcagcccagagtttggatgtggaccaaatcgggttgcaattatagcaatttggtctatctaa

SEQ ID NO: 117410 - DNA, 430 bp, Homo sapiens
atgaatggatatgaggtggctttggtggtctcaccttcaggaccctctggtgggttggatgtggaggacagtgacacggagagagctgccaaggctaaagggtacactcgccagcagttttgccatgagagtacactgaacaaaggagaccaggtcatttacaacctgacgtgtctaccctactgctgtgtccggtttccactggctggaacgggacctcacattctatatttgtcccgagtggctagcaacttagaactttttaaaagaggcaaaggcagaggagaacaaaggaaggaggaagtaacttgtggaatgctgagaaagtttccaccttcacaacggagtctccctccaaacacagtccctgcttctgtgtttctgcctaactacaaagagtatgacataaagattcagagcaaatgcagta

SEQ ID NO: 117411 - DNA, 768 bp, Homo sapiens
atggaatcaacctcggtgcccatccactgtgaattggataatgaaaatatggtacatatacaccatggaacactatgcagccataaaaaggaacatgatcatgtcattcgcagcaacatggatggagctagaagccattttcctaagcaaaatgccacagtagcagaaaaacaaatactgcgtattcttacatgcctgtttggagagttaagcaaaataaatgcatttgatactcctgattcaccgctcttgagaggcaaggagtttagtgactctatacataatacctttaaccatctgtggagaaccaaggaatataatgaagttggttgtttgctcctaaattcactggacaaagtgatgaaagaaaatgatgaacttaaaaaagggtacactcgccagcagttttgccacgagagtacactgaacaaaggagacagggtcatttataacctgacgcatccaccctgctgctgtgtccggtttccattggctggaatgggatctcacattctgtatttgtcccaactggctagcaacttagaactttttaaaagaggcaaaggcagaggagaccaaaggaaggaggaagtaacttgtggaatgctgagaaagatggggaggaaagccttcaaagaggaacctctactttacttttcacatccagataagcaaaagctgcggaaattcctcatcactacactggccctacaaggaatactcaagggagctctaaacatggaagcaaaaggatgccgtttaccatga

SEQ ID NO: 117412 - DNA, 1126 bp, Homo sapiens
atggtgggtcagcaacatgtgagcacagatgaaagcgcacggccgttcacggagcagctgaaggtgcagacgaggagcactggagggcgtgcagagcacaagagcccccttgcagccaaagccaaagggagagatccaagagaacatgtcggcagggcacagtggcaagcaaggtcaaatgccactcagaggcccggtgacaatgaccaccgcagcaaaggcgagaacagcagctttagcacagaccttgcgggacgaccacgtgcccatgagcgaaccagctgcctgaggcactgcagatgtcctggttggagctcaagggagctgtggagctgtggttttggtcagaagcagatggacgtctgcagggtctgcatagtactagcgagagctgcctgcctgcatggtggggcgtttcatctcttggcaaagctgcagcagacgttggcttcagagcaggcgggccaggagaggagctgtggccagacagccattgccaaggaagggtctggggctcgtagggtgccacagatacccacacccggtgcattttccacttatacccagacctatgcctacgggagctacatccctgccccacctcctccattccctgtccctgtctcacctcgggagcttcccactgggattgacaatgtggaactatggtctgcatttgggaagagggaggagcaggagggcttggcagttacccgctggctcctctccccaccacagaaagagtacactcgccagcagttttgccatgagagtacaccgaacaaaggagacagggtcatttataacctgacacgtccaccctactgctgtgtctggtttccattggctggaatgggaactcacattctgtatttgtcccaattggctagcaacttagaacttctaaaaagaggcaaaggcagaggagaacaaaggaaggaggaagtaacttgtggaatgctgagaaaggtaaaaacacttttaaataaggaagaggaacaggctatgacttaatgcttgcttgcaccagtataagcctgccggggcgaatagttacaagctcaggtttgactacattaagctcattaggcaagcgactatttattcctatttaaatgctcgtgcc

SEQ ID NO: 117413 - DNA, 441 bp, Homo sapiens
aaggagttcacaagaaactgatctttactcaacaaagttctacacaagtggaatctcacgccacctcggcgccaatccccagcacagcacagtaacaaatggacagacccgggaaaacagcagaagcttcttaaactctagatgcaggttacacggaaggccttacgggttaactcaggggttcactaattctactgtctccatgcagtcggggaaatggtggagcggctggcccagcctcgccggttatggcacccgcacatgcgtgtggccatgtgtgtccgtgtgagtgtacgcgtccctacgagggcccccctcctgacctgctcctccctcacctcatccgaagccggattcggtcagctgtgtaattcctccctcccacgtagctggcccaagtgggctgccagagatgaccctattagagcccaggggcccttg

SEQ ID NO: 117414 - DNA, 1680 bp, Homo sapiens
  misc_feature (1)...(1680): n = a,t,c or g
aaaactgagtaccctccgacagagcggngcaatttntcggggcggnccgaggaggatgctgaccttgggagtcgccctgtcagcacgcacatgcttgggacccactccacacactccctgccagctttgttgcagcctcagctggtggtgtctccgtccttatcctagcctagctcgcagggtgagaaccactggagtggctggggctggccagaggtcaccgtttctccttcctgtgtgctccagtggcttttgaagacactgggttgggacctttttcctgaagagagctgggtgtagccagagctactggcacctaccccgagcatctctctctgtaaagcagcttcaggggcagtccgtttctctgtgcttctgaaagcccccttctcacgtttcagggcccaagttttaaattcaaggccttgggcaaggggcgttttaattgatgatgacagaggacacaggtttttgccagcaaaaaggaaaaccaaggcttggtggaagggaaaggtggtgtgtcccctgttccctattccatctcccctgggacttcctgctcatcatagtaccaagtgaaccccagagatccctactaaactggggtcaggaaattcctagagaacctttccggaataagtctgggaacatggtccaaggtggaaaggggctccccctaaaagagggtgggggtgtagttacccacccagttggccagaaaacctgggccttgcaagacccccttagcattttttcccttttttttccttccctgctttctacttctttggggagccccttgtgttttgggagtctgactggagtctcgcatccctgggggcctgctccatccgatccctcctgggcgccagaccctccatccaagccctgtgtcttttccataggtcagggtcaggccctgcatctattccaaggggcactaaagtacacattccaataaataagctgggtgtccctgcacgcccaccccatgaaaactcgagcaggtctctggaagccatttgttaaaaaaaaaaaaaaaaagttttaaaaataccttttaattttctggtaattccagttctttgaaaacatcctctgcctgggtcttggggtgtgtggatggattggctgtctgatgggattggtaaccccctcgctactcaagatggggggatacaaaccaccttcaggggaaggggagcctgggttcttctcgttttccctttttttttttttttttaaaaaaaaaactatttaattttttaatttatttttggttgttttttgcacaatgaagtttcaagcttctcaaccttctcccctacccagggctgtggacccaagactggccttgagccacagtccctctttccctcctcaccctcgtctctcctgcgggctcccgggtctgtccatttgttactgtgctgtgctggggattggcgccgaggtggcgtgagattccacttgtgtagaactttgttgagtaaagatcagcttcttgtgaaaaaaaacaaaaaaaggggcggccgctttaaaggaaccgacctaacgaccgcgggcatgcgaagtcaaagcttttctataggcgccccaaaactcctttccctcggcccgcgtttaacaccgcccgacacgggaaaaagcataatcagcttgcgatctcgtgccaccccg

SEQ ID NO: 117415 - DNA, 1799 bp, Homo sapiens
atgcaggtcgctcagggattcaggctgattgaggctctgctgtctggaacagtggcctctgccaacttcctggcaggggaagacacagatggagcagtgagaagacaaacttgcacatatctgttcgggcagcagacgatgactgagcaccctgggctacgcagctgctccaggtgccagagagatccccgtgaacaagaccaagtccccaccctcatggagggaacattccagaagtgcaccatagggtcaaaggcaatgaagaaactccaagctctgggtccgtgggaggcacccggcaaacagaggagtcggcaagctaaccttgctattagcagcgatggagaagtgatgattgtctgcacagctgtcagaagcagctccccgctgcctggcaccagcacctggggaggggcgccactcatcggcttcacagagatgccccaggctgggaaagaaagaccagcaggccggaccttctgtgccaccactccctcgtccttagctgcagggatcttgcccttcatccagagactgagaccgggaagcgaggcccacctctgcacctgcccccatagctgggccttcgttcctcaaactttgctcaatgaggaagcccagggaatcctgtgggtgttggcaggtcctgtgggagatggtgtggtgacagcacttggccataccttacaggactccaaagggctactgcagacacatcccagagcccagggagcagcagctgttgtttctgcagcagagcggagcggccaggctgcagaggaggagctgagctcccatgttaaggatctttatgtcttcacaagagcctgtgaccagacctacacactttcaggggcagacactgtggttgcaagcaaagagaaacactttggctatggagctctaggttcgagggctgggctttatgatcagacctgggttagaatccggactctcacaccttctagatatgtgacctttgtcagtgacagcatctctgctacagactctaaagcggttgtgcataatggggacctacagactcctccaccagaaccctccccagcagacagcaactccccttcagttggtctgtgggcactcgaagctgtgtgcaaccaggccaatgaggtcgcagttcctgatccaggcttggactctgcactggaagcaccagccggcagtcttccttcccactttgcaccaacaccagtcaagtgcaggatgatgcagcaagaaggtcctcaccagatgcagccccccaaccttggatttcccagcctccagaacactgtgcttttcctctctcaccatccagccgtcaagggggcctgcagtcataagatcataaacatcacagcagcagcaacaacagcagccatctttcatggagcatctccaatcctaggagctgacatgagtgtgtctgggttcctgatccaaggagtcactttatacacagtagacaaaacccaaattgcaagtgtgagatgcatacagaaaccaaggctggcggcaacactctccatgtatcactcgccagccgtgcagtcctcactctcttgcccaggtaagctggggcagagcctgctgcagcccaactctggttgtgggaagggctgggcaccaaggagctgcgagcttacctcaactcatctcaccttcaccatggccggctgcgagggcggcccgtgcagtccgtgctcaggaggaagggaagtatcaccggcctgaactactactccccatcccctgcaactgccattctttctgacttgtctctagaaaaggccatgtga

SEQ ID NO: 117416 - DNA, 1833 bp, Homo sapiens
atgagtttgggagtcagggaggtaaaaggagccagacacagtgcagcccacacagctcctgtcacccttcatgtctcagtgcaagcatcagctttttcgagaagcctcagtgtagaaaggatcaagtcaaatccttccatcattgttcgcatttcgtggcatttatcactgatgcagatttctgtgcatttgtgtgatgatttcattcatgtttatctccaccagtggactacagctgtgcttttcctctctcaccatccagccgtcaagggggcctgcagtcataagatcataaacatcacagcagcagcaacaacagcagccatctttcatggagcatctccaatcctaggagctgacatgagtgtgtctgggttcctgatccaaggagtcactttatacacagtagacaaaacccaaattgcaagtgtgagatgcatacagaaaccaagattagtaagtggagactcagagaagtcaagcagcttccccaaagtcacacagctagaaaggtgtttgcttctcaagccctctgatgtccgtgacatctgcctgtgccccaaccctcagagaagcaaactagagggaccccaatatgttgatcctggtaaagaaaggtgcccttcttcccgaggctgcccgtgtcagcccctgcaggtctggatggtgctggcgaagacaccatggtttaggcttgtctgggcgggtggtcgtggaaatttggccatagatggaattgcaaaggttgcgttagttattcagtgccaatctgcctttaatgagacagggaatctgatgcccagacagggagaggactctatcaagggcacaaacccagcaatgggcggaactgaaacttggctggcggcaacactctccatgtatcactcgccagccgtgcagtcctcactctcttgcccagctaaagctcctcaactgcagcatcaacagatcagtgccgacctgttaaggccgtcgagagcatcaaatgctactgttcagcagctcccttttcatacaagaaaataccaaccagggggaaagcaacgaacaaaagcaggcagaggggacaggaggtggcctgacccagaggagttaagggtgaggcttgggcgcctggaggagaggggactttctgtcctttggaacaactctgacattgtgtctctgacccagagccctggggactcaaccctcagaccccgatctgaagggcctgaagctagaacgcggttatttactccttctcccatctacttctccctggatctcagcgcaggccagacaggtgctataacctttgcccagagatttggagccttcggtggtgagactgagtgccgacgaggaggagagcggcctggctgtctcccactgcccttgggatctggggaaggtcactccctgaccctgcccatggcctgtgcccaattctcacccatattctactcagagggtcctcagctatccagaaaaaagagagaggcaggcagcatgcccagccacattacagcacgaagcacacctccctaccaggacctgcttattggttccatgaggacatggttcttgtttcagtcgccactgtgttcccaggtcctagcagatagtccagcacttactagatgctcagtaaatgcttgtacagctaaatacgtcaaaggggaggaagatcggaaaatagaaagggctgtcctgcttacaaatcattttcacgtcaccctgctaataagatgtggctgttacatgtatagttttactaagtgtgagaaacccgagaatttgaggtcaatgctcacagcagagcggtatcacgaacccaggtctctctga

SEQ ID NO: 117417 - DNA, 497 bp, Homo sapiens
  misc_feature (1)...(497): n = a,t,c or g
ngcgggaattganattctgtcgccatgcaggaatncgccacgaggccttgagccagtcaccaatgccacaggaaagaggttttatggcaggcacacaaagaaacccttagatggctcagtatggacctcaacagacaggaccatccatgtcgcctcatccttctcctgggggccagatgcatgctggaatcagtagctttcagcatagtaactcaagtgggacttacggtccacagatgagccagtatggaccacaaggtaactactccagacccccagcgtatagtggggtgcccagtgcaagctacagcggcccagggcccggtatgggtatcagtgccaacaaccagatgcatggacaagggccaagccagccatgtggtgctgtgcccctgggacgaatgccatcagctgggatgcagaacagaccatttcctggaaatatgagcagcatgacccccagttctcctggcatgtctcagcagggagggccaggg

SEQ ID NO: 117418 - DNA, 486 bp, Homo sapiens
  misc_feature (1)...(486): n = a,t,c or g
cgaatggggccgccaatgccacctgtgaaccgtaaggcacaggaggcacccgcagcagtgatgcaggctgctgcgatctcagcacaaagcaggcaaggcagtttccccggcatgaaccagagtggacttatggcttccagctctccctacagccaggccatgaacaacagctgtagcgtgatgaacacgcaggcgccgccatacagcatggcgcccgccatggtgaacagctcggcagcatctgtgggtcttgcagatatgatgtctcctggtgaatccgaactgcccgtgcctctcaaagcagacggcaaagaagaaggcgctcctcagcccgagagcaagtcaaagaagcccagctcctccgccagtaaaggggagaagatcaaaaaggtgtacgagctggggaatgagccagagagaaagctctgggtcgnnccgggnnttcgaacgctgtgcacntcgaagggtatcaatggttctcaccac

SEQ ID NO: 117419 - DNA, 399 bp, Homo sapiens
  misc_feature (1)...(399): n = a,t,c or g
tttatgacgcaaggacagatgcccatcagtctcatgctggacatgtacaactaaaggcccttcggattaatgtccaacctgggcatggagcacagccagcagtttccctatggagccagctacgaccgaagaattacaaacgccatatggacggcatgtactggcccccagccaagcgccacgagggcgacatgtacaacatgcagtacagcaaccagcagcaggagatgtacaaccagtatggaggctcctactcgggcccggaccgcaggcccatccagggccagtacccgtatccctacagcagggagaggatgcagggcccggggcagatccagacacacggaatcccgcctcagatgatgggcggcccgctgcagtcgtcctccagtgaggggn

SEQ ID NO: 117420 - DNA, 585 bp, Homo sapiens
atgaagtgtcccgttaatgccctgccagtacagggtatcccagctccagcaggcctttacgaagaaaaaggcaatcacactaccacaaaaactgagaacctcctacctctggacttcctgcagtgcttgttaaaactaccgattctggggctcccttcagaattcttgaggtgggtccaggaatccgcatccctgaccacttccgcaggtagttttcatgcatgcaagctcaagtttgagaagcgccaatgtggagcatctgtgggtcttgcagatatgatgtctcctggtgaatccaaactgcccctgcctctcaaagcagacggcaaagaagaaggcactccacagcccgagagcaagtcaaaggatagctacagctctcagggtatttctcagcccccaaccccaggcaacctgccagtcccttccccaatgtcccccagctctgctagcatctcctcatttcatggagatgaaagtgatagcattagcagcccaggctggccaaagactccatcaagccctaagaatttacgaggctccgttattgatttacttcctccaaaaggaggaaatgatacttaa

SEQ ID NO: 117421 - DNA, 2302 bp, Homo sapiens
atgacagagtgtttagatagattcattgacagcatcgcggctgtcccaagatctaccaagtccactgtgcagaaatgtttgccctgccttagtgatggtgaagataagattcctgacttaattgcaattacctggacaccgaggcagggtgaacttttggaaaagaatgtaattagtgaaacaggaactttactgccaactccctgtctagataccagtactaaagagaccgctgataagtccacatctgggaaaacaatccatcagtcgataaaaacagttcttaaggatctgtctggctccattgatgacctccccacgggaacggaagcaactttgagctcagcagtcagtgcatccgggtccacgagcagccaaggggatcagagcaacccggcgcagtcgcctttctccccacatgcgtcccctcatctctccagcatcccggggggcccatctccctctcctgttggctctcctgtaggaagcaaccagtctcgatctggcccaatctctcctgcaagtatcccaggccaagatcctggttatggaaactcagcaagtccatgggtcatgaatattctcagcgctgtttctagaggacagattccccattgctgtctggtggccaaggcctttgcgtttgaagaactgcctcagtgttctgagctactcttctccttcagaggtcactccacaccccaagtcagagagttcaggcacctcttagctgctcaggacttacaaggctgcagtcaagatgttgggcagcctgcatcctcatctggaggctcgactagggaacaatctacttccagtttcattcggattgtggcagcttcatctcctagcagttgctggaaattacaggttctgctcagtggagaggaggggattactcaccggtgttactcattggaggttactcgagggtgtgtctgccacagtagtcagatgcctccgcagccacccgggagccagtcagaatccagttcccatcccgccttgagccagtcaccaatgccacaggaaagagggacccccatgtcggcagcaggctggggcttcacagatgctcagcagagactgagccaaacaactaaagccatccagctctcacaccctgtcaaagcacaagacaaccgaactagaaaatctttattgtttggaattaagaaagcttacaattttaccaataaatactattcagagctcatgacgcaaacaagaccacaatctacgccttccattcccagtccactgccgttagatgatgctggcttagaaaggagtcagggaaatgtgtcagcttcctctttcatggtcttggggaacagggaaaggggagaagacacaactggggctggctttggtagaagtagaaataaggaagaagtaccatgcacgatctatgtcggagcggagtcaccaggatgtgctgatggatggatcacacttagaggaaagaaggaaagggtggccttgtgggcgtcccatgtgtctgagggagcatttggaggagtggcagtaccagttacagaggtagataagtctcaagacccaacaggtttgaaggagaaagtcagaggttctgctggggcgcagcagaatacagcgcaagcctgcagttgttggcagttgacctgttttatggcaggcacacaaagaaaccctcagatggctcagtatggacctcaacagacaggaccatccatgtcgcctcatccttctcctgggggccagatgcatgctggaatcagtagctttcagcagagtaactcaagtgggacttacggtccacagatgagccagtatggaccacaagatggggggggtgatgttagtgatgttgttatggccattgatgacgatggcagctgtcatttgttaggcagtgcggtgcctggcgctgtacttgttactttcaacctcttactcattatcgtagtcactttacagatgacagaaccacagttcagagagtacattactggggatcctctagagtcgacctgcaggcatgcaagcttggcgctggccgtcgttttacatcaggaaacagctatgaccatgattacggattcactggccgtcgttccacattcaggaaacagctatgaccactggccgtcgttttacaagcaggaaacagctatgaccactggccgtcgttttacaccaggaaacagctgtgaccttgattacgaattcgagctcggaaacagctatgacctactggccgtcgttttacatcaggaaacagctatgcccactggccgtcgtttaacaggtcaggaaacag

SEQ ID NO: 117422 - DNA, 5402 bp, Homo sapiens
ccttctcctgggggccagatgcatgctggaatcagtagctttcagcagagtaactcaagtgggacttacggtccacagatgagccagtatggaccacaaggtaactactccagacccccagcgtatagtggggtgcccagtgcaagctacagcggcccagggcccggtatgggtatcagtgccaacaaccagatgcatggacaagggccaagccagccatgtggtgctgtgcccctgggacgaatgccatcagctgggatgcagaacagaccatttcctggaaatatgagcagcatgacccccagttctcctggcatgtctcagcagggagggccaggaatggggccgccaatgccaactgtgaaccgtaaggcacaggaggcagccgcagcagtgatgcaggctgctgcgaactcagcacaaagcaggcaaggcagtttccccggcatgaaccagagtggacttatggcttccagctctccctacagccagcccatgaacaacagctctagcctgatgaacacgcaggcgccgccctacagcatggcgcccgccatggtgaacagctcggcagcatctgtgggtcttgcagatatgatgtctcctggtgaatccaaactgcccctgcctctcaaagcagacggcaaagaagaaggcactccacagcccgagagcaagtcaaaggatagctacagctctcagggtatttctcagcccccaaccccaggcaacctgccagtcccttccccaatgtcccccagctctgctagcatctcctcatttcatggagatgaaagtgatagcattagcagcccaggctggccaaagactccatcaagccctaagtccagctcctccaccactactggggagaagatcacgaaggtgtacgagctggggaatgagccagagagaaagctctgggtcgaccgatacctcaccttcatggaagagagaggctctcctgtctcaagtctgcctgccgtgggcaagaagcccctggacctgttccgactctacgtctgcgtcaaagagatcgggggtttggcccaggttaataaaaacaagaagtggcgtgagctggcaaccaacctaaacgttggcacctcaagcagtgcagcgagctccctgaaaaagcagtatattcagtacctgtttgcctttgagtgcaagatcgaacgtggggaggagcccccgccggaagtcttcagcaccggggacaccaaaaagcagcccaagctccagccgccatctcctgctaactcgggatccttgcaaggcccacagaccccccagtcaactggcagcaattccatggcagaggttccaggtgacctgaagccacctaccccagcctccacccctcacggccagatgactccaatgcaaggtggaagaagcagtacaatcagtgtgcacgacccattctcagatgtgagtgattcatccttcccgaaacggaactccatgactccaaacgccccctaccagcagggcatgagcatgcccgatgtgatgggcaggatgccctatgagcccaacaaggacccctttgggggaatgagaaaagtgcctggaagcagcgagccctttatgacgcaaggacagatgcccaacagcagcatgcaggacatgtacaaccaaagtccctccggagcaatgtctaacctgggcatggggcagcgccagcagtttccctatggagccagttacgaccgaaggcatgaaccttatgggcagcagtatccaggccaaggccctccctcgggacagccgccgtatggagggcaccagcccggcctgtacccacagcagccgaattacaaacgccatatggacggcatgtacgggcccccagccaagcgccacgagggcgacatgtacaacatgcagtacagcagccagcagcaggagatgtacaaccagtatggaggctcctactcgggcccggaccgcaggcccatccagggccagtacccgtatccctacagcagggagaggatgcagggcccggggcagatccagacacacggaatcccgcttcagatgatgggcggcccgctgcagtcgtcctccagtgaggggcctcagcagaatatgtgggcagcacgcaatgatatgccttatccctaccagaacaggcagggccctggcggccctacacaggcgcccccttacccaggcatgaaccgcacagacgatatgatggtacccgatcagaggataaatcatgagagccagtggccttctcacgtcagccagcgtcagccttatatgtcgtcctcagcctccatgcagcccatcacacgcccaccacagccgtcctaccagacgccaccgtcactgccaaatcacatctccagggcgcccagcccagcgtccttccagcgctccctggagaaccgcatgtctccaagcaagtctccttttctgccgtctatgaagatgcagaaggtcatgcccacggtccccacatcccaggtcaccgggccaccaccccaaccacccccaatcagaagggagatcacctttcctcctggctcagtagaagcatcacaaccagtcttgaaacaaaggcgaaagattacctccgaaagatatcgttactcctgaggcgtggcgtgtgatgatgtcccttaaatcaggtcttttggctgagagtacgtgggctttggacactattaatattcttctgtatgatgacagcactgttgctactttcgaatctctcccagttgtctggatttctcgaacttttagtcgagtactttagaaaatgcctgattgacatttttggaattcttatggaatatgaagtgggagaccccagccaaaaagcacttgatcacaacgcagtcataggaaggatgacagccagtccttggcagacgattctgggaaagcaaggaggaagatgctgaatgtattgatgccgccgaggaagacgaggaggatgaggaggaagacagcgagaagacagaaagcgatgaaaagagcagcgtcgctctgactgccccggacgccgctgcagacccaaaggagaagcccaagcaagccagtaagttcgacaagctgccaataaagatagtcaaaaagaacaacctgtttgttgttgaccgatctgacaagttggggcgtgtgcaggagttcaatagtggccttctgcactggcagctcggcgggggtgacaccaccgagcacattcagactcactttgagagcaagatggaaattcctcctcgcaggcgcccacctccccccttaagctccgcaggtagaaagaaagagcaagaaggcaaaggcgactctgaagagcagcaagagaaaagcatcatagcaaccatcgatgacgtcctctctgctcggccaggggcattgcctgaagacgcaaaccctgggccccagaccgaaaagcagtaagttttcccttttggtatccagcaaagccaaaagtcaccggaacatcaagctgctggaggaacgagcccaggagccgagacgagactcctctgtgtaccatcgcgcactggcaggactcgctggctaagcgatgcatctgtgtgtccaatattgttccgtagcttgtcattcgtgcctggcaatgatgccgaaatgtccaaacatccaggcctggtgctgatcctggggaagctgattcttcttcaccacgagcatccagagagaaagcgagcaccgcatacctatgagaaagaggaggatgaggacaagggggtggcctgcagcaaagatgagtggtggtgggactgcctcgaggtcttgagggataacacgttggtcacgttggccaacatttccgggcagctagacttgtctgcttacacggaaagcatctgcttgccaacttttggatggcttgctgcactggatggtgtgcccgtctgcagaggcacaagatccctttccaactgtgggacccaactcggtcctgtcgcctcagagacttgtgctggagaccctctgtaaactcagtatccaggacaataatgtggacctgatcttggccactcctccatttagtcgtcaggagaaattctatgctacattagttaggtacgttgggggatcgcaaaaacccagtctgtcgagaaatgtccatggcgctttttatcgaaccttgcccaagggggaccgcacttagcagcaagggccatagctgtgcagaaaggaagcattggaaacttgataagcttcctagaggatggggtcacgatggcccagtaccagcagagccagcacaacctcatgcacatgcagcccccgcccctggaaccacctagcgtagacatgatgtgcagggccggccaaggctttgcctagccatgggccagagtggaccgaaaaccgctcggaattcctttttgcacgagggccggttgcctggatatctcgatatcagctgtcctgaactctctggttgcatctgtcatctgtgatgtactgtttcaggattgggcaggttatgacataaagtgagaaggcaagcatgtgtgagtgaagattagagggtcacatataacctggctggtttctgttcttggttatccagcgtaggaagaaggaaaagaaaatctttgctcctctgccccattcactatttaccaattgggaattaaagaaataattaatttgaacagttatgaaattaatatttgctgtctgtgtgtataagtacatcctttggggtttttttttttctcttttttttaaccaaagttgctgtctagtgcattcaaaggtcactttttgttcttcacagatctttttaatgttctttcccatgttgtattgcatttttggggggaaggcaaattgactttaaaaggaaaaaagttgtgggcaaaaggatggctaaggtggcgaaaattttcaccacactgagttcaaaaaggtggaaaattatcccttttcccatggcgttttactcctcagagaatgaaaaaaactgcatcccatcacccaaagttctgtgcaatagaaatttctacagatacaggtataggggctcaaggaggtatgtcggtcagtagtcaaaactatgaaatgatactggtttctccacaggaatatggttccattaggctggggagcaaaaacaatgttttttaaggattgagaatacatacctgacaacgatccgggaaactgctcctcaccactcccgttcatgcctgctgtcgggcgttttgaccttccacgtggacagttcttcacaattcctttcatcattttttaaatattttttttactgcctatgggctgtgatgtatatagaagttgtacattaaacataccctcatttttttcttttcttttttttttttttttttagaacaaaggtttagtttttttttcatgagggggaaactacaaagggagggtaa

SEQ ID NO: 117423 - DNA, 183 bp, Homo sapiens
atgagtgtaaaagcatctagccaaggtggtagcagtggaattagtgaaaagtggtcgaattcaggatatattttgaaggtagaacagaccgaatatgctgatgaattagttgtggggtgtgagaaaataaataggcgtcaaagacgagagccaaagttttggcctgagcaacttgaaggatag

SEQ ID NO: 117424 - DNA, 183 bp, Homo sapiens; identical to SEQ ID NO: 117423

SEQ ID NO: 117425 - DNA, 283 bp, Homo sapiens
ttaggagacatttttcccagtatggaacctcagtccagagcccatgatcatggggtcaggatcatcactgtctttcacctccatattgtgtcttactaggtcttcaggggcaataacgtgcatggagctatcatctatggcaataatgctttcttctggaagatctgctgaagagaccttcccccacttcagactggaactttccctcttctggagttgttgctttccaccatacaagatgtcttgtgcttctgcatgttggcatccaggtgtattattattc

SEQ ID NO: 117426 - DNA, 954 bp, Homo sapiens
atgaagaactccttcaagtcagcaagaagacaggcaagccgagaggaggacgggcaaacgacctcaacagacactttacagaagagatatccaggccagggagcagcccttctgctgctgctgctgctgtttacggctgcttcaataaaaactgctaactccattggctcgcccttaccttctttcttgggtgaagccacaaaccctcctggggcagcatataatcaattaaaatgcaaacataagttaccaaaagacatgtacaagaatgttcctagcagcctattcataacagccagaactgggagtactccggatgttaccaagaggagaatgggggcttgcggatccagctctgtgcccggcccccctcttgcacacatccggaaagcagggcctccctcctctcctattcacccttctttgaagctggacccctgggcacggggcccaccaggagcaccgcgagaggtggaaacgcagatgaaagagcagctctggaatctcccaggcctgcgggcacgcacatccccgctccgcggacaaatggcagaaagacaactggatgcagcagaaaacacagcatcgttggcccaggtctccatggcagctaggaggggaaagagagccgctccccctccagccctcacctaccacggagcctgcaaaatgagtgtcgtatttctgtttacagatgaggaaacagagaagttaggtgccttgttcaatgccctagaggtagaatttagctgtcagcgccaggcgaatcgggtccctgtggcgggttccttctccccagccccctgctcagctgtcaggatggaggctagatgtcacctctgccgtgggccccccagaggggaggtggttaatcagggtgatgatgatgaagatggcaatgacccctttggggtgcacagccctttactactgacacctcctattcctgcttga

SEQ ID NO: 117427 - DNA, 384 bp, Homo sapiens
atgcactctttgaatctcagctttgctttgcagctgcatgactggaagctgctttttattgacattggtgttggtgatgtgattccagatttacactcagtttactccctgctcttgctggccctcagcactgtgcttacccaactgtgccaacagccccggggaggctcagacttcctcctcgccgaagcccaaggctgcgacgtgtctggaatgttccgtgtcacagagactgtcaagaatctgacagctctgctaacgaaagctgcagaccctcggttcggttccatcgccctttctctgggctggtgtgtgaagctccgaatctgtgacctcactagaatcagtgtgcgcaaggggatcagcaatgcagggcaaaggtga

SEQ ID NO: 117428 - DNA, 1458 bp, Homo sapiens
ttttttttttgagcattcaacagttttatttgctgttggggaatgaagggaacaggaaggaatgacatggaggggaaggaagctccttactcccgtcactaaggtagggcacgtggtacagagtggcttgtgtgaagcggccgccccaagctgagcctgcagctgataaccacagacaccctggcagggagatctgtgatcggaacaacaaaatgccaaggaaaacaaaacccatttgcatttggtatgaatttcctgtttaaataggttttattagcgggcaagaaaggaaaagtggtgacttcaaggtgtcattgggctggcaagggctcgggcccctggaggggtacagtgggggctgggccacactccctgctgcccgtttcctcctgggggcagctgcagcaacctcttggcttgtctgcttcctgtctcttacctaacagtcaaggctcactagaggagtcccgggccccctaggctggctccgggggaaaaggaatcaggcagaaccggctagtattatcccaaggagtgtggctgggcggagcttccccacagatctctgagtgtggggaggactggagaggcctcagggcagtcctgagagggggcagggcttacaaggggctgaagctgccctctgtggaggaggtcaaagggcaaaacctcagagccagtctactgcctggccttctcgcttcacaggctcagacttcctcctcgccgaagcacaaggctgcgacgtgtctggaatgttccgtgtcacagaggtgcctctggcagtgacctgcatctctcaccctcctccacttcctttgcctccgaaaagctcatgtcatggacgtgcaaaaggagacctcctgataaaatgccttctcagccccgactcctcacaaataaattaaaacccacaaaactgtccattccacaaatccacaggccaggagacagtttaaaatgaaaatgcatctttaaaaagtaatggaccactaacttcatgggctcacctcataaatgctaaaaaccaaacaaatcaccccaaatccaagtaaattagcctgattttatcacacaggaaaggactcaggcttctctccccacgtctgggctggcggcctgtcatccatcggacgtccctccccccaccccactccccagagcttggcaggaaattcgggggcagatgggcagtggggagctctctagaccattctcagataccacaggacctgcttctcagaaaggctctccccctgtaggcactgaccaggaaggtggatggcttatcagagatgcaaggtgacagaccccatgtgaggaaggccaagggcattttgtagttcaggcgatggaggcaccttgaatattttctcaattttgctttataaacagcaagtgccctaagtaccagttgatctagctttcgatcagccaaagaggccacattaatcataa

SEQ ID NO: 117429 - DNA, 3438 bp, Homo sapiens
atgcccgatgcgacgctgtcgcgtcttacgtgcctacaaatagtccgaaccgtaggccggataaggcgtttacgccgatccggcaattggtgcatgatgcctgatgcgacgctgtcgcgtcttatctgcctacaaatagtccgaaccgtaggccggataaggcgtttacgccgcaccggcaattggtgcatgatgcctgatgcgacgctggcgcgtcttatcagcctacattggtgccggatcggtagaccggataaggcgttcacgccgcatcggcaagtggttaaacccgctcaaacaccgtcgcaataccctgacccagccgatacacatcgtcgccagaccaaactgaacgtctttgcgttccatcaattcagcagcgtgaaagccccgcttttttcgcgccagtttcgaggccggaaccgggccgtaacccataatcgatgggtccaaccaacgaccgccatcgaacgcacacgagcgcgcggcttaagacctattcatgggcgcggctttcactcatcaccagcatggcagctgcgccatcgaaagtgcagaagatgtgcccgccgttaccataccgtttactggatcaaagccggacgcagcgtggcgagggcttccacggtggtttccgggcgaatcattcgtcaaagtcttccggaagaacgatcgatcagcctgggtcctgtaaagacggatgaaccgcgagccagacacaagccaccgtccatggggcggcgtacatccgggctgttgttcgggctggttcgggcgtctggtctgacaataatcgacggcagtacagaggcagacatgcggtggactgactttcagcaaatggaagtaattttcactcatctactcgttgtgattgttcataagtggctggttgcccttgcacggccgcagcttgctgctgtaggtcgatctagaggatcccctgggcgtgggatagcggcgattaagaatgcgaaaacgatgtttgctgcgacgcaaacgacagcgctgagaagaacaccgacattgccagctttaaatactgagcaattgctcatagagcgcatccagttccttcaacccatcaaggaaaatgcccgccgtgctgccagtgatttgtcagcaatttcgctgcccagcgctcgacgatatcggaggcctgttcaagcaaatggacaaacggcggataatcaggctacccaccagcttaaacagcagactacccagcgcgaccggcgggctgcggcattggcggcactgttgttgagcatgccagcagaccgaaccgaggttagcaccaatcaccagacagagcgccacggggaaggagaaatgcctgcggcggtcagagtcgcgagccggtgcgagggctaccagatcctgagcgacaaagaggtcaccagcatggtggtggcattactgctctgtaccagtgcgcaaggaagttctgagcaccgccctcccaacccaagacctctgcctggtatctccaggaggcccttgatcctcaagacagagcagctggaccaacaactcagcacagcagctgcccccagtgcatctacggaggctgcaggtccccgcagggccccagattcccaggccccacagaggcctgagcccactagaaatgatgtgcctcccagttcctccgggaggaggctggcagaaggattgggaaccagccgtggggacctatatctgctgcagggcgtgggcgtggagagaaggccagcaggctccctgccccccagcccttcccagctgaggcttctctacagtctcagcatgtttccctacctccaggtgggccatacttaccctgtgaccacatttctcgcgtgtggccggggtcgcgctttaccggtgtcggaccaccgcggctgggagcgccccgtggcaacaattcgccgggcaatctggcccttcacgagaggacgcacgttggcccaggcaccactcacatccccccgggtgttccccctattttcccacgcaccatcacttcagctaggctttcccccaatcaacaaagcgttctgtcaaagtaccatgactccacataagacagaaaacggcagcaatgccaggtcaatacgtgcgccgcagtcgcgggctttcacgatatgcccgagatcggaaatcaaaccgtcagagagatcgtggctgaatttgccagatcgcgcagtgcctgcccctgtaaaatacgcgggatggacggagatgacgtttgatcaagtagtccgcatctttagcatcggaacctgcaaacggttttgcaaaatcgccagcccggcggcgctatcgcccgtgtaccggtcacatagatccagtcacccggtttcgccccagagcgcccgtggatacccaacgtcattgatatggcccacgcgtggtatcgccgccaatgagttgcatatcgtaataattggaagatcaaacaaactgtcgctgaaggactcaagccacgcttcgtctactccggttaatgccagcgtcagccaggccggatcggcccccatcgtgccagatcgcttaggttcaccgccagtgctttataagccagatcagcagatcgatatcagggaggaaatggttacccgccaccagcgtatcagtgctatcgccagggtctgtttctcggggatattgagaagtgcgcaatcgtcgagatgcccagttcgacatcaagacgagaacttcttacacggtcaaaataagggcaatcagggagaactcgccacatgccatacgttatgcctcagcaggaaaaaagaaaaggccggcgatcatggaacggtcttccgtgaatctaccgcctggatatcactttttggcgaatcacaggtgctgctttatcgatacgccgttgacgaacttatggctgtcttctgcgccgaacgatttcgccgttcgatcgcttcgttaatggccactttgtatggcacatcgctacgtttgacagttcgtacagcgcaatgcgcagtactgctttttctacctgtcccattcttccagcaggcgggacaggtatggcttcatcagtccgtcgaggtatcggtattagtcgccaccccggccagcagctcacggaagtacaggacgtcacgtcttttacatcctgttcagccaggaactggtattcaacatcagcgagtcgttctgggacaactgccaggagtagagcgcctggacggcacactcagagcgcggcgacgagcagcaggtttcacggatttccccttactaatttcggccttgatggctttcaatacattaatcatttcaagcgcggtcagtgcacttctgcacctttgttgccagctttggtgccagcacgttcgatcgcttgtcaatgctttcagtggtcagaaccccaaaagcaaccggaatttcgctgtctggcaacatgcgcgggaacaaaaatatgtagtttag

SEQ ID NO: 117430 - DNA, 1229 bp, Homo sapiens
gaggacggctaccatgccatccacagtgttgccatccacagtgttgccatcactcctgcccacaacaggagctggctggagcatgaggtggattctgtgctggagcctcaccctttgcctgatggcgcagacggccttgggtgccttgcacaccaaaaggcctcaagtggtcaccaaatatggaaccctgcaaggaaaacagatgcatgtggggaagacacccatccaagtctttttaggagtccccttctccagacctcctttaggtatcctcaggtttgcacctccagaacccccggagccctggaaaggaatcagagatgctaccacctacccgcctgggtatatttgaaggctcccatgattctgaatggagtctgtgctatctggaaaggctggattgatctccaaagactgcatggtatgggctgtctggagtttgatgaggagcgagcccagtcctggccctggtaggcccatccacaatgctaggagggaaggcgacctagctgcagggagttgggaaacgtggccttgggagcagatggagactctcctggcagcatctatacccgaagatggaagctgcggtcccaaagggtaccggccccgccacctcaggaagccgaagatgccgagcctgtgctgcagaaacaccagcaccactttctcgcgggcggccaagtcagagccctcgtacgaagaagcagcgcccacgatgaaggcgcctcccgggaaccagaccatcacctggacgaagaaggccgggatctgagcggggcggaagtcgaagccagcatcgaaacgctcgtaattacatcgactggacaccgttctttatgacctggtcgctggccggaagtatccgcgcattctggaagatgaagtgggcatccgtccggcaccgggctatccggcctgcccggaacatacggaaaaagccaccatctgggagctgctggaagtggaaaaacacactggcatgaaactcacagaatctttcgccatgtgggcccgggcatccggttccggggttgtacttcagccacccggacagcaagtactacgctgtagcacaaattcagcgcgatcaggttgaagattatgcccgcccggagcgtcgaaaaaaagccgctcgccttttgcgcggggatcggcgttacgcactggtacagagcagtaatgccaccaccatgctggtgacctcgtttgcgctcaggatctggtag

SEQ ID NO: 117431 - DNA, 1512 bp, Homo sapiens
atgaagaaatccatatgccctgaagttaccatcctagagacatcatttggagagactacagtgcacagaagtagagaggcccagctgtgcctgtccccaactgatggagtcttctcagtgtcagtcaccagacatttaactgtaaaacagcctcaggcaggtccttcaggaggcattccagaagaagaaggcattgttatcataggagatgacagctccatgcatgttattgctcctgaagaccttccagggggacaagaggtggaggtggaagatagtgatattgatgatcctgaccccattattcagcagatagggccccaggaggaggcaggtaaatggtattttcaacaattagaaaactgctataatgatccagggaaattggatgagggcctgaactactgtaatggtattaagattggaaggaaatacacacttttgagtcacagtttggtgttagaattgataggtcttggtgatccattaggactcacacttcatggcagtgggcaccctctggcccagggcaggtccagaaatgccatccaagagtcaagacctggaatcagggacctaagatcccacttggtgcttaccccactgtggcccatgctgatacctaagatcacctgggtgtcactgctgcttgttcaggtcccaaaggctcttcggttagcaggtgataaatactgccagcactgggccctttccttcaaggcagcaggttcccttctggcccaggtggctgagctggtctccaagaggcaagacaaagccctctctacactttctgttcctctcctcaagcagaagaaaggaataaagaggtctcttttggagccgctgtgcaacctggtgttagaggagggtgcccagatatactacctgcaccacatcgctgctgctgcggttggggaaaagaacaaatctgtagatagtgctgaaaataagagtgagtgtgtcatcaacaaacagcagcttcctaaactatgtggaaatctgaaagcaaatgggttcatatcgatgtacaagccacagaggaactttatcctggaaaatgtacctgagcaagttacaccaaagactgttctggaagctaaagagaaaaagaaggtaaagccttactcaaataatattcatgttcttgatgccgctgcagccattcccattgctgtatccaattcaagtattcaccaggtcctcaatttacttgggatttccacaataaagacgtccttgactcatcctgaagtctttggtgaggggtcagttactgtggtagcccacatcctttgctatgcgattttgcagtttccctatcaagatgtgaagtgttttccttgcttcttgattctgaattcaggtgtcattgctttggccaatgggatgtcagaaaatgtgatgcagcagagacttgaagatgcactgcagagactagatttattcttttctgctgcagcaattgccatgaagttgcagtcccagcctagcctgctggccccaggatga

SEQ ID NO: 117432 - DNA, 354 bp, Homo sapiens
cagataccctagtgtactgtgcttcattaatgggcttaagcagcctgaggcctgttggattttcggggtgccggctgacaagtcctagggctgggctggtgcaaggctgcattagcagttcagtgcctggagatgttttcttgggcttgattcctacttctcccccctcagtaaaggaatacttggatgttttactttgaaatgctgggcctcgccgccaggaggcaacaaagtcaggattccagctcagctccgacacctgtggcctggcttttaacagtttagagggaggctcacaattaagaataaatgcagaaaaacgtttgcagcggagataaagagtgttgtgtgaac

SEQ ID NO: 117433 - DNA, 323 bp, Homo sapiens
catttcaaagtaaaacatccaagtattcctttactgaggggggagaagtaggaatcaagcccaagaaaacatctccaggcactgaactgctaatgcagccttgcaccagcccagccctaggacttgtcagccggcaccccgaaaatccaacaggcctcaggctgcttaagcccattaatgaagcacagtacactagggtatctgctttggttgcaaaaagcaatctggctaaagggatttgggacatccggctggtgaatgtaggggaggtttcacctttagatgaggcaccagaaacgatgtgctccctggtagcatcctga

SEQ ID NO: 117434 - DNA, 2094 bp, Homo sapiens
atggtgaaaggtgaaggtgaaaagcccgtggtgaaaggtgaaggtgaaaagcccgtctcacatggcagcagacaagagaagagagtttgtgcagggaaactcccccttataaaaccatcagatctcatgagacttattcactaccacgagaacagcatggaaaagacctgcccccatgattcaattacctcccaccaagtccctcccacaacacataacagctttctagctttcaccagaccctggattcccagtaataatgcatccttcagaccctttaagcctctggactgtcttcaaataaaatactggaaattgcagaggtctgactccctctcatcccagcccaccctcctccaggccacctggaaggagggagtcggtgaaccatctcttttcctgctgctctctttagcaggccttcgaacttcactgcccttgcagacccaagttttccacattaccaagcccagcctggccacccaggcacacagatttgagaaaaagaggccgaaggaccgcacaataatatgccggcaacgagagccatcccccatccctgccccgatacctgcgccgctcccggcactgcggatgcaggccccctcctctacctgttcctactcccacacaagcctgcaatgctccccagcgccgcagaaccacctcaacatccttagcctgccttggaagagctggcctgtggctcccgtcagtctcctctccatatctcgtcctaagctcttgccaggagcagccacatcactgctgtcctccctccacaccccggccctcctggtcccctcttccggggatgccatctgctactcacccggtcaggtccccgctcaaggggacctctcccaggaagactcctcagactcgcctccagctgagcaggttctccctccttcctcaggttcacacaacactctttatctcggctgcaaacgtttttctgcatttattcttaattgtgagcctccctctaaactgttaaaagccaggccacaggtgtcggagctgagctggaatcctgactttgttgcctcctggcggcgaggcccagagatggtccctgctccactggaaggcaatcagccagcaagacgccacctccacccagtcatcctcacacggggcactcactgtggtcagaagagaaatgaaaggacagtgactcgaggccaaaccaaagtgcttttccaggatgcagtgttgatttgcaattttcccacaagcttaggccatacctcattcatccccagagtctctggggacagtcggaaacaggccttcccaggagggccacgagcttccgccagccccgttctccaggatggggccagaacagcacctgcccgtggtggtgctgcctttcactggggcctttgctgtggtcctgccttgccccttcctagtatcatcgtctgcctggcatttcaaagtaaaacatccaagtattcctttactgaggggggagaagtaggaatcaagcccaagaaaacatctccaggcactgaactgctaatgcagccttgcaccagcccagccctaggacttgtcagccggcaccccgaaaatccaacaggcctcaggctgcttaagcccattaatgaagcacagtacactaggcccctcacaacaccactcacaatgtgtctgctcatgcaggctgctctgcggacactccttggagaggctgggcctgccaaattcagtgaccatcccagggaatgttggctgtccctccccacaggaattcacccagtggcctcctgtccttgtgctcatggtaaatccaagccccggttcagcagcaggggacttcccttggcttctccaacaaagtccttcgcagttaggccccttctcagacaatcttggaagatggagaagcaagaaaagaatggagagggagaatggaagaggtggactcagaaatgccgcatttgtgggtggagctggggctgggctttggttgcaaaaagcaatctggctaaagggatttgggacatccggctggtgaatgtaggggaggttttacctttagatgaggcaccagaaacgatgtgctccctggtagcatcctga

SEQ ID NO: 117435 - DNA, 1572 bp, Homo sapiens
atggtgaaaggtgaaggtgaaaagcccgtggtgaaaggtgaaggtgaaaagcccgtctcacatggcagcagacaagagaagagagtttgtgcagggaaactcccccttataaaaccatcagatctcgccacctggaaggagggagtcggtgaaccatctcttttcctgctgctctctttagcaggccttcgaacttcactgcccttgcagacccaagttttccacattaccaagcccagcctggccacccaggcacacagatttgagaaaaagaggccgaaggaccgcacaataatatgccggcaacgagagccatcccccatccctgccccgatacctgcgccgctcccggcactgcggatgcaggccccctcctctacctgttcctactcccacacaagcctgcaatgctccccagcgccgcagaaccacctcaacatccttagcctgccttggaagagctggcctgtggctcccgtcagtctcctctccatatctcgtcctaagctcttgccaggagcagccacatcactgctgtcctccctccacaccccggccctcctggtcccctcttccggggatgccatctgctactcacccggtcaggtccccgctcaaggggacctctcccaggaagactcctcagactcgcctccagctgagcaggttctccctccttcctcaggttcacacaacactctttatctccgctgcaaacgtttttctgcatttattcttaattgtgagcctccctctaaactgttaaaagccaggccacaggtgtcggagctgagctggaatcctgactttgttgcctcctggcggcgaggcccagagatggtccctgctccactggaaggcaatcagccagcaagacgccacctccacccagtcatcctcacacggggcactcactgtggtcagaagagaaatgaaaggacagtgactcgaggccaaaccaaagtgcttttccaggatgcagtgttgatttgcaattttcccacaagcttaggccatacctcattcatccccagagtctctggggacagtcggaaacaggccttcccaggagggccacgagcttccgccagccccgttctccaggatggggccagaacagcacctgcccgtggtggtgctgcctttcactggggcctttgctgtggtcctgccttgccccttcctagtatcatcgtctgcctggcatttcaaagtaaaacatccaagtattcctttactgaggggggagaagtaggaatcaagcccaagaaaacatctccaggcactgaactgctaatgcagccttgcaccagcccagccctaggacttgtcagccggcaccccgaaaatccaacaggcctcaggctgcttaagcccattaatgaagcacagtacactaggcccctcacaacaccactcacaatgtgtctgctcatgcaggctgctctgcggacactccttggagaggctgggcctgccaaattcagtgaccatcccagggaatgttggctgtccctccccacaggaattcacccagtggcctcctgtccttgtgctcatggtaaatccaag

SEQ ID NO: 117436 - DNA, 702 bp, Homo sapiens
tcagccctggtcagggtggcaaagggtctgtttgtctttccccattagacagaggtcttgtcctgctaccctcattgtaaagggctgcattttctcctcctgctcccgtatcttctcttcctgctcccgtatcttctcctcctgcctccacatcttgtcctcctgctcccgtatcttctcttcctgctcatgcatcttctcctcctgcctccacatcttctcctcctgctcccttatcttcagctcctgctcacacatcttctcttcctgctcctgtatcttctcctcctgcctccacatcttctcctcttgttgctggttcaggaggttccacaactcgttctcttccacctgggcttggagctttgctgacacactctgtagctccttacccaggcggtcagcctccacctgcagctgctgatgatccctagaccatggccccagccggatggggctcccacaacccccggggctgcagctgctcgcctgtggcagcaggagctgggccctttccagcttccttttaaggtcctttacgttgagctggatctcagacttttcagattctacaagtcgaagtttttcttgtagttcggcatttttctccttcaactcctcatcggttatgctgtaccccccacctcccagcacaccacccactctaagggcccccagacctcccattccaccttcccccat

SEQ ID NO: 117437 - DNA, 231 bp, Homo sapiens
atccaatgctgcttgaggtatcagtggcggatagggatgctgtttaaaccttttggcaggcccccattggtgaatcacagcagggggctctaggattttggagcaaggcccttcaatcttctgcagataacaactctcctttcaaatcaccatgcaacctgaactgcctatcatgaactgggtgctttctgtcccatctagccataaaatgggtcatgcacagcagcattc

SEQ ID NO: 117438 - DNA, 404 bp, Homo sapiens
ctaaaattccaggaacttctacctcagtaaaatttctaggggtccagtagtgtgggacctgtcaagatattccttccaaggtgaaggataagttgctgcatttggcccctcctacaatcaagaaagaggcacaacgcctagtgggcctatttggattttggagccaacacattcctcatttgggtgagttactcaggcccatttatcgagtgacccgaaaggctgccagttttgagtggggtccggaacacgagaaggctctgcaacaggtccaggctgccctgcaagctgctctaccacttgggccatatgatccagcagatcagccactgtgcaacttaaactgcctgtcataaactgggtgcttttctgacccatctagccataaagtggtcatgcacagc

SEQ ID NO: 117439 - DNA, 1078 bp, Homo sapiens
cctctgccagcgcctcttattggctgaacctaatgagaagccagggagcctgggaaatgtgatggctgtggcaagaatagaaattggaatctgtgagtattaccatgagaaaaccacagagaaagctctggacagccatggagtcttagctggatctacaataaaaggagtcagaagctttcagaggaatttggagctgaagttgccagcaacagagagggccacagctaacgcgatagagctgctcacagtgttagaccaggcctatgaaaactttgcaccgcagatcctccccagcactggcagccccacgtcccaggaaactgctcagttcaaggcaaaccagaacaaaccattggtcagaggaaaaggaagcccacatgaggccataagatatatttcagctgcccatcgagaatggaagccagcaatcctgacatcagccattaggtcattttgttctacctggctggtgttcacctccaagaactttcccaagcttgtgacccaacatggaagtacgatagcaggaaacgggcagagctcagatgagacccaagtccagggtgcagcctggaagtctgattccagaggaacaaagagacaaataccaacgtggattctggcagaggggaacaatgcaggtgcccaacttgacatcccaggcccaaccatccctgctcctaattgttccctgaaggtgccccagagctggagtaccacgcccagcatgccctcctcactagggaaggcctactggctcttggcctgttactgggccttggtggaaactgaacattggctatgggtcatcaagtcaccatgtaaacctgaactgcctgtcatgaactgggtgctttctgacccatctagccataaagtgggtggtgcacagcagcattccatcaacaaatggaagtggtatatacgtaatcgggctcgagcaggtcctgaaggcacaacattgcctctgaccaaggcactcactttatggctaaagaagtacagcaacgtgctcatgctcgtggaatttaccggtcttaccatgttccccgacatcctgaagcagctggaatga

SEQ ID NO: 117440 - DNA, 1419 bp, Homo sapiens
atggcacagtatcctattttggatttcctcaaagtggggcagttgttgggtaactgtgcattggggaaaggaaatgatcagacatttcggggattactggacactggctctgagctgactttgattccaggggacccaaaacatcattgcgatcctccagttaaatgtgcagccattgacttggcaaatgcctttttctccattcctgtccataaggcccaccagaagcaatttgccttcggctggcaaggccagcaatatacctttactgtcctacatcaagggtgtatgaactcactggctttgtgtcataatcttattcagagagaacttgattgctttttgactccagaagatatcacactggaccattacattgatgacattatgctgattggatccagtgagaaagaagtagcaaacacactggacttattgttctgggattacagacatgagccactgcgcctggccaactactccccttttgagagacagctcttggcctgttactgggctttggtggaaactgaatgtttgatgatgggtcatcaagtcaccatgcgacctgagctgcctatcatgaactgggtgcttgctgacccatctagacataaagtgggtaatgcacagcagcattggaagtgtgctgtgcacacttcatcaaatggaagtggtatatacgtgattgggctcaagcaggtcttgaagggacaagttgattatattggacctcttccatcatggaaagggcagaggtttgtcctccttggaatagacacttactctggatatgggtttgcctatcctgtgtgcaatgcttctgccaagactaccatccatggactcacggaatgccttatccactgttatggtattccacacagcattgcctctgacgaaggcactcactttatggctaaagaagtgcagcagtgggcatacgctcatggaattccgcggatcctctccctatattggcccagggcttcccggtatcaacagggacaccaggatttatttattctgcgaagtgatcttccgtcacaggtatttattcgcgataagctcatggagcggcgtaaccgtcgcacaggaaggacagagaaagcgcggatctgggaagtgacggacagaacggtcaggacctggattggggaggcggttgccgccgctgctgctgacggtgtgacgttctctgttccggtcacaccacatacgttccgccattcctatgcgatgcacatgctgtatgccggtataccgctgaaagttctgcaaagcctgatgggacataagtccatcagttcaacggaagtctacacgaaggtttttgcgctggatgtggctgcccggcaccgggtgcagtttgcgatgccggagtctgatgcggttgcgatgctgaaacaattatcctga

SEQ ID NO: 117441 - DNA, 755 bp, Homo sapiens
gactggcatccacaactgctccatcaacgagacctgcttcaacatccagggcggcttccgctgcctggccttcgagtgccctgagaactaccgccgctccgcagccacatgatcgtagggaactctgcatgaggccatcggtgcaggctggagaagagaaggcaagttggcaggagtggagaccacaggcatttgagccacttcctcatgtaacttaacttgtgccttcaggacctgctcaagcccgatcacgtatataccacttccatttgatgacggaatgctgctgttcatgaccaactttatggctagatgggtcagaaagcacccagttcatgataggcagttcaggtcatatggtgacttgatgacccagagtcaaacattcagtttccaccaaagcccagtaacaggccaagagctgtctctcaaaagaagagtagttatctgcagaagatggcagggccttgctccgaaagcctagagaccgccactgtgattcacctatgggggcctgccaaaggctgcagccagcatccttatctgccactgacacctcaagcaacattggatctgctgggtcatatggcccaagtggcagagcaacttgcacaacagcctggacctgtcatagagctttctcctgttttggaccccactcaaaactggcagcctttcaggtcactcaataaatgtgctggagtaacacactcaaacgaggaatgtgttgcctccaaaatccaataggaaaaaaa

SEQ ID NO: 117442 - DNA, 580 bp, Homo sapiens
caaatcaccatgcaacctgaactgcctatcatgaactgggtgcttttctgacccatctagccataaagtgggtcatgcacagcagcattccatcacaaatggatgtagtatatacataatcgggttcgagcagttcctgaagacacaagtaagccagaattcaaggtcgaggaatcaaggagtggaagtagaagtggcaccactcaccgtcacccctagtgatccattagcaaacgttttgcttcctgttcctgcaacattaccttctgctggcctagagatcttagttccagaggaaggaaggctgccaccaggagacacaacaatgatgccattaaactggaacctgagattgccacatggacactttgggctcctcctacctttaaatcaacaggctaagaagggagttgcagtgttgggtggggtgattgccctggactgtcaagatgaaatcagtctactactctacaagggagacctcaccgtcatggtagaagacaaggaagagcaaaaccacatcttacatggcagcaggcaaagagaacgagagccaagcaaaaccggaagccccttataa

SEQ ID NO: 117443 - DNA, 405 bp, Homo sapiens
atggaagacacgccgttggtgatatcgaagcagaagacggaggtggtgtgcggggtccccacccaggtggtgtgtacggccttcagcagtcacatcctggtggtggtgacccagtttgggaagatgggcaccctggtctccctggagcccagcagcgtggccagtgacgtcagcaagcctgtgctcaccacaaaagtccttctggggcaggatgagggtgacttcctgggccccacaaagtctggaaacccagaccccaagtctccaggccctgcaccctgcctggtgggcagcagtcggaatgaaactcctggtgccatgggagctccctccaggaacgggagtcctcccacggcgggattaggtgtgggagatgggaccggcagcccctctgaggccgtctga

SEQ ID NO: 117444 - DNA, 420 bp, Homo sapiens
  misc_feature (1)...(420): n = a,t,c or g
gacaccatagtgtctgctcctgtctcatgggctagacctagatatgtgactgccattaacttcaaggaggcatcccccacatctgtggaagtgagagagcccaggacgagtgtcaacaaggccctccaaagtcgctgtagtactcttgctcctacagttactttgacgagccagtggagttaaggaacagttctttctttaggtggaatcacagttcagattcctattggaaaaaaaagtccagcaaagatactgaaccagttctgaaacccccaggttattcagccaggtatgaatgcaaaactgtggggtcgtcctagtgaatccaggcatttctccgaaaaaattggtgatatcatgacgacataaaaacccttgtaaggnnnnnnnnnnnnnnnnnnnnnnnnnnnnnnnnnnncc

SEQ ID NO: 117445 - DNA, 464 bp, Homo sapiens
cacttgaaaggccttggaaatgacacacctcgtgtctgctcctgtctcattggctagacctagttatgtgactgccattaacttcaaggaggcatcccccacatctgtggaagtgagagagcccaggacgagtgtcaacaaggacctccaaagtcactgttgtactcttgctcctacagttactttgacgagccagtggagttaaggagcagttctttctctagctgggatgacagttcagattcctattatgaaacacatttgcttcacctcaaattagtttaacctaatttggctgtttttaattgcagacctactgctcgccgcaagccagattatgagccagttgaaaatacagatgaggcccagaagactttttgcaaaactgcccacaatctttggagcctaacatttccttttccttgtcttctctagtatgagaccagggcccgcctagagaggct

SEQ ID NO: 117446 - DNA, 1190 bp, Homo sapiens
ggcacgagcggcacgaggcgggcgcgagctacgggtctgcagcggaccgggaccgggacccggacccggaccgcgccgggcggaggctgcgggttctctctggccatctgctgggccggccccgggaggctctgagtaccaatgagtgcaaagcgcggagagccgcgtcggcggccacggcagcgcccacggccactcccgccgcgcaggagtcgggcaccatcccaaagaagcggcaagaagttatgaaatggaatggatggggatataatgattctaaattcatcttcaataagaagggccaaattgaattgactgggaaaaggtaccctcttagtggcatgggtttaccaacatttaaagaatggatccaaaatacccttggagtaaatgtggagcataaaactacctctaaagcatccttaaatcctagtgatacacctccttctgttgtaaatgaagattttcttcatgaccttaaagaaactaatatttcatattcacaagaggcagatgatcgagtatttagagctcatgcatgccatgatgatgtagttaagattgtgaatctagcttgcaaatataatctttgtatcataccaattggtgaaagcaataacatcaacatcaacaaaaaggacatcaacacaaaaaccccatccaaaggtcatcagcatcaaagatcaaaggtacataaatccatgaagatgaggaaaaaccagcacaaaaatgctgaaaattccaaaaacaagaatgcctcttctcctccaaaggatcacaactccttgccagcaagggaacaaaactggatggagaaggagtttgatgaattgacagaagtaggcttcagaaggtgcataataacaaactcctccgcgctaaaggagcatgttctaacccaatgcaagcaagctaagaaccttgataaaaggttacaggaactgctaactagagtaaccagtttagagaacataaatgacctgatggaactgaaaaacacagcacgagaactttgtgaagcatacacaggtatcaatacccgaatcaatcaagcagaagataggatatcagagactgaagatcaacttaatgaaataaagcatgaagacaagattagagaaaaaagaatgaaaaggaatgaacaaagcctccaagaaatatggaactatgtggaaagaccaaacctatga

SEQ ID NO: 117447 - DNA, 870 bp, Homo sapiens
ccgggtcgacccacgcgtccgaatggatccaaatacccttggagtaaatgtggagcataaaactacctctaaagcatccttaaatcctagggatacacctccttctgttgtaaatgaagattttcttcatgaccttaaagaaactaatatttcatattcacaagaggcagatgatcgagtatttagagctcatggtcattgtcttcatgagatatttttgctcacggaaggaatgtttgagcgaattcctgatatagttttatggccaacatgccatgatgatgtagttaagattgtgaatctagcttgcaaatataatctttgtatcataccaattggtggaggaacaagtgtttcatatggcctgatgtgtcctgcagatgagacaagaacaattatttctttggacacttcacaaatgaatcgaattctctgggttgatgagaacaatttgacagctcatgtataggctggcataacaggaaaggagttggaaagacagcttaaagaaagtgggttattgtacaggtccatgaacccagattcccctggagttccagtactgtaggaggatgggtatctactcgcgcatcaggcatgaagaagaatatctatggcaatatcgaggacctggagattgtgcatttttctgacaatgatttgtcctgtatagaattagataggctgattgaaatcgttctaccaagtagtggaattccactcttagatggatactcaacagaaattcacatgcctgtacacctagagacatctacaacaatgtgcatagtaacgcctatccatagtagtatgaaactggaaacacttcgaatgtccatgtctattaattgtcgaaaagataaactctga

SEQ ID NO: 117448 - DNA, 894 bp, Homo sapiens; identical to SEQ ID NO: 115010

SEQ ID NO: 117449 - DNA, 441 bp, Homo sapiens
tgacggtatggaaaaggtggatacagccatgaatgcaaggccgcacaaggtggatggaagatttgtggaaccaaagacagctgtttcaagagaagattctcaaagaccaggtgcccacttaactgtgataaagatgttaaagaagaactgaagaacataaactaagagattatattgaacagtatgggtggaggaaacttcagtggttgtgctggctttggtggcagaagtggtggtggtagatagggtggcagtgggaatggctataacagatttgataatgatggaagcaattttggaggtggtggaagctacaatgattttggcaattacaacgatcggtcttcaaattttggacccataaagggaggaaactttggaggcagaagctctggtccctatggtggtggaagccaatactttgccaaaccatgaaaccaa

SEQ ID NO: 117450 - DNA, 603 bp, Homo sapiens
cttaccacttgctgcatttacaccctctgcacctacatccactgcacctacaccctctgcacctacattcactgcacctacaccttctgcacttaccacttgctgcacttacatcctctgcacctacatccactgcatctacaccctctgcacctacattcactgcacctacaccctctgcacctacaccttctgcatctacatccactgtacctacaccctctgcacctacattcactgcacctacaccctctgcacctacaccttctgcgggaggaaattttggaggcagaagctctggcccctatggcggtggaggccaatactttgcaaaaccacgaaaccaaggtggctatggcggttccagcagcagcagtagctatggcagtggcagaagattttaattagggaggagtctgctactagtcttatcagctcttaaaaacagaaactcatctgtccaagttcgtggcagaaaggaacgtccttgtgaagacctttatctgagccactgtacttcgttatcactgccatgcagtttacatgagctgttctgcagctcaaattccattttgtgaatgggttttttttttttaataaact

SEQ ID NO: 117451 - DNA, 1134 bp, Homo sapiens
tatgaatgcaaggccacacaaggtggatggaagagttgtggaaccaaagagagctgtctccagagaagattctcaaagaccaggtgcccacttaactgtgaaaaagatatttgttggtggcattaaagaagacactgaagaacatcacctaagagattattttgaacagtatggaaaaattgaagtgattgaaatcatgactggaccgaggcagtggcaggaaaaggggctttgtctttgtaaccttttgacgacccttgactccgtggataagattgtcattcagaaataccatactgtgaatggccacaactgtgaagttagaaaagccctgtcaaagcaagaagagatggctagtgcttcatctcagccaaagaggtcgaagtggttctgggaaactttggtggtggtcgtggaggtgggtttcggtgggaatgacaacttcggtcgtggaggaaacttcagtggtcgtggtggctttggtggcagccgtggtggtggtggatatggtggcagtggggatggctataatggatttggtaatgatggaagcaattttggaggtggtggaagctacaatgattttgggaattacaacaatcagtcttcaaattttggacccatgaagggaggaaatttttggaggcagaagctctggcccctatgggcggtggaggccaatacttttgctaaaccccgaaaaccaaggtggctatggcggttccagcagcagcagtagctatcggcagtggcaggaggttctaattacagccaggaaacaaagcttatcaggagaggagagccagagaagtgacagggaagctacaggttacaacagatttgtgaactcagcctaagcacagtggtggcagggcctagctggcttacaaagaagacatgtttttaggacaaattactcatgttgtatggggcaaaaaactcggagggactgttatttgtggactaattggttattaacaggttattttagtttcccgttctgtggggaaagttgttaaagcctttccaacaaaggggttttaatgtagattttttttttttgcaccccatgctgttgattgctaaatgtaacagtctgatcgtgacgcttgaataaatggccttttttttaaa

SEQ ID NO: 117452 - DNA, 3857 bp, Homo sapiens
ggccgagcctcggcggcggcggtagcggcggcggcgacgctgacacctcccaccatggacagcttcgacttagccctgctccaggaatgggacctcgagtcactgtgtgtctatgaaccagatagaaatgcattacggaggaaagaacgagaaagaagaaatcaagaaactcaacaggatgatggcacgtttaattctagttactctctcttcagtgagccctacaagactaacaagggggatgaactctccaaccggatccagaacactttaggcaattatgatgaaatgaaagactttttaactgatagaaccaatcagagtcatctcgttggagttcccaaacctggggttcctcagactcctgtgaacaagatcgatgaacattttgttgcagattcaagagcccagaaccagccctcgtctatctgtagcactacaacttccacaccagcagctgtccccgtgcagcagagtaaaagaggcactatgggctggcagaaggctgggcacccaccctctgacggccaacagagagcaacacaacagggctctctcaggaccttgcttggagatggtgttggcagacagcagcctcgggccaaacaagtgtgcaatgtggaggtgggccttcagacccaggagaggccacctgccatggcggccaagcacagcagcagcggacactgtgttcagaactttcctccatccctagcttcaaaacccagcctggtccagcagaaaccgaccgcgtatgtgaggccaatggacggccaagatcaggcccctgatgagtctcctaagctgaagtcgtcttcggaaaccagcgtgcactgcacatcatacaggggagtccctgccagcaagccggagcctgccagagccaaggccaagctctccaagttcagcatccccaagcagggggaggagagtagatctggagaaaccaacagctgtgttgaagaaataatccgggagatgacctggcttccaccactttctgctattcaagcacctggcaaagtggaaccaaccaaatttccatttccaaataaggactctcagcttgtatcctctggacacaataatccaaagaaaggtgatgcagagccagagagtccagacaatggcacatcgaatacatcaatgctggaagatgaccttaagctaagcagtgatgaagaggagaatgaacagcaggcagctcagagaacggctctccgcgctctctctgacagcgccgtggtccagcagcccaactgcagaacctcggtgccttccagcaagggcagcagcagcagcagcagcagcggcacgagcagctcctccagcgactcagagagcagctccggatctgactcggagaccgagagcagctccagcgagagtgagggcagcaagcccccccacttctccagccccgaggctgaaccggcatcctctaacaagtggcagctggataaatggctaaacaaagttaatccccacaagcctcctattctgatccaaaatgaaagccacgggtcagagagcaatcagtactacaacccggtgaaagaggacgtccaggactgtgggaaagtccccgacgtttgccagcccagcctgagagagaaggagatcaagagcacttgcaaggaggagcaaaggccaaggacagccaacaaggcccctgggagtaaaggcgtgaagcagaagtccccgcccgcggccgtggccgtggcggtgagcgcagccgccccgccacccgcagtgccctgtgcgcccgcggagaacgcgcccgcgcctgcccggaggtccgcgggcaagaagcccaccaggcgcaccgagaggacctcagccggggacggcgccaactgccaccggcccgaggagcccgcggccgcggacgcgctggggacgagcgtggtggtccccccggagcccaccaaaaccaggccctgtggcaacaacagagcgagccaccgcaaggagctgcgctcctccgtgacctgcgagaagcgccgcacgcgggggctaagcaggatcgtccccaaatccaaggagttcattgagacagagtcgtcatcttcatcctcctcctcggactccgacctggagtccgagcaggaggagtaccctctgtccaaagcacagaccgtggctgcctctgcctcctccgggaatgatcagaggctgaaggaggccgctgccaacgggggcagtggtcctagggcccctgtaggctccatcaacgccaggaccaccagtgacatcgccaaggagctggaggagcagttctacacactggtcccctttggccggaacgaacttctctcccctctaaaggacagtgatgagatcaggtctctctgggtcaaaatcgacctgaccctcctgtccaggatcccagaacacctgccccaggagccaggggtattgagcgcccctgccaccaaggactctgagagcgcaccgcccagccacacctcggacacacctgcagaaaaggctttgccaaaatccaagaggaaacgcaagtgtgacaacgaagacgactacagggagatcaagaagtcccagggagagaaagacagctcttcaagactggccacctccaccagtaatactttgtctgcaaaccactgcaacatgaacatcaacagtgtggcaataccaataaataaaaatgaaaaaatgcttcggtcgcccatctcacccctctctgatgcatctaaacacaaatacaccagcgaggacttaacttcttccagccgacctaatggcaacagtttgtttacttcagcctcttccagcaaaaagcctaaggccgacagccagctgcagcctcacggcggagacctcacgaaagcagctcacaacaattctgaaaacattcccctccacaagtcacggccgcagacgaagccgtggtctccaggctccaacggccacagggactgcaagaggcagaaacttgtcttcgatgatatgcctcgcagtgccgattattttatgcaagaagctaaacgaatgaagcataaagcagatgcaatggtggaaaagtttggaaaggctttgaactatgctgaagcagcattgtcgtttatcgagtgtggaaatgcaatggaacaaggccccatggaatccaaatctccttattacctgatgtattcagaaacagtagagctcatcaggtatgctatgagactaaaaacccactcaggccccaatgccacaccagaagacaaacaactggctgcattatgttaccgatgcctggccctcctgtactggcggatgtttcgactcaaaagggaccacgctgtaaagtattcaaaagcactaatcgactatttcaagaactcatctaaagccgcccaagccccatctccgtggggggccagtggaaagagcactggaaccccatcccccatttctcccaacccctttcccggcagctccgtggggtctcagggcagcctctccaacgccagcgccctgtccccgtcgaccatcgtcagcatcccacagcgcatccaccagatggcggccaaccacgtcagcatcaccaacagcatcctgcacagctacgactactgggagatggccgacaacctggccaaggaaaaccgagaattcttcaacgacctggatctgctcatggggccggtcaccctgcacagcagcatggagcacctggtccagtactcccaacagggcctgcactggctgcggaacagcgcccacctgtcatagggacctcaccctggggccagagtgggctctggtctccacagatggctcaacgtttttggacactgtgctactgaaactcccagccacagcatttatagactgcggtgaacatttcctca

SEQ ID NO: 117453 - DNA, 636 bp, Homo sapiens
atgagatctccgagagtggagctgggccaggaggacagcgtgggagccacgggggaagagagtcagggggaaatgagcattcaaggaaatccaatgcccttgacaacagaaggagttatgtcagggctgcttctattgaaagtggttgctaaggagatgacctggcttccaccactttctgctattcaagcacctggcaaagtggaaccaaccaaatttccatttccaaataagctgatgttttcttggtggtacattgaaacaacaactgctagtgccaaagtaattggctataaacccagtgttctaaactgtgccactctgcgggtacaaataatgtcccattatcattcttaccggcatttggccagcctgcttgtggaggggtcagctaccttaccaggccactcccacattttaggtcctcttatcagacaccctgataaggtgtctgctggcaaacctcgggtcctggggctgcagcttttgaaggaggactgttcttcccagccagctgcaaaaccccaggggccccacaggctatgcagctctcttattcttcacagagccagagcaaggctgggtccagaacagagggagaccaaagttcctttctccaaagggaccacacactga

SEQ ID NO: 117454 - DNA, 988 bp, Homo sapiens
tcaggtgccaacaatggtggactgggctgggtggtccccaggtctctggaccacatgctctggtactggtggtgggggagcagagcaaggctgggcaaactggtccttagtcctcccaggggtacttgcaggtactagcctggagacattttccccattatcttgaggattaacattcagctccctgttacttatgcaaatatctgcagccagcttgaatttctcctcagaaaatgggattttcttttctaccacattgccaggctgcaaattttccaaatttttatgctctgcttcccttttaaaatggaatgcttttagcagcacccaagtcacctcttgaatgctttgttgctcagaaatttcttccacgagataccctaaatcatctctctgaagttcaaagttccacaaatctctagagcagggacagaatgctgccagtctctttgctaaaacataacaagagtcacctttgctccagctcccaacaagttcctcatctccatctgagaccacctcagcctggatttcattgtccatatcattatcagtatttttgtcaaagctattcgacaagtctctagaaagttccaaactgtcccacattttccagtgttctactgagccctccaaactgttccaacctctgcctgttaccaagtttcaaagttgcttgcacatttttgggtacttttttaaggagcacctcactccactggtatcaatttactgtattagtctgctttcaccctgctgataaagacatactcaagtctgagaagaaaaagaggtgtaaagaaaaagaactgtaattggacttaaagttccacatgggctggggaggcctcagaatcatggtgggaggcaaaaagacacttcttacatggcagcagcaagagaaaatgaggaggaagccaaagcagaaactcctgataaacccatcatatctcatgagacttattcactatcatgagaatagcacagg

SEQ ID NO: 117455 - DNA, 891 bp, Homo sapiens
ttatttaaggcagttcttcacgaccctcatctgaaacttctgagcctgtatggcactagcctctcccatactgatgtcagccacctgtgtgagacattgaagcacacaacatgcaagatagaagagctgatgctgggaacatgtgacatctccgatgaaggttgtgaagacatcgcctctgtcctggcctgcaacagcaagctgatacatctctccttggtagaaaatcccgaaaaggacaaaagaatgatgttgctgtgccctggagacgctgatgttgatgtactgctgtctcatctgtgtctcctgtgaagacatttcccacgtccttttctgcagtaaatccctgtccctccttgacctggggtcaaatttcctggaagataatgaagtggcatctcctgtgtgaagcactgaagcactaagatgcctgcaaaacatggaggagcctgaacttcgactgggttggttaccttggatgctgatgtggtggtggtgctgtgtgaggctttgagccacccggactgtgcactgtggatgcttggtgtcactgtagctgaaaggaaacttaaccatcttccctacatcggaagatttaaggctgcacaaatctgcctgaggattggaaaacagtagccctgtgacttcatgcttcaccacggcagcattcccggggatgttcctggccaataccggtacttctaaatccattgcaaggacacggcttccatgataacaaggccctttagcgtctgtccgctgcggcatctccagggcctggcagacctggcactctacacatttctgctgaatgacagaaggcatgaactcactcatcccatttgatggtccacagtgcacggggagacgcaggggaggattccacaccat

SEQ ID NO: 117456 - DNA, 1893 bp, Homo sapiens
tttttaacaaaccctgttcttgggtgggttttgggtataatactaagttgagatggataccattttccgggggaaagccgctttgtggaagtaggccttattcctctttgccctttcgtacagggagggaatttgaagtagatagaaaccgacctggattactccggtctgaactcagatcacgtaggacttttaacccgttgaaaaaaacgaacctttaaatagcggctgcaccattgggatgtgcctgagtccaaacatcgagggtcgtaaacccctaaattgttgatatggacatctttagaataggattgcgctgttatccctagggtaacttggtcccgttggtcaagttaatggatcaaatgagtataagtagttccgctttgaactggtgaagtccttagcatgtactgctcggaggttgggttctgctccgaggtcgccccaaccgaaatttttaatgccaggtttggtagttttaggacctgtgggtttgtttaggtactgtttgcattaataaattaaagctccatagggtcttctcgtcttgctgtgtcatgcccgcctcttcacgggcaggtcaattttcactggttaaaagtaagagacagctgaaccctcgtggagccatttcatacaggtccctattttaaggaacaagtgattaatggctacccttggcacggttagggttaccgcggccgttaaaacatgtgtccactgggcaggcggtgcctctaatactggtggatggctagaggtgatgtttttggtaaacaggcggggtaagatttgccgagttccttttacctttttttaaccctttcccttatgaagcatgccctgtgttgggttgaccagtgagggtaataatgacttgttggttggattgaagatattgggcctgttaaattgccagtccagggtttaaacctggccgcaggctttatgccggagggagaatgttttccagggcaccttatactaacagttagttcttctataggggtgataggattggccccaaatggggtgttggagggagtcccagttaaaaggttttggggggacttttttagggtagtggggtgtttgagccttgaaccgctttcccttaaattgggtggcctgccttttaaggccctacttatgggtgtttaaaatttttttactctctctaacaaggttttttcccctagtgtcccaaaagagctggtccctctttgggactaaacaggttaaaatttacaagggggattttagagggttcctggtgggccaaaatttaaaagttgaactaaagaatcctaaccttggacaaaccagctaatcaccaggcctcgggtaggttttgtcgcctctacctataaatctttcccactatttttgctacatagaccgggtgtgctcttttagcatgttcttaggtagctcagtctggtttcgggggtcctttagctttggctctccttgcaaaagttatttctagttaattcaattatgccagaacggtataggggttagtcccttgctatagttatgcttggttcataatttttcatctttcccttgcggtactatatctaattgcgccaggtttcaatttctatccgccctatacttttatttgggtaaaatggtttggctcaaggttgtctggttagtcaaggtggagtgggtttggggctaggttcaagcgattctcctgcctcagcctcctgagtagctgggactacaggtatgtgccaccatacccggctaatttttgtatttttagtagagacagggtttcaccatgttggctaggctggtctcaaactcctgacctcaggtaatctacccgccttggcctcccaaagtgctgggattacaggcgtgagccaacttttc

SEQ ID NO: 117457 - DNA, 1549 bp, Homo sapiens
gtattgctgtctctaagcaagacccgatcaccagtctagagcaagaaaaagagccctggaatatgaagatatgtgagatggtggatgaatccccagctatgtgttcttcttttaccagagacctttggccagagcaagacataaaagattcttttcaacaagtgatactgagaagacatggcaaatgtgaacatgagaatttacagttaagaaaaggctccgcaagtgtagatgagtataaggtgcacaaagaaggttataatgagctaaaccagtgtttgacaactacccagagcaaaatatttccatgtgataaatatgtgaaagtctttcataaatttttaaatgcaaatagacataagacaagacatactggaaagaaacctttcaaatgtaaaaaatgtggcaaatcattttgcatgcttttacacctaagtcaacataaaagaattcatattagagagaattcttaccaatgtgaagaatgtggcaaagcttttaaatggttctcaacccttactagacacaagagaattcatactggagagaaacccttcaaatgtgaagaatgtggcaaagcttttaagcagtcctcaacccttactacacataagataattcatactggggagaaaccatatagatgtgaagaatgtggcaaagccttcaaccggtcctcacaccttactacacataagataattcatactggagagaagccctacaaatgtgaagaatgtggcaaagcttttaaccagtcttcaacccttagtacacataagttcattcatgctggagagaaaccctacaaatgtgaggaatgtgacaaagcttttaatcgattctcataccttactaaacataagataattcatgctggagagaaacctctacaattgtgaagaatgtggcaaaggctttaattggtcctcaacccttactaaacataaaagaattcatactggagagaaaccctacaaatgtgaagtgtgtggcaaagcctttaatgagtcctcaaaccttactacacataagatgattcatactggagagaaaccctacaaatgtgaagaatgtggcaaagcttttaaccggtccccacaacttactgcacataagataattcatactggagagaaaccttacaaatgtgaagaatgtggcaaagcttttagccagtcatcaatccttactacacataagagaattcacactggagagaaaccctacaaatgtgaagaatgtggcaaagcttttaaccgatcctcaaatcttactaaacataagataattcatacaggagagaaatcttacaaatgtgaagaatgtggtaaagcctttaaccaatcctcaactcttactaaacataggaaaattcatactagacagaaaccctacaactgtgaagaatgtgacaatacatttaaccagtcctcaaaccttattaaacaaaataattcatactggagagaaactctacaaatgtcaagaatgtgggaaagcctctaagcagtccttcactcttactaagcattaaatattgggcggg

SEQ ID NO: 117458 - DNA, 345 bp, Homo sapiens
ggcacgagacctgctctgtaactcacattgtgtccttctctctccctttccttaacccttcccatcccgcttcaactcctggccatacagagaatgaacagccttccctcgtttggtttgacagaggaaagttttatttgacttttgaaggttcttccaggggacccagccccctaaccatgggagctcaggacactctccctgttgcagcagcatttacagaaacagtcaatgcctatttcaaaggagcagacccaagcaaatgtatcgttaagattaccggagaaatcgggttgtcatttcctgctggcatcaccagacactttgccaacaacccgtccccag

SEQ ID NO: 117459 - DNA, 747 bp, Homo sapiens
tttttagcaataaaaaaatgcatgttttatttgtaaattgtgcagagccattttaaactttaaaacagattttgacatgcctatgctgaaataaaatcctccagccacataactctaaggtaaacaagacagtgatgcaacatgagaaccaggcctcaattttgctttggttgaacaggcttggttgaagagcttttaatcctattcatattatataatcttgagtggggattttttcataaatcccttccaatttagcatttcctctcttctttgctcaggtgtacgatccatagcagaatttttggcaaagtctaagtcagaagagacccaggaggaagtgcaggttctgttggattctttggtccacggcaatcccaagtaccaaaatcaagtgtataaaggtctaatagctttgctgccctgcgagtccccaaaagcccagcagctgtccctgcagactctcaggactgcccagccaatcattgggaccacacaccccagcatcgtggactgcgtgctgaaggtgctgggcacgatgcacctggaagtccagtatgaagccatcgagttgatcaaagacctggtcggttacgatgtgcgccaggcgctgctcaagggcctcgtggcgctgctgataccgtcggtcaaggagatctccaaactgcaggccaagatcctcagtgacccctcggttctccagctcacccccagcctgccgatgtttttgcagcaggccgcggccgc

SEQ ID NO: 117460 - DNA, 1405 bp, Homo sapiens
tatcaaaactcaatgtgccaatagagatgcccccaccgattccaggacgccaaaggcagggacctctaagcagggcacattacggctcctcaatggtttcattggacgtcagtctcccctatcttctttgaagacaggaaaagaagcatcaacagaacatctagctttaaacgtcactgtgatgcagctgtatatcttatggtatggtggtgtacgatccatagcagaatttttggcaaagtctaagtcagaagagacccaggaggaagtgcaggttctgttggattctttggtccacggcaatcccaagtaccaaaatcaagtgtataaaggtctaatagctttgctgccctgcgagtccccaaaagcccagcagctgtgcctgcagactctcaggactgcccagccaatcattgggaccacacaccccagcatcgtggactgcgtgctgaaggtgctgggcacgatgcacctggaagtccagtatgaaggtagggagcctccagattgcagaagggggcaccgagagccagacatatcagctctcaaaagctttctcttagtcacaaagagccttgatgttgagtgtctgagacagccttggcagatggaagatgctggttcagaaaatgtcagtcacacctatgccttgcgtcaaccacaggaaagtgctaaacttcaacattgcaaagtggaagagattatacggaaaatggagaaagtgcacaggaaggggagactggcctgcccgaacgcaggcttgctcactgcacatgattggcggaagtgcataggaggcaacctgattaaactcaggagaacaggcctacaaaatgggtatcatgacatcatccctgccaaagatcatttagataacaagtgtcagagacaggactcaatcccaggttcttccaggggacccagccccctaaccatgggagctcaggacactctccctgttgcagcagcatttacagaaacagtcaatgcctatttcaaaggagcagacccaagcaacactccctctgtcctagttgaacaattactttccaaaaggcgatcaaatcccataatggaccacgggggacataaggtgccttgctccttgccacctctcctcacccatcccaacaggcgacagagagaactaaagatgtatgggagtcacaaggcagtagcccaaccctctccactccaagaccgcctccagcagtgtgctgttccaacacctgtcactggctggaccaacagcagagctgcactgggggacatttttagcacctggggctcccttcttttgagaactagcacaccaaagaaggcagcagctagggcaaggcctatgtgcccatgccctggggcttacaacacctcttacccccttgccccatacttctggcgctga

SEQ ID NO: 117461 - DNA, 421 bp, Homo sapiens
  misc_feature (1)...(421): n = a,t,c or g
tttcggcacagcatgaatggctgcgagaaggacagctcgtccacagattctgctaacgaaaaaccagcccttatccctcgtgagaaaaagatctcgatacttgaggaaccttcaaaggcacttcgtggggtcacaggcccaaatattgagaaatcagtgaaggatttgcaacgctgcaccgtttctctaactagatatcgcgtcatgattaaggaagaagtggatagttccgtgaagaagatcaaagctgcctttgctgaattacacanctgcatcattgacaaagaagtttcattaatggcagaaatggataaagttaaagaagaagccatggaaatcctgactgctcgtcagatggaaagcagaagnactaaagagactcactgaccttggccagttcagatggcagagatgcagctgg

SEQ ID NO: 117462 - DNA, 471 bp, Homo sapiens
atggaaatcctgactgctcgtcagaagaaagcagaagaactaaagagactcactgaccttgccagtcagatggcagagatgcagctggccgaactcagggcagaaattaagtgtggttttcagagaatgaattgggaaattcagatttatgcagctatagctgctattgcctggctgctcagaaattgtcctgtcagtgttatcttggtggaactgcacactctgcaccaggcattgcaaaaagaaaaacgtcccaacttatctagcctttgtgaacaaagaagcaaccagacccttcattctcccatacattgtcctgggtttgaaggaggaatgcgtttatggtttgggaatcttttcctggaggacagtcgcaaagttatttgcttctcctttaccatgacaagtacctatctttcccatcttaaagagtgccagaagaggagggcagtctcaagtctaatcaggtga

SEQ ID NO: 117463 - DNA, 759 bp, Homo sapiens
atgctgcaggaggaaaggcttctcttcccaatcctggtgaatgcttcgtggcaggcccctacagtgtgcatagtgtgtgcagcacccaagtcctacagtgagctgcagccactacctggcagctggcagcataagacacctcttatggttggcttccctccatacctttgcagcaagttccgaagcacagcaccaatcagcagactttgcagcaagttccaagtggaaatcctgactgctcgtcagaagaaagcagaagaactaaagagactcactgaccttgccagtcagatggcagagatgcagctggccgaactcagggcagaaattaaggactccctcccatcaggatacctacctgaggacactccatctccaacttttcaggtaaccttctcctgccctctctacagtccagccatcatacgaatgccttatatgtgcttcatctcatttgatattcactgccatatttatacatcgggaaaccgaggcataaagaaagcagtgaaggcatttgtctcaggacccgattggctgatggggcaaccgccaacggctgtggcgtttaaacccaagccgcagccgctgctgctcgccgagctcccggagctgggcgctgtccgcctcggtctccggctcgtcttccgccctctgtcctccgggatccgggacggcggcccctctccggctacgaggggttcgttgacggagtcctgttttggctttgagtcgctgcctcttgtttctgagatttga

SEQ ID NO: 117464 - DNA, 1850 bp, Homo sapiens
gcagaggaggcggcggaacaccccgggttggtcgggtttccaagggctgacccgagctccagcactttttccgcgcctgatttttcagagctcttcagaaaccaggctgctttcaggaacattgctgtggattcccagggcctattccactagaagcaagatggctgaactcaatactcatgtgaatgtcaaggaaaagatctatgcagttagatcagttgttcccaacaaaagcaataatgaaatagtcctggtgctccaacagtttgattttaatgtggataaagccgtgcaagcctttgtggatggcagtgcaattcaagttctaaaagaatggaatatgacaggaaaaaagaagaacaataaaagaaaaagaagcaagtccaagcagcatcaaggcaacaaagatgctaaagacaaggtggagaggcctgaggcagggcccctgcagccgcagccaccacagattcaaaacggccccatgaatggctgcgagaaggacagctcgtccacagattctgctaacgaaaaaccagcccttatccctcgtgagaaaaagatctcgatacttgaggaaccttcaaaggcacttcgtggggtcacagaaggcaacagactactgcaacagaaactatccttagatgggaaccccaaacctatacatggaacaacagagaggtcagatggcctacagtggtcagctgagcagccttgtaacccaagcaagcctaaggcaaaaacatctcctgttaagtccaatacccctgcagctcatcttgaaataaagccagatgagttggcaaagaaaagaggcccaaatattgagaaatcagtgaaggatttgcaacgctgcaccgtttctctaactagatatcgcgtcatgattaaggaagaagtggatagttccgtgaagaagatcaaagctgcctttgctgaattacacaactgcatcattgacaaagaagtttcattaatggcagaaatggataaagttaaagaagaagccatggaaatcctgactgctcgtcagaagaaagcagaagaactaaagagactcactaaccttgccagtcagatggcagagatgcagcctggccgaactcaggggcagaaattaagcactttgtcagcgagcgtaaatatgacgaggagctcgggaaaagctgcccggttttcctgtgacatcgaacagctgaaggcccaaatcatgctctgcggagaaattacacatccaaaagaacaactattcctcaagaactcccttgcaagctccctgctggcctctgctgaatgccgcacgcagcaaacctctggggaaaacagagtaactttttcccgaaaatcatccactcacaataagccctctgaaggcaaagcggcaacccccaaaatggtgagcagtctccccagcaccgcagacccatctctccgggccatgccggccaacaagcagaatggatcttctaaccaaagacggagatttaatccacagtatcataacaacagggttaaatgggcctgccaagtcgcagggcagtgggaatgaagccgagccactgggaaagggcaacagccgccacgaacacagaagacagccgcacaacggcttccggcccaaaaacaaaggcggtgccaaaaatcaagaggcttccttggggatgaagacccccgaggccccggcccattctgaaaagccccggcgaaggcagcacgctgcagacacctcggaggccaggcccttccggggtagtgtcggtagggtttcacagtgcaatctctgccccacgagaatagaagtttccacagatgcagcagttctctcagtcccggctgtgacgttggtggcctga

SEQ ID NO: 117465 - DNA, 489 bp, Homo sapiens
atggcggaggtgcaggtcccagtcctccatggtcgaggccatctcctgggccgcctggcggccatcgtggctaagcaggtaatgttgggctggaaggtggtggtcgtacgctgtgagggcatcaacatttctggcaatttctacagaaataagttgaactgcagcttccggacccccagctgcatcttccggtggaccgtgcgaggcatgctgccccacaagaccaagcggggccaggccgtcctagaccacctccaggtgtttgacggcatctcaccgctctacgacaagaaagcggatggtggttcctgctgccctcaaggtcgtgcgtctgaagccgacaagaaagtttgcctatctggggcgcctggcgcacgaggttggctggaagtaccaggcagtgacagctaccctggagaagaggaaggaaaaggcctagatccactaccggaagaagaaacagctcatgaggctacggaaacaggctga

SEQ ID NO: 117466 - DNA, 460 bp, Homo sapiens
  misc_feature (1)...(460): n = a,t,c or g
tgcaggaattcggcacgagctcaaggtcgtgcgtctgaagcctacaagaaagtttgcctatctggggcgcctggctcacgaggttggctggaagtaccaggcagtgacagccaccctggaggagaagaggaaagagaaagccaagatccactaccggaagaagaaacagctcatgaggctacggaaacaggccgagaagaacgtggagaagaaaattgacaaatacacagaggtcctcaagacccacggactcctggtctgagcccaataaagactgttaattcctcnnnnnnnnnnnnnnnnnncctcgggggggggccgggcccccatttccccttatagggaggggttttacatttcctgggcgggggttttacaaggggggaaggggaaaaaaangtngntatttcccaggctgttcccctgattataattgtggcacagggcctatggactcggg

SEQ ID NO: 117467 - DNA, 802 bp, Homo sapiens
gcggaggtgcaggtcctggtgcttgatggtcgaggccatttcctgtgccgcctggcggacatcgtggctaaacaggtactgcttgggccggaaggtggtggtcgtacgctgtgaaggcatcaacatttctggcaatttctacagaaacaagttgaagtacctggctttcctccgcaagcggatgaacaccaacccttcccgagggcccttaccacttccgggcccccagccgcatcttctggcggaccgtgcgaggtatgctgccccacaaaaccaagcgaggccaggccgctctggaccgtctcaaggtgtttgacggcatcccaccgccctacgacaagaaaaagcggatggtggttcctgctgccctcaaggtcgtgcgtctgaagcctacaagaaagtttgcctatctggggcgcctggctcacgaggttggctggaagtaccaggcagtgacagccaccctggaggagaagaggaaagagaaagccaagatccactaccggaagaagaaacagctcatgaggctacggaaacaggccgagaagaacgtggagaagaaaattgacaaatacacagaggtcctcaagacccacggactcctggtctgagcccaataaagactgttaattactctatgcggtgcctgcccttcctacattgttgccctggaatgtacgggacccaggggcagcagcagtccaggtgccacaagcagtcctgggacatacgatgctgggagcatggaaagggtcttagtcacttgcttccgaaggttgcttgaaagcactcggagaattgg

SEQ ID NO: 117468 - DNA, 1632 bp, Homo sapiens
  misc_feature (1)...(1632): n = a,t,c or g
cccacgcgtccgcccacgcgtccgggtagcggcggtggcggacacttggggtctggacgcaacggcggcgggagcatgaacgcccctccagccttcgagtcgttcttgctcttcgagggcgagaagtaagtgacgccggctgcggagggccgaggatcaccattaacaaggacaccaaggtacccaatgcctgtttattcaccatggaacaaagaagacccacacactgggaaacatcattaaatcacgtgcctgcttccccttcgccttctgccgtgattgtcagtttcctgaggcctccccagccacgcttcctgtacagcctgcagaactctgccccagagcacatcagctatgtgccccagctcttcaaacgacaccttggcggggaggctcaccctgtccaccttcacgctgggagcagcctctaggccagttcagcagccacaacatctctgacttggataccatctggctggtggtggccctcagcaacgccacccagagcttcacggccccacggacaaaccaggacatccctgctcctgccaacttcttcccagaggggcttactattttcacactgagggccaaccgggtgctgttaccagaccagaggccagctccatgtcctccgcgtcggcaatgatacccactgccaacccacaaaaattggctgcaaccatcccctaccaggacccggcccctacagggtgaagttcctgggtgatgaatgacgaaggacccgtggctgaaacaaagtgggtccagcgacacttcgcctgcagcaagcccagggcactttcgggctgttccccgggcccccagagcccggggcaccgtggttcatcatcgccatcctgtctatcctcctggccgtcctcctcacggtccctcccggctgtgcctcatatacacctgcttcaacagctgcaggagcacttccctatcaggcccagaggaggcagggagtgttaagaagatacaccacgtaccttcgcgtttagcacttcctgccgagggggcttcctgaggggttccagaggggcccacgtgtccctccacctcctccctgtcccatggctgcagagcctgagctgggacacgccctgaagcttctggaccctgagagagattgtttcttttctttactattttttttttttttttttgagacggagtctcactctgtcgccaggctggcgcgatcttggctcactgcaaacctctgcctcacgggttcaaagcaattttccctgcttcagcctcctgagtggctgggacctacaggcacacggccacccatgcccagctcatttttgtatttttagtagagatggggtttcacccatgtttgccaggatggcctccatctcttgaccttgtgatccgcccgactcggcctcccaagatgctgggattacaggcgtgagccatcaagtctggcgagagagattgtttctagatgagggtgggggcgggtgtccttagcccaaagcttgtgccagtctctatcagaaataaatgcccccaaaacctccctgcctgtccgtgacatcttannaaacnnnnnnnnnnnnnctatgaggcaaaaaaacaaagatttttaagacaagatgtgcctttcccccc

SEQ ID NO: 117469 - DNA, 966 bp, Homo sapiens
ttaagttttcatttctacattcgtcccttcgttcagtcttgtaatgatggtctcaagtagtaacaatagtaactgtcgtagtgacagtctcaggtagtaatcatggcaaccacacacaggcgtcccatgaagggtacaggcatcccatgagggcacaggtgtcccatgagaatgcaggcgtcccatgaggggcacaggcatcccatgagaacacaggcatcccatgaggggcacaggcgtcccatgagaacacaggcatcccatgaggggcacaggcatcccatgagaacacaggcgtcccatgaggggcacaggcatcccatgaggggcacaggcgtcccatgagaacacaggcatcccatgagggcacaggcgtcccatgagaacacaggcgtcccatgagaacacagttgtcccatgagggcacaggcgtcccatgagggcacaggtgtcccatgagaacacaggtgtcccatgagaacacaggtgtcccatgagggcacaggtgtcccatgagaatgcaggcatcccatgcggggcacaggcatcccatgagggtacaggcatcccatgaggggcacaggtgtcccatgagaacacaggtgtcccatgaggggcacaggcgtcccatgagggtacaggcatcccatgagaacacaggcgtcccatgaggggcacaggcgtcccatgagggtacaggcgtcccatgagaacacagccatcccatgagggcacaggcatcccatgagaacacagacgtcccatgaggggtacaggcgtcccatgaggggtacaggcgtcccatgagaacacaggcctcccatgaggggcacaggtgtcccatgagggcacagacgtcccatgagaacacaggcgtcccatgagcggcacagtatcggccctgagaagcgggggcaccccagggagggcagggctggcaggagacgggggctgatcgcagcacat

SEQ ID NO: 117470 - DNA, 432 bp, Homo sapiens
ggtgtgaaattctaaattgccaccagtggttacatctcaacagatgagatttatgtatgacctcagacggaccaacatatgaagataattcccagagcagttaccacttgatgaatttttgcaaaaaacagatcctaaggaccctgcaaattatattcttcatgcagtcctggttcatagtggagataatcatggtggacattatgtggtttatctaaaccccaaaggggatggcaaatggtgtaaatttgatgacgacgtggtgtcaaggtgtactaaagaggaagcaattgagcacaattatgggggtcacgatgacgacctgtctgttcgacactgcactaatgcttacatgttagtctacatcagggaatcaaaactgagtgaagttttacaggcggtcaccgaccatgatattcctcagcagttggt

SEQ ID NO: 117471 - DNA, 2868 bp, Homo sapiens
atggggtatctgcaagatcccctcaaccttgaactgatctttcaggtgggattcaaagaagcacacaggctacgtcggcttaaagaatcagggagcgacttgttacatgaacagcctgctacagacgttatttttcacgaatcagctacgaaagaagctgctgatgggagctctaccctgggagggggcgctggcaccatgggtctgagcgctcgatacggaccccagtttaccctgcagcacgtgcctgactaccgccagaacgtgtacatccctggcagcaatgccacgctgaccaatgccgctggcaaacgagatggcaaggctccagcaggtggtaatggcaacaagaagaaatcgggcaagaaagagaagaaggagttgaatatgcaaagagagttctgctgggacccccctattcgatcagtgattgtacccacatggaaagttctcttccaccgtgttctagctgagacccgggatccttccagtttcacgaagaacgtgcagaagatgaaaagagtgagggacgcggacctagctgtagctgcactcagccgcctccgtggtaaagtctgggtgaaggcctgggtgagtgcagataggagagcagctcctcttactgttctctggctgggctctcgctccatccctgagaaactagaggcgaacgcctccaggaagccagccaggggcaaccagaaagtccttttggtgaagtctgacatcccgcgttggtttctctggacctggcagagtagcaaggaagggctgagaaacatggatgcactgaaacccatgcctagtcgccgatgcggcagtatcgccacgaaatcacacaaacggagcatcgacccaacccaaagaatcaaaaaaccaaacgacaacgaaccgaacggaccgattgtttcctcgggtccttttctaaacaaagaccaccgccagtacaccccacaaaacaagccgacaacagcagttaagccacacccggcttatgagatatttgataatggatgcctagaatcgggagcttctaagaggggaaagtccaatcggcagggtcaaagaggatccttgtgtcctgcaggtgaagttttacaggcgttcaccgaccatgatattcctcagcagttggtggagcgattacaagaagagaaaaggatcgaggctcagaagcggaaggagcggcaggaagcccatctctatatgcaagtgcagaacaggacactaaggcagcaaaaggctaatggccccaaaactggtccagtaagaagcaacaccaagatgtcaactctgaacacaaccccagtgttcatcaacaaagggcaattgctgggtgcgtgcaatggtgccagggcccctgatgctggctgcacctgctggggcattgcatgcacctgtgctggccctgcattatgtgggctgcatgatggacctgatgcggaacccatgctgggcttggccttgacgcaggagacaccttatgcactggcagctgctggcttcccctgccaagccccacagggcctggaagcagtgatgtaccagcaaatgattgagctcagtgataatgaaaacccttggacaatattcctggaaacagttgatcccgagctggctgctagtggagcgaccttacccaagtttgataaagatcgacattctccagtttccactctgatcgaagatggcatctcgaatcagtgcaccggagccaggttcccacggatagtgcccagaccagatgtggcaccatactgtgagcggtatactctcagccccaacagccacttctctctgcatgtgaagaccctaaaagatggaaagctcttcccagagctagtgctagagcaacagctagaccgtgagacccaggcaagacatcagctagtactcactgccgtggatgggggaaccccagcccgctcagggaccagccttatctcggtcattgtgctggacgtcaatgataatgccccaaccttccagtcctcggttctacgtgtgggactcccagagaacacacccccgggtacactgctgctccgtctcaatgccactgatccagacgagggcaccaatggccaactagactactcttttggagaccatacatctgaaacagtgaagaatctctttggcctggatcctagcagtggagcaatccatgtgttgggtccagtagattttgaggaatcaaatttctatgaaattcatgcaagagctcgagaccagggacagccagccatggagggccactgtgtaattcaagtagatgtaggggatgctaacgacaacccccctgaagtgctgctggcatctttggtcaaccctgtgctagagagcacacccgtaggcacggttgtggggttgtttaatgtgcgggaccgagactcaggtagaaatggtgaggtgagcctgaagacatctccaaacctgccatttcagatcaagccttctgagacgcactactcactgctcaccagccagcctctggaccgagaggccacatcccattataccatcgagctgctggccagtgatgctggatcaccccccctacatacccatctcaccctcaggctgaacatttcagacgttaatgataacgcaccccatttcacccaacagctctacactgcttatatcccagaaaaccgcccaccaggctctctcctctgtactgtggctgcctctgatccagacgagggggataatgcccgcctcacctattctattgtggggagtcaaatccagggagccccagcctcctcctttgtgtatgtcaacccccgaggatggacgatctttgcccagcggaccttgactagcccaaggccggcccttggtcaagtcctgtttgcctga

SEQ ID NO: 117472 - DNA, 3517 bp, Homo sapiens
gtacgtgcgcgtctccctgccgccgccgccgcccgccgcgggccgccccggggccgccgtcgccgacgacgcgcgggaggaggaggaggaggccgccccgccgccgccgccgccgccgccgccccggctcgccgccgcccgcccgccgggctcgcagccccggcccccggccgcaggcgaggcccaggccgcggccgacatgaaccaccagcagcagcagcagcagcagaaagcgggcgagcagcagttgagcgagcccgaggacatggagatggaagcgggagatacagatgacccaccaagaattactcagaaccctgtgatcaatgggaatgtggccctgagtgatggacacaacaccgcggaggaggacatggaggatgacaccagttggcgctccgaggcaacctttcagttcactgtggagcgcttcagcagactgagtgagtcggtccttagccctccgtgttttgtgcgaaatctgccatggaagattatggtgatgccacgcttttatccagacagaccacaccaaaaaagcgtaggattctttctccagtgcaatgctgaatctgattccacgtcatggtcttgccatgcacaagcagtgctgaagataataaattacagagatgatgaaaagtcgttcagtcgtcgtattagtcatttgttcttccataaagaaaatgattggggattttccaattttatggcctggagtgaagtgaccgatcctgagaaaggatttatagatgatgacaaagttacctttgaagtctttgtacaggcggatgctccccatggagttgcgtgggattcaaagaagcacacaggctacgtcggcttaaagaatcagggagcgacttgttacatgaacagcctgctacagacgttatttttcacgaatcagctacgaaaggctgtgtacatgatgccaaccgagggggatgattcgtctaaaagcgtccccattagcattacaaagagtgttcctatgaattacagcatagtgataaacctgtaggaacaaaaaagttaacaaagtcatttgggtgggaaactttagatagcttcatgcaacatgatgttcaggagctttgtcgagtgttgctcgataatgtggaaaataagattaaaggcacctgtgtagagggcaccatacccaaattattccgcggcaaaatggtgtcctatatccagtgtaaagaagtagactatcggtatgatagaagagacgattattatgatatccagctaagtatcaaaggaaagaaaaatatatttgaatcatttgtggattatgtggcagtagaacagctcgatggggacaataaatacgacgctggggaacatggcttacaggaagcagagaaaggtgtgaaattcctaacattgccaccagtgttacatctacaactgatgagatttatgtatgacccctcagacggaccaaaatatcaagatcaatgataggtttgaattcccagagcagttaccacttgatgaatttttgcaaaaaacagatcctaaggaccctgcaaattatattcttcatgcagtcctggttcatagtggagataatcatggtggacattatgtggtttatctaaaccccaaaggggatggcaaatggtgtaaatttgatgacgacgtggtgtcaaggtgtactaaagaggaagcaattgagcacaattatgggggtcacgatgacgacctgtctgttcgacactgcactaatgcttacatgttagtctacatcagggaatcaaaactgagtgaagttttacaggcggtcaccgaccatgatattcctcagcagttggtggagcgattacaagaagagaaaaggatcgaggctcagaagcggaaggagcggcaggaagcccatctctatatgcaagtgcagatagtcgcagaggaccagttttgtggccaccaagggaatgacatgtacgatgaagaaaaagtgaaatacactgtgttcaaagtattgaagaactcctcgcttgctgagtttgttcagagcctctctcagaccatgggatttccacaagatcaaattcgattgtggcccatgcaagcaaggagtaatggaacaaaacgaccagcaatgttagataatgaagccgacggcaataaaacaatgattgagctcagtgataatgaaaacccttggacaatattcctggaaacagttgatcccgagctggctgctagtggagcgaccttacccaagtttgataaagatcatgatgtaatgttattttttgaagatgtatgatcccaaaacgcggagcttgaattactgtgggcatatctacacaccaatatcctgtaaaatacgtgacttgctcccagttatgtgtgacagagcaggatttattcaagatactagcctttatcctctatggaggaagttaaaccgaatttaacagagagaattccaggactatgacgtgtctccttgataaagccccttgatgaactaatggatggtgacatcatagtatttcagaaggatgaccctgaaaatgataacagtgaattacccaccgcaaaggagtatttccgagatctctaccaccgcgttgatgtcattttctgtgataaaacaatccctaatgatcctggatttgtgggtacgttatcaaatagaatgaattattttcaggttgcaaagacagttgcacagaggctcaacacagatccaatgttgctgcagtttttcaagtctcaaggttatagggatggcccaggtaatcctcttagacataattatgaaggtactttaagagatcttctacagttcttcaagcctagacaacctaagaaactttactatcagcagcttaagatgaaaatcacagactttgagaacaggcgaagttttaaatgtatatggttaaacagccaatttagggaagaggaaataacactatatccagacaagcatgggtgtgtccgggacctgttagaagaatgtaaaaaggccgtggagcttggggagaaagcatcagggaaacttaggctgctagaaattgtaagctacaaaatcattggtgttcatcaagaagatgaactattagaatgtttatctcctgcaacgagccggacgtttcgaatagaggaaatccctttggaccaggtggacatagacaaagagaatgagatgcttgtcacagtggcgcatttccacaaagaggtcttcggaacgttcggaatcccgtttttgctgaggatacaccagggcgagcattttcgagaagtgatgaagcgaatccagagcctgctggacatccaggagaaggagtttgagaagtttaaatttgcaattgtaatgacgggccgacaccagtacataaatgaagacgagtatgaagtaaatttgaaagactttgagccacagcccggtaatatgtctcatcctcggccttggctagggctcgaccacttcaacaaagccccaaagaggagtcgctacacttaccttgaaaaggccattaaaatccataactga

SEQ ID NO: 117473 - DNA, 409 bp, Homo sapiens
cccggaatttccgcgtcgacaatttcgtggctgcgatgagtgcctctgcggccaccggggtcttcgtgctgtccctctcggccatcccggtcacctatgtcttcaaccacctggcggcccagcatgattcctggactattgtaggggttgctgccctcatcctgttcctggtagcactgctggctcgtgtcctcgtcaaaagaaaaccaccccgggacccactgttctatgggtgaaccgtatctgaacaccgcatatgggcacatgatctgctactgggatggctctgctcattatctgatgtacctggtgatggtggcagccatagcatgggagtaagtcagttcacctggtgtgtgcctttgccaccttagcaaccgataagcgggttattcaagaagcccaagcg

SEQ ID NO: 117474 - DNA, 1605 bp, Homo sapiens
atgcagactgaaaacaactgcgttttccagtccgtcctcaaggcacatcacagcttgcttaccaaggttctggcagatttgctcccttccgaagcaccttatacctccagaagctcctcctgtggggatgagctgaagaaggaggaagccagtgtgggtcaagagtatgatgctgggctgaagaatcccatgagggaagagagaccctcctacaacagccaagtgcaggacctgctcaccacaggaagaaacaggtcctgcagggactcagggacaggcggccaggcagctggagaggaggaagttaccaccctatgtacagacactccacggcctgaccagctgaagggggtttgcagcctacagactgatgcaatttccttagcaccaacagctgagagacatagcaggttacttcctcctccctccagacagcaaccaacatcagcaggaacagaggctggcgcctgtcccaacacccggcgaccctcaggccttcagctgccggctgcagtgccaaacaccgtcaggccagacaccgtcagtgccaaagccaggcctagaacccacgtctctgcctgttggttccgggctatttctgctagtcattcacaacagtttctaaaattaataagaaatgataagtatgcgaaagtccatacatggaaacgttcccgtgagatgcaaaaagaacaaggcacaaacgagctgacacggccaggcgcggggagcccctgcggccacgaacctctgtcccgcggcggacggtcccagccccctcggaaaagttgcgaggctcccgtcgcggcgagccaactcccgccgcccctcggcgcgacccccgccgcgccggctcactcactcatgctgggccgccaggtggttgaagacataggtgaccgggatggccgagagggacagcacgaagaccccggtggccgcagaggcactcatcgcagccgccgcgccgctcgcccttcaccgcatcccgctgggcgccccgccccagcttccggcggcgcccgcgcccccttggcgcttgcccttcgaggcgcctcagccgcgccccccgcgtggcgccctcagcggcgtcccctcagcggtgtctcctccgcgcgccctcccagcccgcagccgtcccccgcgcctggccccgtcgccccaagtgcgcagggccgcggtgcagtcccgggaggcgtccttgcagtgctcctgccaggggcgccacggctcagcggcaagcgcccggcggcgccgaggggcggcgacacccccgcgcagggacaggtgcccctggcggcgcgcgctccgagggagggcccggggcacggccgggaaccggtcatcgaagagctggagaggcgcggggctgagctgcggtccgggaaaggtggaaccagatccgagggtgtcagaggaggaagggcccgcgggatcgtctatgggggagcccacggcccagaagtgggaaaggacaaaatgcccctgaaacctcggaacctctccgctccagtagccatcggcgggctgctgcacggagccggcatccggtttttaaacctggctctccactcaccagctgttgactttggtcaaattacttaa

SEQ ID NO: 117475 - DNA, 498 bp, Homo sapiens
taataatagatccaacccaatataggccaatggttcctaataaagtttcctccccatgctaatggctgcccaccatcacccaggtacatccagataatgaagcagagcccatccccagtcagcgagatcatgtgcccccatatgcggtgttccagatacggttcacccctctctcaaagtagtgtgtcatgaacccgtcaatgattcccatcttgctcccagtccctatgatgaggttcacccacgctggtaaatccaaaaactgcatacacatagaacagtgggtcccggggtggttttcttttgacgaggacacgagccagcattgctacccaggaacaggatgagggcagcaacccctacaatagtccaggaatcatgctgggccgccaggtggttgaatgacataggtgaccggggtggccgagagggacaagcaccgaagaccccggtgggccgcagaggcactcactcgcagccgccgcgccgctcgccctt

SEQ ID NO: 117476 - DNA, 273 bp, Homo sapiens
atgcccaagaggaaggtcagctccgccgaaggcgccgccaaggaagagaaacctcctgcaaaagtggaagcgaagccgaaaaaggcagcagcgaaggataaatcttcagacaaaaaagtgcaaacaaaagggaaaaggggagcaaagggaaaacaggccgaagtggctaaccaagaaactaaagaagacttacctgcggaaaacggggaaacgaagactgaggagagtccagcctctgatgaagcaggagagaaagaagccaagtctgattaa

SEQ ID NO: 117477 - DNA, 1902 bp, Homo sapiens
atggggttttgccatattggccaggctggtctcaaactcctgacctcaaaggatctgcccgcctcagccttccaaagtgctgggattgcaggtttttggctcctggatggcatttctggacccatcctgggccagagagaagcctgctgccctgcaggcaacagcaataaggagctgaagcaggagaactcagctttggcagagcagcttcaagttgtactgattgacaaggcagggatgcagtgtgacttggaggagctgaaaaagaaactggaactcactgagctcacgcttcaacagttatctagctggtgtgaagcccctgacgctaaccagcagttacagcagcccacagacgaacgggcacagctggaagcacacctggggcaggtgatggagtggctgaagtatctgcaaatggagagagagcagtatgccgagtatctgcatggagagagtgccatgtggtggcagaggatgcgggagatgtcagagcagataggtcacttgattgttccaggcatctgtgaaatgggaggagcacagccagaggtggtcatgggtctgggctttgtggaggtgcacacgttgagggaggagagagtgcacagcatgagtcgagtacaggagctggagacgatcttggctgaactaaggaaccaggtggctgaacccctgcccccggagcctccagcagggccctccgaagtggagcagaagctacaagcagaggctgagcacctgtggaaggagctggagaatctggcaggacagcttcaagcccaagtggaagaaaatgagggcttgagtcacctgaaccaagagcaggaagaggttgctcaggttgttggagcaagaggagaagttgctggagcaagaggagaggttgctggagcaagaggagaggttgctggagcaagaggagaggctactggagctgcaggagagcctgctagagcagaagcggaaggccgcttcctttctcagctgaacccctactcccggagcccccagcagggccctccgaggaaagtacgtcacatcataccagagccagaggtcagtgctgaagacgtggaccgggagaatgagtacataagcaggctggctcaggacaaggaggagatgaaggtgaagctgctggagctggtgttgcagcttgtgggcgactgcaacaagtggcatggcagattcctggcagctgcccagaaccctgctgatgagcctgctccatgggacccagccccccaggagattggggctgccaacaagcagggtggcctgtttcctggatgctgcctggtgacacctgggggattccacggggactgccgtggtgcctatggggcacagtccagccctgacagccaacaggctcagaatcctgatctagcggtggccgggaaggcagcattttgggaatttaaggagcatcaggaaagcctcactttgttaaagagctggggacgcagaaagagtggcagcggccaggctgcccagcttcgtgaaggctctcggtgcgccgcggcccgcaggcacctggcacgcgccctccctgccgccaggatgcccaagaggaaggtcatctccaccgaaggggccgccaaggaagagcccaagaggacatcggcgagtttgtcagctaaacctcctgcaaaagtggaagcgcagccaaaaaaggcagcagcgaaggataaatcttcagacaaaaaaacgcaaacaaaagggaaaaggggagcaaagggaaaacaggcagaagtggctaaccaagaaactaaagaagatttacctgcagaaaatgagctgtcttcattatacagcttctatgccaggtctttgattttggcctttattattcatcttcgaatggagcacaagaattaccagtattacctcaattga

SEQ ID NO: 117478 - DNA, 701 bp, Homo sapiens
  misc_feature (1)...(701): n = a,t,c or g
tgcaaaagtggaagcgacccgagcaaaggcagcagcgaagtgtaggtagaagtttagcactgcagtcatcagaagaggcaagattaatttccttgacattgaggagttgttggataattacntaaatttgtccttgttaaataaagattcttcaaacacctaaatgaaagtgataaattcaaaactgatccttttagttcctcattatatgatatgaagggattaactgtagcaggatagtcaacctgacccgtacggcatggtgctttttttcaggataaatcttcagacaaaaaaagtgcaaacaaaagggaaaaggggagcaaagggaaaacaggcccgaagtggctaacccaagaaactaaagaagacttacctgcggaaaacggggaaacgaaggactgaggagagtccagcctctttattgaagcaggagagaaagaagccaagtcttgatttaattaaccattttaccatgcttatcagtggtccctgtctcccttcttgtacaattccagaggaatatttttatcaactattttgtaaatgcaagttttttagtagccttagaaaccatttttaagaaggagggaatcccacctccatcccattttttaagtggtaaatgcttttttttaagaaggtgaaatcatttgctggttgttaattttttggtacaaccagaaaatagtgtgggatat

SEQ ID NO: 117479 - DNA, 238 bp, Homo sapiens
atggtgtctgccctcccagaggtaggtcgtgctcagattttaaggctgatagcttatattcgttcccctgcccctcccgttgtgggagttgagagagcagcacgcagacctgctcaggcttttggactggttgcactgccctccaccgttggagaggaatgcctgaaagatgccctccggagtccagagactcctaaactcggttccctcagtcctccctgccaggacacaagacctg

SEQ ID NO: 117480 - DNA, 789 bp, Homo sapiens
gccatatccgtggtccacgttattcgggacatcacagtgcttttggctgcccgtattcagacatgaacttgaaaaaggaggcaacacttcacgatcgtttgagagaacaaacacaggcaaattttggaatcagactcttcacattcaaaatcaaaaagcctctgtagtttgaacttcaatggaaaacatgaaaaggtgaacagtcagcccagacttgtacagcaggcaaagtgtttgaaaatcaaaggaaaagaagatattgacttggataatctcttcagagaatactcggtggagcaggcgcagcaggtgcttcaccagtcagtgtccatgtccacggtgtcagcccacccttttcgggaccttcccctcggcagggagcaacactgcaagttgcttccaggcgtggctgacatccgggccagccaagtggcacgttggactgtggatgaggtggctgagtttgtacagtctcttctgggctgtgaagagcatgccaagtgctttaagaaagagcagatcgatggcaaagccttcctgcttctgacacagacggacattgtcaaagtgatgaagatcaaactgggcccagcactgaagatttacaactctatcctgatgttcaggcattcccaggaactccctgaagaagatattgcctcaggccaagaagtcaggggatgaatgggctccctgaacttcctctggcaccaagacctgcgctctttcagcaataaaagtggagcacattaaaaaaaaaaaaaaaaaaaaaaaaaaaaaaaaaaaaag

SEQ ID NO: 117481 - DNA, 984 bp, Homo sapiens
  misc_feature (1)...(984): n = a,t,c or g
atgggttactcctctctgagtgctgctagactcaagatccatggccaagtcttccagtgctgtggtccagggcctcttcagaccctgcagctggacacagagctgaacatatctgaacatattggccttggaaacttgagggtacagtatatctggcttgttttgtacatgccccttgtccagcctgacaacttcattaaaaaacattcacatttgccaacatactgccttttcaaggaagatgtgaagtttcctttcagaacctgcaggcttacatactgttggctgaactacacagaagagataacctatttacatactaaaaaggtcagtgttggacaatcagcagttagagaggaatttgctgctgcttgcacctggagcataagaattggggagaagctggcaattttgctgtctctttatctgtgtagacagcaagcactgttaaatatgaggatgtctgttccgatccacgagagtggtgttgcacagagaagcccagtgatggacaagctcgctcaatactcggtggagcaggcgcagcaggtgcttcaccagtcagtgtccatgtccacggtgtcagcccacccttttcgggaccttcccctcggcagggagcaacactgcaagttgcttccaggcgtggctgacatccgggccngccaagtggcacgttggactgtggatgagaatctgcatggcctaatccaaaccaagcagacacctcacttggatgagagcattagcaaaggagaaagtcctgccttggttgtcactgagcttaggatgtgcatgacagctactgagcctctagtacctacaaagaacccctaccaggagcgtggccacattggcgactccttcctgcattacactgatcaagaaccgcagccctgggaccagtccagtgttcacccaacaccagctcccatctactctgtctcttcaggctttagggtgactcgtggatctgacatctaa

SEQ ID NO: 117482 - DNA, 867 bp, Homo sapiens
atggtgtctgccctcccagaggtaggtcgtgctcagattttaaggctgatagcttatattcgttcccctgcccctcccgttgtgggagttgagagagcagcacgcagacctgctcaggcttttggactggttgcactgccctccaccgatgctactgtgtttgccaatcagccccttgcaagagcctgcattggggcagcaaggcacagggagcctgatgctccaggccagtcagcctgggttggagaggaatgcctgaaagatgccctccggagtccagagactcctaaactcggttccctcagtcctccctgccaggacacaagacctggaagggcaagcaatgacttttctttggagatgggttactcctctctgagtgctgctagactcaagatccatggccaagtcttccagtgctgtggtccagggcctcttcggaccctgcagctggacacagagctgaacatatctgaacatattggccttggaaacttgaggagcccagaaccagccctgagagtggcaagcagtggactgaggagcccctggactgttcagccacacattaggtgtctttccaagagtctgccccagcacccaaagcagataatttgcttccagaattatgaatactcggtggagcaggcgcagcaggtgcttcaccagtcagtgtccatgtccacggtgtcagcccacccttttcgggaccttcccctcggcagggagcaacactgcaagttgcttccaggcgtggctgacatccgggccagccaagtggcacgttggactgtggatgagccttattccagtgccccccgaggcccagagctatcagctggggctaattcaagcagaggggcttaa

SEQ ID NO: 117483 - DNA, 460 bp, Homo sapiens
  misc_feature (1)...(460): n = a,t,c or g
catcgagcccctatcgagagcactagaccangtggnggaattcgctgccactactggggatggggaagctgttccttctggccaaaaaggttcatcagagtttacaagctcagtgtccccagcttcatcaggtaactcccacacatccccattccaaggtgcagggtcccattcttttccaatcaatgccctcactttaacagcagacacctggcaaggctgtgcatgcacctttcattgcagatcagtcactgacataagagcttgtgtctgtttttccacaatttcagctgtttccctacaggagataagactctcactcaggaaaatcttagcagatttgaggctcagtatctgcttctgaagctgaaagacagaatccctgagttcatcattttctttcatcaatttgtccactgaacttaggggcaaaaaaacagcttcattacattcattggtn

SEQ ID NO: 117484 - DNA, 771 bp, Homo sapiens
atgattgtgagacctccccaaccacatggaactgtgagtccattaaacctttttttctttattaattacccagtctcagttctgcaggctgtacaggaagcatggctgggaagacctcaggaaacttacagtcatgcagaaggtgaaggagatgcagaggtctgcaaagtcaatggtattgagccctgtgcactgaatggagacagtgttctcaaatccagaacggatgtcacctttactccagtcaacattacaaccaaagtaaagtctgttgaaatgcacaatgaagctttgagtagagctcttcctggggataatgtaggcttcaagaatgtgtctaagatgtttgtcatggcaacactgctgtttagtgactgtatacataatacctttgaccaaatgtggagaaccaaggaacataatgaagctcgttggtcactccaaagttcaggggacaaagtgatgaaagaaaatgatgaactcagggattctgtctcccagcttcagaagcagacactgagcctcaaatctcctaagattgccctgggtgagagtcttatctcctgtagagaaagagctgaaattgaaattgtggataaacagacacaagctcttatcatgggagtggctgacctgcaaggaagggtgaatgcacagcttcatcaggtgtctactgttaaagtgagggattggaaaagaatgggaccctacaacttggaatgtggaactgtggggaggaccctaattaagctgtggacactgagtttgtaa

SEQ ID NO: 117485 - DNA, 2278 bp, Homo sapiens
ttagtctagttgaagtctggaagcaaacaggggtgttgggggtggctcctgaggagaatcaacattatcttgcctggcaactgcctcagaggaggccatcactgttgcttcaggcagcacagggtttatctcctcagtcaaaggtggaaaggctgatgacagcatgggccggggaggggatattgccactactggagatggggaagctgtttcttctggcaaaaaaagttcatcagagtttacaaactcagtgtccccagcttcatcagggtcctcccacacgttcccattccaagttgcagggtcccattcttttccaatcaatgccctcactttaacagtagacacctggcgaggctgtgcatgcaccttttgttggaggccagtcactcgcatgataagagcttgtgtctgtttttccacaatttcagctctttctctacaggagataagactctcacttagggcaatcttagcagattttaggttcaatatctgcttctgaagcctggagctagaatccctgagttcatcattttctttcatgactttgtccactgaacttaggagcaaccaactagcttcattatgttccttggttttccacgtatggtcaattgtattatgtatagtcactgaactccttgcctctcacgagcgatgattcaggtgtgtcaaatgcatttattttgcataactctctaaacagttcacaccaagctgcctctcctccactgtggtcaaccagaaactgtacttgtttgcaaagtagtggcaggtgcctcgggcaccactgcattcgatgaaaggagtggcccgaaagtcctctaggcaggagccaggtgagaccagggactggcctccaccctcggcaccagcggcagtgtgctgaaacagacaggagattagtgcatgagctgtgcctgccaagggttggtgtggggaggggatgggtgctctgtgcacagcaatggcttgcgagggtgcctcacacacagagcagcggctgatgtactggggaatctgggtctggctgacgggcatcatggggataggggcggtagtggagagccagtaagatttatcattgcgcctggcatagtggcacacctcgttgatgttgcagtagatgaagggcatggtgctgaagcggggcagacaggagccagcaaagcctggaaggagagaaagtgggcaagggcaggggaggtctggctgaggggctttgacgagatggtggtttgggatcccgatgggacacgggggcacctgttccgactggctgtgctttaccaacgtgtagcccactctcatgctctggccaggcattccaggcatcccgaaggggccttgctgccctggagctcctgagagagacagatcataaaaggtgagtgtggtgcagctaatgacaacatcagctactcacattgtaccaccactggggccatctttaccggggatgccaggtaaacctttggagcctgcaggagagaaagcccaaaggagggtactcaatgtagagggtccccaggcaccttccccaggaaaggggcccaagggtccaggaggaacctggacagcttctgcagttggtgtttgtccaggatcaccttggaggccagaagagcctgtgggcaggtgggggaaataagaacatcaggctgaggcagagggaggtgacgggggccccagaagccttcccatgaagccaggctcacctctcatgcctgacaaagcccaaaggaagcaagtcaggtcccggcatggtaggggtggtaggggtggaggataggcagggccaggaattccagggaagccagggtctccggtgtcgccttgattcgaggatggcccagggggacctgggggtccagcggggcctgggcggcctagggataagatcggaagaggggcgaggggcaggtgaacaggtagtagccactgcagaaggcctagggaccctggggcaccggggagaccagcagggccctggagacctgggaaacctgtaaagaataaataaaaggggctggataggctctgtgtgcccagaagatggccaggctctttcagagaatctcctttgggtccagggagaccagcaggcccaggcacaccggtgatactaggtcctaggaggagatgcaggggtagggggcagacctcagtggaggtgaggccttcctgcctaactcactcgcctcctgaggggagagaatgtcaaaaatggctccagcaactctgaatcatgaagcatcagcaagaggtagctacc

SEQ ID NO: 117486 - DNA, 1776 bp, Homo sapiens
atgtcggctgcctctcctcaagcggcccctgccagctgtgatcagtgttaccaggcaaagccctctcaactgccctctgaatctgaaatcctcctttgggtttttcctgtgctcagtgcaatcagtccagagacgttaggccctcgaagttggcatagacacagtcatgatttttcacctgctaagtggctctgggactttttccagtcctcaagatctaacaaaccgcactctgcaatcacagctttgctgaagttccgccaccagcaaaagaagtcagaacaggctcgcctagtaggagcagagcccactgggctgctgggaagcctagcagagacagcaggaagcagggcagctcctgaaaggctggagcagcattctactggcgttcacatttgttccattctggacattacactggtctctaatgagcctctaccgaaaaaaaaagactccaccccagatcaccatcacagatcagacttacatatagacatgtgtgggcttatccaatgcagatcaggtaaaaacaacttcctgagagaatatatcgcgacagaagaagagaagttagagccagcaatcgatcctgattgcggatgttggcataaactgtctaggaagttatgcaaaataaatgcatttgacattcctgattccctgcttgtgagaggcaaggagtttagtgactctatacataatacttttgaccatatgtggagaaccaaagaacataatgaagatggttggttgctcctaagttcagtggacaaagtgacgaaagaaaattatgaactcagggattctgtctcctggcttcagaagcagatactgagcctcaaatctgctaagattgccttgagtgagagtcttatctcctgtagagaaaaagctggaattgtggaaaaacagatacaagctcttatggcactgattagaaaagaatgggaccctgcaactggaatggggacatgtgggaggatcatgatgaagctggggacactgagtatgtcaactctgatgagtctttttgccagaaggaacagcttccctatccccagtagtggcaacatcccctccctgacccatgctgccatcagcctttccaactttcaggaaataaaccctgtgctgcctgaggcaacagtgatggcctcccctgaggtagttgccaggcaaaataatgttgattctcctcaggagccaccaccaacacccccatttgcttctagacctataactagactaaagtcctggtgggcccctagagatctaacagtggaaaccacagtcactcaactacacaacttaaatacagtgggaataattgagtcgcgaggtggcaggggccatgtggcagcactcaacagtcaaaggcaaggtgaatcacagcagaggcttctgggattttggagcaaggccctgccattttctgcagataactactcttcttttgagagacagctcttggcctgttactgggctttggtggaaactgaacatttaactatgggtcatcaagtcaccatgcagtctgaactgcctatcatgaactgggtgatttctgacccatctagccataaacacacaatgcttctgccgaaactaccatcagtggactcacagaatgccttatccaccgtcatggtattccacacagcattgcctctgaccaaggcactcactttatggctaaagaagtgtggcagtgggctcatgctcatggaattcactggtgttaccttgttccccatcatcctgaagcagctggattga

SEQ ID NO: 117487 - DNA, 1884 bp, Homo sapiens
atgcggaggcttgcattgtacattttagctccagatcgactgcaagaacaaaccagcaatcctgagaggacccacagaccctctgaaggaagcggactgctactgcaggacttgggagagaccccaaatacttctacccaaatgggaaggaaccagaaaaccaatcctggtaatatgacaaaacaaggctcatcaacatgcccctcaaatcacactacttcaccagcaatgaatccaaaccaagaagaaatacctgatttacctgaaaaagaattcaggagtttagttattaagctaatcagggagagaccagagaaagctatgtttgtggccccaccatctactaatctgtgtaagacacttgagggctaccctgaacatttccttttattcccctctcctcattcaatgtactaccaaagttcagtggacaaagtgatgaaagaaaatgatgaactcagggattctttctccaagcttcagaagcagatactgagcctcaaatctgctaagattgccctgagtgagagtcttatctcctgtagagaaagagctgaaattgttgaaaagcagacacaagctcttatcatatctaatggtgggaacagcagtcactcaactacaaaatgtacgtacaatgggaataattggatcctgaggtggcatgggccaagtggcagcactcaactgtcaaaggcccacagaagcaatttgccttcagctggcaaggccagcaatatacctttacaggcctacctcagggatatatcaactctctgtctttgtgttataatcttattccgagagaccctgatctctttgcttctgcaaaatatcacactggtccattacattgatgacattatgctgattggatccagtgagcaagaattagcatacacactggacttactggtgagacgtttgtgtgccaaaggatgggaaataaatctgactgaaattcaggaagcttctacctcagtaaaatttctacgggtccagtggtgtggggcctgtcaagatattccttctaagatgaaggataagttactgcatttgttccctcctacaaccaagaaaaaggcatccctatttggatttcgaaggcagtgcattcctcatttggagtgtggtccagaacaagagaaggctctgcaacaggcgcaggctgctgtgcaagctgctgtgccacttgagcgatatgacccagcagatccaatggttcttgaggctgacctggctatggccactgctgagtgcccaatttgccagcagcggagaccaacactgagccctccatatggcaccgttccttggggtggtcagccagctacctggtggcaagttgattatattggatatcttccatcatggaaagggcagagttttgttctcactggaatagacacttactccggatatgggtttgcctatcctgcacataatgctattgccaagactaccatctgtgaactcacaaaatgccttatccaccgtcatgccaggattcacaggtccaggaatcaaggggtggaagtggcaccactcaccgtcacccctagtgatccattagcaaaatttttgcttcctgttcccatgacattacgttctgctggcctagaggtcttagttccagaggaaggaaccctgccaccaggagacatgacaatgattccattaaactggaagttaaggttgccaactggacactttgggctcctgctacttttaagtcaacaagctaagaagggagttacagtgttggctggggtgattgacccagactatcaagatgaaatcagtctactactccataacagagaactgctggatgaagagatcccctgtcaaaagaaggaaaatcttagagctggaggaggctga

SEQ ID NO: 117488 - DNA, 2226 bp, Homo sapiens
atggttctcttccatgacccacagcttctaatagagctacaacagtcaccacatggcccaaggttccattccttggaatgtgtgaggccaagaaccccaggtgagagaacaaaaggcttgccaccaccttgggagcagcccgccaccatcttgggagctctaagaacaaagacccgccgggccttagaactgatgacccagtactttaacaactggaactgggtctacaacaacataacagatcaggatgaaagtgaattgaatgggaaacgttctccacaaggcaaaaacacccctaagatgtattctggagaattcagcccagtcagagtgcatgtacctttttccctctcagacttgaagcaaattaaaatagacctaggtaaattctcagatgaccctgatggctatattgatgttttacaaggagaggacattctagcaaaagcaggggccattagacacctgaacataggagaaggaacacacgtttgttgtcccctacttgaggaaggaattaatcctgaagtctgggcaacagaaggaaaatatggacgagcaaagaatgctcatcccattcaagttaaactaaaggattctgcctcctttccctaccaaaggcagtacccacttagacccgaggcccagcaaggactccaaaagattgttaaggacctaaaagcccaaggcctagtaaaaccatgcagtagcccctgcaatactccaattttaggagtacagaaacccaatggacaatggaggttagtgcaagatctcaggattatcaatgaggccattgtccctctatacccagctgtacctaacccttatactccactttcccaaatactagaggaagcagagtggtttacagtcctggaccttagggatgcttttttctgcatccctgtacatcctgactctcaattcttatttgcctttgaagatcctttgaacccaatgtctcaactcacctggactgttttaccccaagggttcagggatagcccctatctgtttggccaggcattagcccaagacttgagccagttctcatacttggacactcatgtcctttggtacatggatgatttacttctagctgcccgttcagaaaccttgtgccatcaagccacccaagcgcttttaaacttcctcgccacttgtggctacaaggtttccaaaccaaaggctcagctctgcttacagcaggttaaacacttacggctaaaattatccaaaggcaccagggccctcagtgaggaacgtatccagcctatatcggcttatcctcatcccaaaaccctgaagcaattaagaatgttccttggcataacaggcttctgccaaatatggattaacaggtatggcaaaatagccaggccattatacacactaattaaggaaactcagaaagccaatacccatttagtccgaaggaccagcttgcaacccgtggcatacctgagtaaggaaactgggaccagcttgcaacccgtggcatacctgagtaaggaaattgatgtagtggcaaagcgttggcctcactgtttacgggtagtggcagcaatagcagtcttagtatctaaagcagttaaaatgatacaaggaagagctcttactgtgtggacatctcatgatgtgaacagcatactcactgctaaaggggacttgtggctgtcagacaaccacaatgaagaaaaaatagaacataactggcaacaagtaattgctcaaacctatgccgctcaaggggaccttttagaggttcccttgactgatcccgacctcaacttgtatactgatggaagctcctttgtagaaaaaggacttcgaaaggcggcttacgcagtgttcagtgataatggaatacttgaaagtaatcccctcactccaggaactagcactcagctggcagaactaatagccgtcactcaggcactagaattagaaggaaaaagggaacccgaaaatccagcagacaatgctagctattcctgtgaacctctagaggatctgcgcctgctcttcaggcgacaaccaatcgaagctgtaaaactacaaatggttcttcaaatggagccccagatgcagtccatgactaagatctaccgcggacccctggactggcctgctagcccatgctccaatgttgatgacattgaaggcacccctcccaaggaaatctcaactgcacgacccctactatgccccaattcagcatga

SEQ ID NO: 117489 - DNA, 1389 bp, Homo sapiens
atgaacaaagaaatgagtggacaaacttttgtaggaaaacaaaactctgtgagaatgccgaagatcatttcaggactaggagtacagaaacccaacagacagtggaggttagtgcaagatctcaggatcatcaatgaggctgttgtccctctataccaagctgtacgtaacccttatactctgctttcccaaataccagaggaaacagggtggtttacagtcctggaccttaaggatgcccttttctgcatcgctgtacatcctgactctcaattcttgcttgcctttgaagatcctttgaacccaacgtctcaactcacctggactgttttaccccaagggttcagggatagcccccatctatttggccaggcattagcccaagacttgagccagttctcatacctggacactcttgtccttcggtacgtggatgatttacttttagccgccccttcagaaaccttgtgccatcaagccacccaagtactcttaaatttcctcgccacctgtggctacaaggtttccaaactaaaggctcagatctgctcacagcaggttaaatacttagggctaaaactatccaaaggcaccagggccctcagtgaggaacgtatccagcctatattggcttatcctcatcctaaaacccgaaaacaactaagagggctccttggcatcacaggcttctgccaaatatggattcccaggtacagcgaaatagccaggccattacatacactaattaagaaaactcagaaagccaatacccatttagtaagatggacacctgaagcagaagcagcttttcaggtcttaaagaaggccctaacccaagccccagtgttaagcttgccaacggggcaagactttttccttatatgtcacagaaaaaacaggaatagctctaggagtccttacacagcactatggagaggaaaggaattcctgacttccgacggaatacctatcaaacatcaggaagccattaggagattattattggctgtacagaaacctaaagaggtggcagtcttacactgccagggtcatcagaaaggaaaggaaagggaaatagaagggaaccgccaagtggatattgaagccgaaaaagctgcaacgcaggaccctccattagaactgcttatagaaggacccctagtatggggtaatcccctctgggaaaccaaaccccaaatcgaagctgtaagactacaaattgttcttcaaatggagccccagatgcagtccatgactaagatctaccacggacccctggactggcctgctagaccgtgctccaatgttaatgacatggaaggcacccctcctgaggaaatctcaactgcacgacccctactatgcctcaattcagcaggaagcagttaa

SEQ ID NO: 117490 - DNA, 1680 bp, Homo sapiens
atggagatacatcttgcagttttttctgcaggcaaagatgagaacaggcaaggcattttaagtggaggaaaggacatgaacaaagatggagaaatgcatggtgagtctctgctttcagctggaaccagagttcagagtacaccaggaggagcgactcaagccttcgcgaaagaaaataaccaaaaagcatacaaagaaacgtacggcgtctctcatattacacgccatgatatgctgcagatccctaaacagcagcaaaacgaaaaataccaagtgcctcaattcgatcaatcaacgattaaaaatattgagtctgcaaaaggacttgatgtgcaattatacatccggcgacaaccatacgctgagagaccctactacgttgaagacaaaggccataaataccttgtattcgaagccaacacgggaacagaaaacggataccaaggcgaagaatctttatttaacaaagcgtactacggcggcggcacgaacttcttccgtaaagaaagccagaagcttcagcagggcgctaaaaaacgcgatgctgagttagcgaacggcgccctcggtatcatagagttaaataatgattacacattgaaaaaagtaatgaagccgctgatcacttcaaacacggtaactgatgaaatcgagcgcgcgaatgttttcaaaatgaacggcaaatgggattttgccgatttcggaaccaccatcaaacaggattttcgcctgctggggcaaaccagcgtggaccgcttgctgcaactctctcagggccaggcggtgaagggcaatcagctgttgcccgtctcactggtgaaaagaaaaaccaccctggcgcccaatacgcaaaccgcctctccccgcgcgttggccgattcattaatgcagctggcacgacaggtttcccgactggaaagcgggcacaactttaaggatgatgagtaccctcagagaccatgtcctttgcctatgtctgagtaccgtctaggcagcacccccccgcaaaacatgatagagactgaaggaaacaataaggaatgtggcactattttatactcaacttgtggaataaaattgattcctgctagaagaattaccaatgttctccgcatcctgtcttcacagcatgattttctgccgacacgtcccttccgttccctgcaaggccatttccagggaggcttacgaagacagcagatgatggtgatggaaggagtctgggtgctgagctgtgccatggacctgctgtgccgctcagctgtgtgtcctctggcacccacaaaatcaaacacctgccttccagatgtttgcacctataggccggcaaagctgactgcagcaagtccttcagaagggagacagtctctattacttgaagggccagtgctgcgactgcgcacttgtgcaactcttaacccagacacatttcttccagacaatgaagaaaagatagaacataactgtcaacaagtaattgctcaaacaatcaaagctataaaactacaaattgttcctcaaatggaaccccagatgcattccatgactaagatctaccgcagacccctggatcagcctgctagcccatgctctgatgttaacgacattggagccacccctcctgaggatatctcaattgcacgacccctactatgccccaattcagcaggaagcagttag

SEQ ID NO: 117491 - DNA, 2055 bp, Homo sapiens
atggtattagtagtagtagcagtagtagtggtggttttggtagtagcagtaattgtagtcgtagtagtagtagtagcagcagtagtggtaggagcagtagtagtagtggtggtggtggtaatggtagtagtggtggtggtagtggtagtagaggaggacaaccagcacaaaactggtgcaataaacaacaataatacagctaagaaccctcaacagagtccatttcactcccctgccacctccactggagcagaggctactcaaatgagaaggaaccagaaaaccaatcctcataatatgacaaaacaagtctctttaacaccccccaaaatcacactagctcaccagcaatggatccaaaccaagaagaaatacctgatttacctgaaaaagcattcaggagtgaataaaatacctaggaatccaacttatgagggatgtgaaggaccttttcaaggagaactacaaaccactgctcaacaaaataaaggaggacacaaacaaacggaagatcattccatgctcatggataggaagaatcaatattgtgaaaatggccatactgcccaagctgtacctaacccttacactctgctttcccaaataccagaggacgcagagtggtttacagtcctggaccctaagcatgccgttttctgcatccctgtacatcctgactctcaattcttgtttgcctttgaagatccttcaaacccaatgtctcaactcatctggactgttttaccccaagggttcaggaatagcccccatctatttggccaggcattagcccaagacttgagccaattctcctacctggacactcttgtccttcggtacatggatgatttacttttagccacccattcagaaaccttgtgccatcaagccacccaagcactcttaaatttccttgctacctgtggctacaaggtttccaaaccaaaggctcagctctgctcacagcaggttaaatacttagggctaaaattatccaaaggcaccagaaccctcagtgaggaacgtatccagcctatactgggttatcctcatcccaaaaccctaaagcaactaacagcgttccttggcataacaggtttctgccaaatatggattcccaggtacagcaaaatagccagaccattaaatacacgaattaaggaaactcaaaaagccaatacccatttagtaagatggacacctgaagcagaagtggctttccaggccctaaagaaggcgctaacacatgccccagtgttaagcttgccagtggggcaaaacttttctttatatgtcacagaaaaaaacaggaatagctctaggagtccttacacaggaactagtgctcagctggcagaactaatagccctcactcgggcaccagaattaggagaaggaaaaagggtaaatatatatgcaaactcaatagggagagaaagggaattcctaacttccaagggaacacttgtcaaacatcaggaagccattaagagattattattggctgtacagaaacctaaagaggtggcagtcttacactgctggggtcatcagaaaggaaaagaaagggaaatagaagagaaccgccaagcggatattgaagccagaagagccgcaaggcaggaccctccattagaaatgcttacagaaggacccctagcattcgagctggcaatggctacggctcgagctgagctttcactcgccatccaccactgctgtttgccgccgccaccgcagacccgctgctggcttccatcccttcggatccggcagggtgtctgctgcattcctgatccagcgagagctataacactcaccgcatggcccaagattccattccttggaatccgtaaggccaagaaccccaggtcagagaaaacgaggcttgccaccatcttggaagcggcctgctgccattttggaagtggcccaccaccatcttgggagctctgggagcaaggacccccggtaacagtacaaactcacattctaaggtcacacctcaaggaactagggaaaccaaaccaaaacccagcagaagaaaggaaataa

SEQ ID NO: 117492 - DNA, 2343 bp, Homo sapiens; identical to SEQ ID NO: 116181

SEQ ID NO: 117493 - DNA, 352 bp, Homo sapiens
ctacaaggtttccaaaccaaaggctcagctctgctcacagcaggttaaatacttatggctaaaattatccaaaggcaccagggccctcagtgaggaacgtatccagcctatactggcttatcctcatcccaaaaccctaaagcaactaagagggatccttggcataacaggcttctgtcgaatatggattcccagtgtaaagctcgccaacggggcaagagtttctttatatgtcacagaagaaacaggaatagctctaggaatacttacacaggttcaagggaccagcttgcaacccatggaatacctgaataaagaaattgatgaactggatcaaggacggactcattga

SEQ ID NO: 117494 - DNA, 900 bp, Homo sapiens
atgacatatggtgtgggcaaaggagatatggtagatggaacgaaggaaagaggtgagagaattgagtctgcattgggcacctcacacatcatgagagtggcagagccacagggaagtcaaagctggtgccccgatgaagaactgaggccagtgggctccccagccaccgccgctcagaagctgccaagcacccccggtgctttgggccccacgcacagcactgagtgctgcagtatccccttagaccccaaggcccaacaaggactccaaaagattgttaaggacctaaaagcccaaggcctagtaaaaccgtgcaatagcccctgcaatactccaattttaggagtacagaaacccaacggacagtggaggttagtgcaagatctcaggattatcaatgaggcccttgtccctctatacccagctgtacctaacccttacactctgctttctcaaataccagaggaagcagagtggtttacagtcctgggccttaaggatgactttttctgcatccctgtacatcctgactctcaattcttgtttgcctttgaagaaccttcaaaccccacatctcaactcacctggactgttttaccgaaagggttcagggatagcccccatctatttggccaggtattagcccaaaacttgagccaattctcatacctggacactcttgtccttcggtacgtggatgatttacttttagctgcccgttcagaaaccttgtgccatcaagccacccaagcactcttaaatttcctcactacctgtggctacaaggtttccaaaccaaaggctcagctctgctcacaggaggttacgtacttagggctaaaattatccaaaggcaccagggccctcagtgaggaacgtatccagcctatactggcttaa

SEQ ID NO: 117495 - DNA, 432 bp, Homo sapiens
ctgtgccgctcagctgtgtgtcctctggcacccacaaaatcaaacacctgccttccagatgtttgcacctataggccggcaaagctgactgcagcaagtccttcagaagggagacagtctctattacttgaagggccagtgctgcgactgcgcacttgtgcaactcttaacccagacacatttcttccagacaatgaagaaaagatagaacataactgtcaacaagtaattgctcaaacaatcaaagctataaaactacaaattgttcctcaaatggaaccccagatgcattccatgactaagatctaccgcagacccctggatcagcctgctagcccatgctctgatgttaacgacattggagccacccctcctgaggatatctcaattgcacgacccctactatgccccaattcagcaggaagcagttag

SEQ ID NO: 117496 - DNA, 1020 bp, Homo sapiens
tgaataaaatacctaggaatccaacttatgagggatgtgaaggaccttttcaaggagaactacaaaccactgctcaacaaaataaaggaggacacaaacaaacggaagatcattccatgctcatggataggaagaatcaatattgtgaaaatggccatactgcccaagctgtacctaacccttacactctgctttcccaaataccagaggacgcagagtggtttacagtcctggaccctaagcatgccgttttctgcatccctgtacatcctgactctcaattcttgtttgcctttgaagatccttcaaacccaatgtctcaactcatctggactgttttaccccaagggttcaggaatagcccccatctatttggccaggcattagcccaagacttgagccaattctcctacctggacactcttgtccttcggtacatggatgatttacttttagccacccattcagaaaccttgtgccatcaagccacccaagcactcttaaatttccttgctacctgtggctacaaggtttccaaaccaaaggctcagctctgctcacagcaggttaaatacttagggctaaaattatccaaaggcaccagaaccctcagtgaggaacgtatccagcctatactgggttatcctcatcccaaaaccctaaagcaactaacagcgttccttggcataacaggtttctgccaaatatggattcccaggtacagcaaaatagccagaccattaaatacacgaattaaggaaactcaaaaagccaatacccatttagtaagatggacacctgaagcagaagtggctttccaggccctaaagaaggcgctaacacatgccccagtgttaagcttgccagtggggcaaaacttttctttatatgtcacagaaaaaaacaggaatagctctaggagtccttacacaggaactagtgctcagctggcagaactaatagccctcactcgggcaccagaattaggagaaggaaaaagggtaaatatatatgcaaact

SEQ ID NO: 117497 - DNA, 1303 bp, Homo sapiens
acttgaagcatattaaaatagacctagataaattctcagataaccctgatggctatattgatgttttacaagggttaggacaatcctttgatctgacatggagagatataatgttactgctagatcagacactaaccccaagtgagagaagtgccgccataactgcagctcgagagtttggcaatctctggtatctcagtcagtctgggcaacagaaggacaatatggacggacaaagaatgcccgtcctgttcaagttaaaggattctgcttcctttccctaccaaaggcggtacccccttagactggaggcccaacaaggactccaaaagattgttaaagacctaaaagcccaaggcttagtaaaaccattcaatagcccctgcaatactccaattttaggagtacagaaacccaacggacagtggaagttagtacaagatctcaggattatcaatgaggccattgtccctctatacccagctgtacctaacccttatactctgctttcccaaataccagaggaagcagagtggtttacagtcctggaccttaaggatgcctttttctgtatccctgtacatcgtgagtctcaattcttgtttgcctttgaagatccttcaaacccaacatctcaactcacctggactgttttaccccaagggttcaggaatagccctcatctatttggccaggcattagcccaagacttgagccagttctcatacctgaatactcttgtccttcggtacctggatgatttacttttagctgcccatttagaaaccttgtgccatcaagccacccaaaaaaaaacaggaatagctctaggagtccttacacaggttcaagggaccagctttcaacccgtggcacacctgagcaaggaaattgatgtggtggcaaagggttggcctcattgtttatgggtagtggctgcagtagcagtcttagtatctgaagcagttaaaataatacagggaagagaacttactgtgtggacatctcatgatgtaagtggcacactcactgctaaaggagacttgtggctgtcagacaaccttttgcttaatcaggctctattatttaaaaggccagtgctgcgactgcacacttgtgcaactcttaacccagccacatttcttccaaacaataaagaaaagatagaacataaccatcaacaggtgattgttcaaacctacaccattcaaggggaccttctagaggttcccttgactgatcccgacctcaacttgtatactaatggaagttcctttgtagaaaaaggacttcgaaaagcggg

SEQ ID NO: 117498 - DNA, 1650 bp, Homo sapiens
atgaacaaagaagattataatgatgatgatgataatggtgatattaagtacctaccagatataaaaactggatacaacaaaacagtacagattccaattacttcagaaaacagtactgtgggtttgtctaatacagaagcagatgaaatggacaggctcaagtgtgaaagagatgatgccttgaaagaagtaaatacacttaagaggagaacgaaaggagggaagcacctgactctaaaggttacctacaccctctctgaaacgaatttgcataagaactatttatgggaatgcatcttgatggggcagctgggttgttatgaaatactcaggaaacccagcccagctctaggactcacccctgagcacaaaggcaacgttgggcacactggtgagaaaacaggtgcaggactgctacatcgcgtccccccgactccttccccaactaataaggaccccctttcaacccaaacggtacaaaaggagatagacaaaggggtaaacaacaaaccaaagagtgccaatattccccgattatgcccactccaagcagtgggaggaggagaatttggtccagccagagtgcatgtacctttttctctctcagacttaatagacctagctgtacctaacccttatactctgctttcccaaataccagaggaagcagagtggtttacagtcctggaccttaaggatgtctttttctgcatccctgtacatcctgactctcaattcttgtttgcctttgaagatcctttgaacccaatgtctcaactcacctgcactgttttaccccaagggttcagggatagcccccatctatttggccaggcattagcccaagacttgagtcagttatcatacctggacactcttgtccttcagtatgtggatgatttacttttagctgcctgttcagaaaccttgtgccatcaagccacccaagcactcttaaatttcctcgccacctgtggctacaaggtttccaaagagaaggctcagctctgctcacagcaggttaaatacttaggactaaaattatccaaaggcaccaaggccctcagtgaggaatgtattcagcctatactggcttatcctcatctcaaaaccctaaagcaactaagagagttccttggcataacaggcttctgccgaatatggatttccaggctctattacttgaaaggccagtgctgcaactgtgcacttgtgcaactcttaacccagtcacatttcttccagacaatgaagatagaatataactgtcaacaaataatttctcaaacctatgccactcgaggggaccttctagaggttcccttgactgatcctgacctcaacttgtatactgatggaagttcctttgtagaaaaaggacctcaaaaagcgggtgaaagaagagctgtgttagcttctcagacttccctcacaccactgggaaggaatggacgtagcatcccagcaacgctggcgcttgaatctaaggaacttgttaaatctgttcgtgccttacttgatatggattgtgcaataccattcttagtgggaacctctattgttgatccttatttaaaatatgaaccaacaaccaagaatcacctaataatggtccagggggagaagaactgcataacagggagattctga

SEQ ID NO: 117499 - DNA, 2220 bp, Homo sapiens
atgaacatgaacatcaaaaaaattgtaaaacaagccacagttctgacttttacgactgcacttctggcaggaggagcgactcaagccttcgcgaaagaaaataaccaaaaagcatacaaagaaacgtacggcgtctctcatattacacgccatgatatgctgcagatccctaaacagcagcaaaacgaaaaataccaagtgcctcaattcgatcaatcaacgattaaaaatattgagtctgcaaaaggacttgatgtgtgggacagctggccgctgcaaaacgctgacggaacagtagctgaatacaacggctatcacgttgtgtttgctcttgcgggaagcccgaaagacgctgatgacacatcaatctacatgttttatcaaaaggtcggcgacaactcaatcgacagctggaaaaacgcgggccgtgtctttaaagacagcgataagttcgacgccaacgatccgatcctgaaagatcagacgcaagaatggtccggttctgcaacctttacatctgacggaaaaatccgtttattctacactgactattccggtaaacattacggcaaacaaagcctgacaacagcgcaggtaaatgtgtcaaaatctgatgacacactcaaaatcaacggagtggaagatcacaaaacgatttttgacggagacggaaaaacatatcagaacgttcagcagtttatcgatgaaggcaattatacatccggcgacaaccatacgctgagagaccctcactacgttgaagacaaaggccataaataccttgtattcgaagccaacacgggaacagaaaacggataccaaggcgaagaatctttatttaacaaagcgtactacggcggcggcacgaacttcttccgtaaagaaagccagaagcttcagcagagcgctaaaaaacgcgatgctgagttagcgaacggcgccctcggtatcatagagttaaataatgattacacattgaaaaaagtaatgaagccgctgatcacttcaaacacggtaactgatgaaatcgagcgcgcgaatgttttcaaaatgaacggcaaatggcagtacccccttagacccaaggctcaacaaggactccaaaagattgttaaggacctaaaagcccaaggcctagtgaaatcatgcaatagcccctgcaatactccaattttaggagtacagaaacccagcagacagtggaggttagtgcaagaactcaggattatcaatgaggccgttgtccctctagacccagctgtacctaaccctcatactctgctttcccaaataccagaggaagcagtgtggtttacagtcctggaccttaaggatgcctttttcagcatccctgtacatcctgactctcaattcttgtttgcctttgaagatccttcaaacccaacgtctcaactcacctggactgttttaccccaagggttcagggatagcccccatctatttggccaggcattagcccaagacttgagccaattctcatacctggacactcttgtccttcggtacatggatgatttacttttagctgccagttcagaaaccttgtgccatcaagccacccaagcgctcttaaatttccttgctacctgtggctacaaggtttccaaaccaaacgctcagcactgctcacagcaggttaaatacttagggctaaaattatccaaaggtaccaaggcccttggtgaggaacgtatccagcctatactggcttaccctcatcccaaaaccctaaagcaactaagagggttccttggcataacaggtttctgccaaatatggatattcccagtaagatggacacctgaagcagaagcagctttccaggccctaaagaaggccctaacccaagccccagtgttaagcttgccaacagagcaagacttttctttatatgtcatagaaaaaacaggaatagctctaggagtccttacacagatccaagggacaagcttgcaacccatggcatacctgagtaaggaaattgatgtagtggcaaagggttggcctcattgtttacgggtagtagcggcagtagcagtcttagtatctgaagcagttaaaataatacagggaagagattttattgtgtggacatcttatgatgtgaatggcatactgactgctaaaggagacttgtggctgtcagacaaccgtttacttaaatatcaggctctattacttgaagggccagtgctgtga

SEQ ID NO: 117500 - DNA, 1446 bp, Homo sapiens
atgaatcaaagtgaccaggaaatgactggagcgtttgtccacatgaaaagttatacgggcctgatctcaggggtggcagtaaagatggaaagacacatttatcaagacagacgaattgcaatagagaaagagtttaattcatgtagaactggctgtatgggagactggagttttactattactcaaatcagactcctggaaaacacagggatcagggtttttaaggataatttggtagaggaagcagagtggtttacagtcctggaccttatggatgcctttttctgcatccctgtacatcctgactctcaattcttgtttgcctttgaagatccttcgaacccagcatctcaacttacctggactgttttaccccagaggttcaagaatagtccccatctatttggccaggcattagcccaagacttgagccagttctcatacctggacactcttgtccttcggtacatggatgatttacttttagctgcctattcagaaaccttgtgccatcaagccaccgaagctctcttaaatttcctcgccacctgtggctacaaggtttccaaaccaaaggctcagctctgctcacagcaggttaaatacttagggctaaagttatccaaaggcaccagggacctcaccacatttcttccagtcaatgaagaaaagatagaacataactgtcaacaagtaattgctcaaagctacgctgctcgaggggaacttctagaggttcccttggctgatcctgacctcaacttgtatactaatggaagttcctttgtagaaaaagcacttgaaaagtggatctatgtggttcctctcattcttagcgcccccatgatcatctacactgaacaagatttatacaattatgtcatacctaagtcccataacaaaagagtacccattctttcttttgttattggagcaggagtgctagacggactaggtgctggcattggtggtatcaaaacctctactcagttctactataaactatctcaagaactaaatggtgacatggattgggtcaccaactcactggtcaccttgcaagatcaacttaactccctagcagcagtagtccctcaaaatcgaagagctttagacttgctaactgctgaaagagggggaacctatttatttttaggggaagaatgttattatgctaatcaatccagaatcatcactgagaaagttaaagaaattcaagatcgaatacaacatagaccagaggagcttcaaaacaccagacgctggggcctcctctgccaatggatgcactggattctccccttcttaggacctctagcagctataatattgttactcctctttggaccctgtatctttaatctctttgttaagtttgtctcttccagaatcaaagctgtaaagctacaaatgttcttcaaatggagtcccagatgcagtccatga

SEQ ID NO: 117501 - DNA, 1493 bp, Homo sapiens
atgcctcttctccaaatgattgcaacacctctccagcaatctctgatttctacggaggatgagatggatgaattgacagaagtaggctttgaaaggtgggtaataacaaacttcactgaggaacccagcccagctctaggattcacccctgagcacaaaggcaatgttgggcatgctggtaaaggaccactagaatccagcagcccagacccctttctttgtggtcaagaaaagcaggaaaagggtgcaggactgctacatcggcagtacccccttagacttgaggccaaacagggactcaaaaaaattgttaaggacctaaaagcccaaggcctagtaacaccatgcagtagcccctgcaatactccaactttagcagtacagaaacccaacggacagtggaggttagtgcaagatctcaggattatcaatgaggctgttgtccctctatacccagctgtacctaacccttacattctgctttcccaaataccagaggaagcagagtggtttacagtcctggaccttaaggatgcctttttctgcatccctgtacatcctgactctcaattcttgtttgcctttgaagatccttcaaacccaatgtctcaactcacctggactgttttaccccaagggttcagggatagcctccatctatttggccaggcattagcccaagacttgagccagttctcatacctggacactcttgtccttcagtatatggatgatttacttttagtgacccattcagaaaccttgtgccatcaagccacccaagtactcttaaatttcctcgccacctgtggctacaaggtttccaaactaaaggctcagatctgctcacagcaggttaaatacttagggctaaaactatccaaaggcaccagggccctcagtgaggaacgtatccagcctatattggcttatcctcatcctaaaacccgaaaacaactaagagggctccttggcatcacaggcttctgccaaatatggattcccaggtacagcgaaatagccaggccattacatacactaattaagaaaactcagaaagccaatacccatttagtaagatggacacctgaagcagaagcagcttttcaggtcttaaagaaggccctaacccaagccccagtgttaagcttgccaacggggcaagactttttccttatatgtcacagaaaaaacaggaatagctctaggagtccttacacagcactatggagaggaaaggaattcctgacttccgacggaatacctatcaaacatcaggaagccattaggagattattattggctgtacagaaacctaaagaggtggcagtcttacactgccagggtcatcagaaaggaaaggaaagggaaatagaagggaaccgccaagtggatattgaagccgaaaaagctgcaacgcaggaccctccattagaactgcttatagaaggacccctagtatggggtaatcccctctgggaaaccaaacccca

SEQ ID NO: 117502 - DNA, 2862 bp, Homo sapiens
atgacagtggattatcataagcttaaccaagtggtgactccaattgcagctgctgtaccagatgtggtttcattcattgagcaaattaacacatctcctggtatctggtatgcagccattgacttggcaaatgtctttttctccattcctgtccataaggcccaccagaagcaatctgtcttctgctggcaaggccaggaatatacctttactgtcctacctcaggtgcatatcaactgtccagctttgtgtcataatcctattctgagagattttgatcacttttcccttccacaagatatcacactggtccattacattgatgacattatgctgattggttccagtgtagaatatgttgctgcatttggtccctcctacaaccaagaaagagacacaacacctagaggtcctatttggattttggaggcaacacattcctcatttggccaccccgtcatcacccaatggacccatgaacaaagtgaccatgatggcaggaatgtaggttatgcatgggatcagaaacatggacttccactcaccaaggctaacctggttatggccattggtgaatgctcagtttaccagcagcagagactaacactgagccctcaatatggcaccattcctcaggccaggattcacaagtccaggaatcaaagggtggaaatggaagtggcaccactcaccatcacccctagtgatccactagtaaaatttttgcttcctgttcccatgacattacattctgctggcctagaggtcttagttctagagggagaaatgctgccactaggagacacaacaacaatttcattaaacctgaagttaagattgctttctggacactttgggatcctcctacctttaagtcaacaggctaagaaaggagttaaagtgttggctggtgggattgacatgaactaccaagataaaatcagtctactactccacaagggagtgtctccatcattccccatgggcagccacctcaccaattatttggcgtggctaaggcaagaacctttggcattacatgatgagaaacaaattcactgtgcactttctaaaaatgtctgtccagtgaaacaggacgcacttatccacaagtttgtctcttccagaatcgaagatgtaaaactacaaatcgttcttcaaatggagtcccagatgcaatccatgactaagatctaccacggacccttggactggcctactagcccatgctctgatgttaatgacatcaaagtcacccctcctgaggaaatctcaactgcaccaccccactacgccccaattcagcacgaagcagttaaagcggtcatcggccaacctccccagcagcatttgggttttcctgttgagagcagggtgtccgctgtgctcctgatccagcgagcttctaatagagctataacactcaccacatggcccaagattccattccttggaatccgtaaggcccagaaccccatgtcagagaatacgaggcttgccaccatcttggaagcggcccgccaccatcttggaagaggctcgccaccatcttggaagctctgtgagcaaggacccccggtaacattttggcgatcacaaagggacctccaaagtgctgtacctagcccttatactctgctttcccaaataccagaggaagcagagtggtttacagtcctggacgttaaggatgcctttttctgcatccctgtacatcctgactctcaattcttgtttgcctttgaagatccttcaaacccaacgtctcaactcacctggactgttttaccccaagggttcaaggatagcccccatctatttggccaggcattagcccaagacttgagccaattctcatacatggacactcttgtcctttggtatggggatgatttaattttagccacccattcagaaaccttgtgccatcaagccacccaagtgctcttaaatttcctcactacctgtggctacaaggtttccaaacgaaaggctcagctctgctcacagcaggttaagtacttagggctaaaattatccaaaggcaccacggccctcagtgaggaatgtatccagcctaaactggcttatcctcatcccagaaccctaaagcaactaagagcattccttggcataacaggcttctgccaaatgtggattcccaggtacagcaaaatagccaggccattatatacactaattaaggaaactcagaaagccaatacccatttagtaagatggacacctgaagcagaagcagctttccataccctaaagaaggccctaacccaagccccagtgttaagcttgccaacagggcaagacttttctttatatgtcacagaagaaaaaggaatagctctaggagtccttatacaggtccgagggacgagcttgcaacctgtggcatacctgaataaagaaaatgatgtagtagcaaagggaactagtgctcagctggcagaactaatagccctcactcgggcactagaattaggagaagggaaaagtgtaaatatatatacagactctaagtatgcttacctagtcctccatgccaaggaagcaatatggagagaaagggaattcctaacttccaaggaaacacctatcaaacatcaggaagccattaggagattactactagctgtacagaaacctaaagaagtgacagtcttacactgcccgggtcaccagaaaggaaaggaaaaggaaataggaaggaaccaccaagcggatattgaagccaaaagagccacaaggcaggactctccattagaaatgcttatagaaggacccttagtatggggtaatcccctccaggaaaccaagccccagtactcagaagaagaaatagaatga

SEQ ID NO: 117503 - DNA, 1428 bp, Homo sapiens
atgggaaacgttctccacaaggcaaaaacacccctaagatgtattctggagaattcagcccagtcagagtgcatgtacctttttccctctcagacttgaagcaaattaaaatagacctaggtaaattctcagatgaccctgatggctatattgatgttttacaaggagaggacattctagcaaaagcaggggccattagacacctgaacataggagaaggaacacacgtttgttgtcccctacttgaggaaggaattaatcctgaagtctgggcaacagaaggaaaatatggacgagcaaagaatgctcatcccattcaagttaaactaaaggattctgcctcctttccctaccaaaggcagtacccacttagacccgaggcccagcaaggactccaaaagattgttaaggacctaaaagcccaaggcctagtaaaaccatgcagtagcccctgcaatactccaattttaggagtacagaaacccaatggacaatggaggttagtgcaagatctcaggattatcaatgaggccattgtccctctatacccagctgtacctaacccttatactccactttcccaaatactagaggaagcagagtggtttacagtcctggaccttagggatgcttttttctgcatccctgtacatcctgactctcaattcttatttgcctttgaagatcctttgaacccaatgtctcaactcacctggactgttttaccccaagggttcagggatagcccctatctgtttggccaggcattagcccaagacttgagccagttctcatacttggacactcatgtcctttggtacatggatgatttacttctagctgcccgttcagaaaccttgtgccatcaagccacccaagcgcttttaaacttcctcgccacttgtggctacaaggtttccaaaccaaaggctcagctctgcttacagcaggttaaacacttacggctaaaattatccaaaggcaccagggccctcagtgaggaacgtatccagcctatatcggcttatcctcatcccaaaaccctgaagcaattaagaatgttccttggcataacaggcttctgccaaatatggattaacaggtatggcaaaatagccaggccattatacacactaattaaggaaactcagaaagccaatacccatttagtccgaaggaccagcttgcaacccgtggcatacctgagtaaggaaactgggaccagcttgcaacccgtggcatacctgagtaaggaaattgatgtagtggcaaagcgttggcctcactgtttacgggtagtggcagcaatagcagtcttagtatctaaagcagttaaaatgatacaaggaagagctcttactgtgtggacatctcatgatgtgaacagcatactcactgctaaaggggacttgtggctgtcagacaacc

SEQ ID NO: 117504 - DNA, 5154 bp, Homo sapiens
atgcagtgggaagaggctgagaaagacccttctggcagttgtgtgttccagcggcctcctgtggcccttgtcttccccctacactccaagtggacgttggtgaacagcccaccaagctcaggcgatccctacgtgccaggacgaccagcacagtcaggacagctttccctcagccctgcacctccatatgttcttcctggccccgggaaaataaagcaagcaggcaacaacccatcactgacaagcatctaccgttcagaagtcttctgtgcccaccgccacctccaccccccgcagctggtgtgtgcccgtggacacattggatcagcgcatctcagtgtggacaggggcagcctcatctgggaagtgttagaaagcacagtctgggcgcgcaccaatgagtggagtccagtgacccggacggttctcatttcagctttggcatctacacacattccacagccctgcgagtctcgtccacccgtccctccagaatatgaggtgacagtccttcggagtcaaggcactgctcagctcccgccctggtcctcttccaccagctggaggctgacagatccttcctgcccaaaacatgctgcctggctgactgaccttgcctccagcaaaggcccagcggctggtggaactggctccttctcccagccaggcaccttgacatccacaagaacaaatcctcttaagaaagaaaaaagtcccgaggacttaaagcaaattaaaatagacctaggtaaattctcagataaccctgatggctatattgatgttttacaagggttaggacaatcctttgatctgacatggagagatataatgttactgctaaatcagacactaaccccaaatgaaaaagtgccaccattactgcagcctgagagtttggcgatctctggtatctcagtcagagatcaggaggagcaggcagaacaggacaaacaggataaaaaaaaggccatcactttagtcatggccctcaggcaagtggactttggaggctctgtaaaagggaaaagctgggcaaatcgaatgcctaatagggcttacttccagtgcggtctacaaggacactttaaaaaagattgtccaagtagaaagccccaggtatgcttgaccattgagagccaagaggttaactgtctcctggacgccggtgcggccttctcagtcttactctcctgtcccggacaactgtcctccagatctgtcactatccgaggggtcctaggacagccagtcactagatacttcttccagccactaagttgtgactggggagctttacccttttcacatgctttcctaattatgcctgaaagcctcactcccttgttagagagagagattctagtaaaagcaggggccattatacacctgaacataggagaaggaacacccatttgtcgtctcctgtttgaggaaggaattagtcctgaagtctgggcaacagaaggacaatatggacaagcaaagaatgcccattttgtccaagttaaactaaaggattccacctcctttccctatcaaaggcagtaccccctcagacccgaggcccaacaaagactccaaaagattgttaaggacctaaaagcccaaggcctagtaaaaccatacagtagcccctgcaatactccaattttaggagtacagaaacccaaaagacagtggaggttagtgcaagatctcaggattatcaatgaggctgtttttcctctatacccagctatacctagcccttatactctgctttcccaaataccagaggaagcagagtggtttacagtcctggatcttaaggatgcctttttctgcatccctgtacatcctgactctcaattcttgtttgcatttgaagatccttcaaacccaacatctcaactcacctggactgttttaccccaagggttcagggatagtccccatctatttggccaggcattagcccaagacttgagccagttctcatacctggacactcctgtccttcagtgcatggatgatttacttttagctgcccgttcagaaaccttgtgccatcaagccacccaagcgctcttaaatttcctcactacctgtggctacaaggtttccaaaccaaaggctcagctctgctcacagcaggttaaatgcttagggctaaaattatccaaagtcaccagggccctcagtgaggaacgtatccagcctatactggcttatccttatcccaaaaccctaaagcaactaagagggttccttggcataacaggtttctgccgaatatggattcccaggtacggcaaaatagccagaccgttatatacgctaattaaggaaactcagaaagccaatacccatttagtaagatggacacctgaagcagaagcagctttccatgccctaaagaaggccctaatgcaagccccagtgctaagcttgctaacggggcaagacttttcctcatatgtcacaaaaaacaaacaaacaaagaaaaaaaaaaacatgaatagctctaagagtccttgcgctggtctgagggacgagtttgcaacccgtggcatacctgagtaagaaaactgatgtagtggcaaagggttggcctcattgtttatgggtaatggcagcaatagcagtcttaatatctaaagcagttaaaatgatacagtgaagagatcttactgtgtggacatctcatgatgtgaatggcatactcactgctaaaggagacttgtggctgtcagacaactgtttacttaaatgtcaggctctattacttgaagggccagtgctgcgactgtgcacttgtgcaactcttaacccagccacatttcttccagacaatgaagaaaagataaaacataactgtcaacaagtaatttctcaaacctatgccactcgaggggaccttttagaggttcctttgactgatcccgacctcaacttgtatactgatggaagttcctttgtagaaaaaggacttcgaaaagtggggtatgcagtggtcagtgataatggaatacttgaaagtaatcccctcactccaggaactagtgctcagctagcagaactaatagccctcacttgggcactagaattaggagaaggaaaaagggtaaatatatatacagactctaagtatgcttacctagtcctccatgcccatgcagtaatatggagagaaagggaattcctaacttctgagggaacacctatcaaacatcaggaagccattagggaattattattggccgtacagaaacctaaagaggtggcagtcttacactgccggggtcatcagaaaggaaaggaaagggaaatagaaaggaaccgccaagcagatattgaagccaaaagagctgcaaggcaggaccctccattagaaatgcttatagaaggacccctagtatggggtaatcccctctgggaaaccaagccccagtattcagaagaagaaatagaatggggaatctcacgaggacatagttttctcccctcaggatggcaagccaccgaacaaggaaaaatacctttgcctgcagctaaccaatggaaattacttaaaaccactcaccaaaactttcacttatgcattgatagcacccatcagatggccaaattgttatttactggaccaggacttttcaaaactctcaagcagatagttggggcctgtgaagtgtgccagagaaataatcccctgccttatcgccaagctccttcaggagaacaaagaacaggccattaccctggagaagactggcaactgattttacccacaagcccaaacctcagggatttcagtatctactagtctgggtagatactttcacgggttgggcagaggccttcccctgtaggacagaaaaggcccaagaggtaataaaggcactagttcatgaaataattcccagattcggacttccccgaggcttacagagtgacaatagccctgctttccaggccacagtaacccagggagtatcccaggcgttaggtatacgatatcacttacactgcgcctgaaggccacagtcctcagggaaggtcgagaaaatgaatgaaacactcaaaggacatctaaaaaagcaaacccaggaaacccacctcacatggcctgttctgttgcctatagccttaaaaagaatctgcaactttccccaaaaagcaggacttagcccatacgaaatgctgtatggaaggcccttcataaccaatgaccttgtgcttgacccaagacagccaacttagttgcagacatcacctccttagccaaatatcaacaagttcttaaaacattacaaggaacctatccctgagaagaggaaaagaatattccacccaagtgacatggtattagtcaagtcccttccctctaattccccatccctagatacatcctgggaaggaccctacccagtcattttatctaccccaactgcggttaaagtggctggagtggagtcttggatacatcacacttgagtcaaatcctggatactgccaaaggaacctgaaaatccaggagacaacgctagctattcctgtgaacctctagaggatttgcgcctgctcttcaaacaacaaccaggaggaaaaatcgaagctgtaaaactacaaatggagcccaagatgcagtccaagactaagatctaccgcagacccctggaccggcctgttagcccacgatctgatgttaatgacatcaaaggcacccctcctgaggaaatctcagctgcacaacctctactacgccccaattcagcaggaagcagttagagcggtcgtcggccaacctccccaacagcacttaggttttcctgttgagatgggggactgagagacaggactagctggatttcctaggctgattaagaatccctaagcctagctgggaaggtgaccacatccacctttaaacacggggcttgcaacttagctcacacctgaccaatcagagagctcactaaaatgctaattaggcaaagacaggaggtaaagaaatagccaatcatttattgcctgagagcacagcaggagggacaatgatcgggatataaacccaagttttcgagccggcaacggcaaccccctttgggtcccctccctttgtatgggagctctgttttcatgctatttcactctattaaatcttgcaactgc

SEQ ID NO: 117505 - DNA, 444 bp, Homo sapiens
tacagtctggtggaattccacactcttgtgctccagaaatctgatgtggaggcagtcttttaaagtattgttttattgtgggctgctctgttcataagggctttgcctttgtttagtatgtgaatgagagaaatgcccgggccgctgtaggtggagatgtacagctcctcttttgacttggaccatgactttcaacgggattattatgataggatgtacagttacccagcacatgttcctcctcctcctattgctcgggctgtagtgccctcgaaatgtcagcatgtatcaggaaacatgaaggggaaaaagtggcttcaattctaagagaggacagcggggatcttccaagtctggaaagttgaaaggagatgaccttcaggccattaagaaggaattgacccagataaaacaaaaagtggattctctcttagaaaacctaag

SEQ ID NO: 117506 - DNA, 124 bp, Homo sapiens
  misc_feature (1)...(124): n = a,t,c or g
gggactattatgataggatgtacagttacccagcacgtgtacctcctcctcctcctattgctcgggctgtagtgccctcgaaacgtcagcntgaagaaagatgagactaatgtgaagatggagt

SEQ ID NO: 117507 - DNA, 316 bp, Homo sapiens
cccgggtggccgcgttgccgacctccagcagcagtcggcttctctacgcagaacccgggagtaggagactcagaatcgaatcttttctccctccccttcttgtgagatttttttgatcttcagctacattttcggctttgtgagaaaccttaccatcaaacacgatggccagctcctcttttgacttggactatgactttcaacgggactattatgataggatgtacagttacccagcacgtgtacctcctcctcctcctattgctcgggctgtagtgccctcgaaacgtcagcgtgtatcaggaaacacttcacg

SEQ ID NO: 117508 - DNA, 1740 bp, Homo sapiens
ggaattccaaacccgggagtaggagactcagaatcgaatctcttctccctccccttcttgtgagatttttttgatcttcagctacattttcggctttgtgagaaaccttaccatcaaacacgatggccagcaacgttaccaacaagacagatcctcgctccatgaactcccgtgtattcattgggaatctcaacactcttgtggtcaagaaatctgatgtggaggcaatcttttcgaagtatggcaaaattgtgggctgctctgttcataagggctttgccttcgttcagtatgcttatgagaagaaatgcccgggctgctgtagcaggaagaggatggcagaatgattgctggccagggttttagatattaacctggctgcagagcccaaaagtgaaccgaggaaaagcaggtgtgaaacgatctgcaagcggagatgtacgggtcagtaacagaacacccttctccgtcccctctactcagctcctcttttgaccttggacctatgactttcaacgggactattatgataggatgtacagttacccagcacgtgtacctcctcctcctcctattgcctcgggctgtagtgccctcgaaacgtcagcgtgtatcaggaaacacttcacgaaggggcaaaaagtggcttcaattctaagagtggacagcggggatcttccaagtctggaaaagttgaaaggagatgaccttcaaggccattaaggaaggagctgacgccagataaaacgaaaaagtgggattctctcctgggaaaacctggaaaaaatttgaaaaggaacagagcaaacaagcagtagagatgaagaatgataagtcagaagaggagcagagcagcagctcccgtggaagaaagatgagactaatgtgaagatggagtctgaggggggtgcagatgactctgcctgaggagggggacctactgggatgaatgaatgataatgaaagatcggggggatgaccagctggagtttgatcaaggatgatgaaaaagaggctgaggaaggagaggatgacagagacagcgccaatggcggaggatgactcttaagcacatagtggggtttagaaatcttatcccattatttctttacctagggcgcttgtctaagatcaaatttttcaccaagatcctctcccctagtatctttcagcacatgctcactggttctccccatccttgtccttcccatgttcattaaattcatatttgccccgcgcctaagtcccattttcacttcctttgacgctcctagtagttttgttaagtcttaccctgtaatttttgcttttaattttgatacctctttatgacttaacaataaaaaggatgtatggtttttatcaactgtctccaaaataatctcttgttatgcagggagtacagttcttttcattcatacataagttcagtagttgcttccctaactgcaaaggcaatctcatttagttgagtagctcttgaaagcagctttgagttagaagtatgtgtgttacaccctcacattagtgtgctgtgtggggcagttcaacacaaatgtaacaattatttttgtgaatgagagttggcatgtcaaatgcatcctctagaaaaataattagtgttatagtcttaagatttgttttctaaagttgatactgtgggatttttgtgaacagcctgatgtttgggaccttttttcctcaaaataaacaagtccttattaaaccaggaatttggag

SEQ ID NO: 117509 - DNA, 509 bp, Homo sapiens
  misc_feature (1)...(509): n = a,t,c or g
gacgcacaatcttccaatattgataatatganatccatctacatctttttctggggcaattccattgcatattgttcgctcatcaacgtggtctggtagtggtaactgaactaatataccgctgactcttgggtccatattcaattgatcagttacgtccaaaagttcttcctgagaaacatccttaggttttagaatgagctcactacaaatacctacagcagaggcagctcttatcttattcctgacatatgtatggcttgctgggttatctcccactaaaattatactgaggtgaggtcttctgtttccaagggaaacccatgattccacacctcgctgtatttctttctggatatgcttggccatttcggttcctgatataataatggcttcatgtctcacaccgctgctccgaaagccccggaacgcactcccgggctctcccggtgcccttacggagggtgctgtgcttctgcccaacgccggcgctcggccaaggcggccgc

SEQ ID NO: 117510 - DNA, 655 bp, Homo sapiens
cggggatccgcggccatgacggtgccggtccgcggcttctcgctgctccgcggccgccttggccgagccgccgccgttggggcagaagcacagcaccctccgtaagggcaccgggagagcccgggagtgcgttccggggctttcggagcagcggtgtgaggaccagcagagagaagagattccatcttccagaggttgccactgtctgcctccccacttgtccccatccacagtcatcctttttatatatataatgacacattagttgtctagttcttcatagttaatgtggtttaagtctgacatcttttcttttgccatgaaatttacaccttagtgttattctcactgaaaattgcctttgagtttgataaactcttatcccagtgatattgactgttttaaattaacagatttatcaccatttctgagctgtgtagggccttaattgaaaaagtatctttgattattttttcacattttggccacatgcctataataatggaatatttacagtactttttagtggagaacttttttaagtagaatttcaataattaatgtttgatggagtttggaagttaccgtattttgaagtatcgtttaacattcttctctcaatgagttttcctttaaaatgtgcagtgaatttgtt

SEQ ID NO: 117511 - DNA, 2061 bp, Homo sapiens
gactgtgactatggtacgaaggatgctacacttggttctcttgacaacgctctgtgtctgacacagtgtgggactgttcctactgccgtgaaaggttctgatgttccatgcatcatcaggaaagatttctccaatagtacaggccatcatactccaaatggtcaagcaactggagcctcagacaatgaccccttctgccggggacccttagataggcttctgagggagactggactgacatttccccaaaacagcaccctctgtcagcagcaagcagttaagattggtctttgtccttatcacaatccttattctaatggcaatagggtgcctcttgaagaaaaactacctgagatacactttttccaaagggcagctagtactagcaagtcgcagcaggcaaagaaggattggagtggacctccagcaaactccagcagacctgcagcagaggggcctgttagaaggaaaactaccaaacagaaaggagtagcatcaacaccaacaaacaggacgtccacacaaaaaccccatccgaaggacaccaacatcaaagaccaaaggtaccaggtcttcccctgcagatctaggtaccagggccattccagaggaccctgggcaagcctagtccccacagacttgggaccagacccattccaatgccaggctggtccccatggactcaggctcaagacctaccccagtgccaggatggcccctatgaacctaggcttcaggtctgtatttgcagaccaaggctccaggactactcctatatacccagttgacagcccaccccagtggacccatgcaccggaattagccccctgtgacattttttggctagccgacatttctctacggatgacacagtgtgaagagttacattcagaagtgacctcattgacccaagtagtgaaaccagaaagctgtccagtcatggcagtcggtccgtccatgcatatactgacacaaaatgaccaattgagttttcctgatatgcaatcattcaaagacttgaatagttctgcagctatggtattagttggcaacaaaagtgcacataacatatcctcatgcacatcttctgaaaaatatattgcacaaaatgcctcaaatgtcttcctaaatcaagtgcacctgctgcaaagatggaacattctggtgcgagagcccagagcagagcacgttttcgttccccaagctgaggcaactgcgactcgcccgcgcgaccggcaaggccacctcacagacaaggctgtcctcgacccagcccgccgccgcgcggccgcccacgagccttgggccccacgcgcgcgagcgccgcccgcgcccccgccgacctcccaccgccagcggctccgcacccggcgcccgcagccctcgtacctcacaccgctgctccgaaagccccggaacgcactcccgggctctcccggtgcccttacggagggtgctgtgcttctgcccaacgccggcgctcggccaaggcggccgcggagcagcgagaagccgcggaccggcaccgtcatggccgcggatccccggcttccggactggggctccacctcccgcgactccagtcctcgcggctggaggcctggctccgccctcacccgggctggcagggcagcaagtagcgcttcccagccaggttccggcagacacgcagagtggggtaaagagcggttcccaggaccggggacggaactgacagagtgccgggtccgcagggggcggggccaggacccaagtcccgggccctctgaggatgtggaagcgtgcagtgtggcctggcgactgggccccgcacccagccaacatatagctggcattcccatagcgacggcacagagaaggcctccaaactatcactttaggcagcacgccccactttccaccaagccagagatcctgcccaacagtctccgtgactacgtggaattggatttaaagcaggaaagaagtaataggttcattgtttcccacttcctttgtgagattccttggaagttggagaaaagaacaaaggtgtgtggagaaggagcaaaacctggctga

SEQ ID NO: 117512 - DNA, 2349 bp, Homo sapiens
caggagaagctgaccagccgcaagatggacagccgctggggcgggcgcagcgagtccatcaatgtgaccctcaacgtggagcaggcagcctacacccgtgatgccctggccaaggggctctatgcccgcctcttcgacttcctcgtggaggccatcaaccgtgctatgcagaaaccccaggaagagtacagcatcggtgtgctggacatttacggcttcgagatcttccagaaaaatggcttcgagcagttttgcatcaacttcgtcaatgagaagctgcagcaaatctttatcgaacttaccctgaaggccgagcaggaggagtatgtgcaggaaggcatccgctggactccaatccagtacttcaacaacaaggtcgtctgtgacctcatcgaaaacaagctgagccccccaggcatcatgagcgtcttggacgacgtgtgcgccaccatgcacgccacgggcgggggagcagaccagacactgctgcagaagctgcaggcggctgtggggacccacgagcatttcaacagctggagcgccggcttcgtcatccaccactacgctggcaaggtctcctacgacgtcagcggcttctgcgagaggaaccgagacgttctcttctccgacctcatagagctgatgcagtccagtgaccaggccttcctccggatgctcttccccgagaagctggatggagacaagaaggggcgccccagcaccgccggctccaagatcaagaaacaagccaacgacctggtggccacactgatgaggtgcacaccccactacatccgctgcatcaaacccaacgagaccaagcacgcccgagactgggaggagaacagagtccagcaccaggtggaatacctgggcctgaaggaaaacatcagggtgcgcagagccggcttcgcctaccgccgccagttcgccaaattcctgcagaggtatgccattctgacccccgagacgtggccgcggtggcgtggggacgaacgccagggcgtccagcacctgcttcgggcggtcaacatggagcccgaccagtaccagatggggagcaccaaggtctttgtcaagaacccagagtcgcttttcctcctggaggaggtgcgagagcgaaagttcgatggctttgcccgaaccatccagaaggcctggcggcgccacgtggctgtccggaagtacgaggagatgcgggaggaagcttccaacatcctgctgaacaagaaggagcggaggcgcaacagcatcaatcggaacttcgtcggggactacctggggctggaggagcggcccgagctgcgtcagttcctgggcaagaaggagcgggtggacttcgccgattcggtcaccaagtacgaccgccgcttcaagcccatcaagcgggacttgatcctgacgcccaagtgtgtgtatgtgattgggcgagagaagatgaagaagggacctgagaaaggtccagtgtgtgaaatcttgaagaagaaattggacatccaggctctgcggggggtctccctcagcacgcgacaggacgacttcttcatcctccaagaggatgccgccgacagcttcctggagagcgtcttcaagaccgagtttgtcagccttctgtgcaagcgcttcgaggaggcgacgcggaggcccctgcccctcaccttcagcgacacactacagtttcgggtgaagaaggagggctggggcggtggcggcacccgcagcgtcaccttctcccgcggcttcggcgacttggcagtgctcaaggttggcggtcggaccctcacggtcagcgtgggcgatgggctgcccaagaactccaagcctaccggaaagggattggccaagggtaaacctcggaggtcgtcccaagcccctacccgggcggcccctggcgccccccaaggcatggatcgaaatggggcccccctctgcccacaggggggggccccctgccccctggagaaattcatttggcccagggggcacccacaggcctccccggccctccgtccacatccctgggatgccagcagacgaccccgggcacgtccgccctcagagcacaacacagaattcctcaacgtgcctgaccaggggatggccggcatgcagaggaagcgcagcgtggggcaacggccagtgcctgtgggccgacccaagccccagcctcggacacatggtcccaggtgccgggccctataccagtacgtgggccaagatgtggacgagctgagcttcaacgtgaacgaggtcattgagatcctcatggaagatccctcgggctggtggaagggccggcttcacggccaggagggccttttcccaggaaactacgtggagaagatctga

SEQ ID NO: 117513 - DNA, 617 bp, Homo sapiens
agtgattcggcacgagcccggaagcagattacgtggagtgacggtcatgctgcggcgtggacacttggcattcagggacgtggccatagaattccctcagggaggagtggaaatgtcttggaccctgctcaagaggactttatacagggaagtgatggtggagaacttacaggaacctcggtctttctgggaatcctgtcttcctgaccctgagtgttatctcccatgtttggagcaaaggagagatccccggaatcttcagagtgaagtgaaaatagcacacactccacggtggcacgggagtgcatcaaaggtgtgaacgcaggtaagagcttggatggccagagtggaggccccataatttttttttttttttttaaacagggtcttgctctgtcacccaggctgtcgtagagtggcaatcatcagtggcaatcgtggcttaactcatagcctcaaactcctggtctcaagtgatcctccttcctctgcttccgaaagtggtgggattacaagcatgagccactgtaccctgcaaaaccacactttgagtttctgtttgggagctctctgcaagtgagagaattctttgggaaaataaaagtttaaatcctgtg

SEQ ID NO: 117514 - DNA, 612 bp, Homo sapiens
atgacagtcatgtcattggctgactctgtcgttggctggggtacccgagaatcagaagttcacagccagctgaccaaccggactgcactcagcattcaccattatgaaacacaccctgaggaccctggctctggtcaacggcatcactcccagcacacgctgcagggcttgacacttactgcctatagaccacaggtctccgagttcacgtctcacggcgcccaccccacgacggctctctcacatccacaggtctccgagttcacgtctcacggcgcccaccccacgacggctctctcacatccacaggtctctgagttcacgtctcacggcgcccaccgcacgacggctctctcacatccacaggtctccgagttcatgtctcacggcgcccaccccacaatggcactgtcacatccacaggtctccgagttcatgtctcacggcgcccaccccacgacggctctctcacatccacaggtctccgagttcacgtcccacggcgcccaccccacgacggctctctcacatccaccaggtctccgagttcatgtcccacggcgcccacccacaacagctctctcacatcctcctggacgtcagtatttgtag

SEQ ID NO: 117515 - DNA, 2208 bp, Homo sapiens
atgccaagctacaagggctgcggtgagactcagagacacgctaccaatggcaccgcggccccacctcgccgaagcagctgccggggagacgcgataaaactgccccacgcggaaaagaaggaagggcggcccccagcctcaacttcatatcctttgagactgggcactcgctctgcccggagctcctcccactgctggtgcaccagctgggaggatcctccagaggccactgctggagaggaaaaacgccaccccaagtctcctgctgtttgctgtggggaggggacggtgctgactgccagcacggtcacctggcgggcggagcctgcacggggagaaatctgggcgaggctgtgtccccgggaccgcccagggagcagggcagctgctgtgatttgggagaggccgtgctgcgataggctcattgctgaccggaccgggccccccaacagctcggagccccactgccgggcagcaacgattcctctgcccacctggcccctcccagaggggcagaccctgaccctgaaagccctggccaagatggcagcccccgccctgctgctcctagcactgctgctgcccgtgggggcctggcccgggctgcccaggaggccctgtgtgcactgctgccgcccggcctggccccctggaccctatgcccgggtgagaagggtgaggccggcgtccgaggtcgggccggcaggagcgggaaagagggtgccgccaggctgcccggggcctgcagggccgcagagtgccagaaggggcagtgtggggccgccgggcgccgcgtgccgacgtgcctacgccgccttctccgtgggccggcgcgagggcctgcacagctccgaccacttccaggcggtgcccttcgacacggagctggtgaacctggacggcgccttcgacctggccgcgggccgcttcctctgcacggtgcccggcgtctacttcctcagcctcaacgtgcacacctggaactacaaggagacctacctgcacatcatgctgaaccggcggccgcggcgtgctctacgcgcagcccagcgagcgcagcgtcatgcaggcccagagcctgatgctgctgctggcggcgggcgacgcctgtctggagtgttcctgaagaacttccagcagtacttccaggacaggacgagctgggaagtcttcagctacatgcccaccatcctctggctgatggactggtcagacatgaactccaacctggacttgctggctcttctcggactgggcatctcgtctttcgtactgatcacgggctgcgccaacatgcttctcatggctgccctgtggggcctctacatgtccctggttaatgtgggccatgtctggacggatggtggctccacttcaaagagtactgagagcagcgccagggctggaggggacgctgggaggccgccagcacccagggacaccgccctcggtgcttcatttctcactgacgatgaacagcatgtttgggctccaggacttcaatgtaactcccctggcagctcaagcaacgcttcctccgggaagcccgggccgccccacacttgttccgtcgaccgctgcccccaacagcctgcagatgttcacaggaggccacggggcctgattccctcgctggcaaccccaaccaccttcaggtgtgtctgccacggggcacccccaggtgtgcctcattactgccgtcaggggcgttcaccagggaaacgtgcagaggaaatggttggagagcgaagtccaggcacaggggccatgagagccggaccccacgcagctgcagacctcgacccgaactgcatgcggctgaggacccccaagccaggcagaccccgacccagaccccacgcggccgcggacccccgacctcgacccaaactgcatgcggctgaggacccccaagccaggcagacgccaatccagaccccacgcggccgcggaccccaacccagacagaccccgacccacccgtgcagcccccagccccagaagtcaaaccccagcgtcccccagggcggcccgggctccctcagatacagcagcttcctgaggtggcctcacctgcaactccagaccaatcagagaaggccaaatgggctccccaagcccagcaggaagcctcctccttggagctctgtagccatcgtgggcttgcaagagtcaaagggcctggcccacagcggcgcccggcactga

SEQ ID NO: 117516 - DNA, 2067 bp, Homo sapiens
atggatggacagtgctcccattactgtgtgaaaaccgacctcagagtacatagtccattcactacaggagcagtacatgctgaccaaagctgctgtaagacaacgtcggcgagatgggaagatacttgtgatttgacgggaagtaaaaaaactttggttatttccaatattgtcataaggaccaggtcagatgacaaactggaaaatgagtgggagacgcagtctcagaaccgcaaccgtgttaaacctactgcagctgatccctgcaggaatgaaaagaacactcttcttaggaaaaacacccggaagtactgcaggagtcagccaacgacagacttagagacaacgagagagtcagccaacgacagagtcagccaacgacagtcagccaacgacaaagtcagccaacgacagagtcagagccaacgacagagtcagccaacgacagagtcagagacaacgacagagtcagccaatgacagagtcagagacaatgacagagttacagaaaatgacagagtcagccaacgacagagtcagccaacgacagagtcagagccaacgacagagtcagccaacgacagagtcagagacaacgacagagtcagagccaatgacagagtcagagccaacgacagagtcagagccaacgtcagagtcagccaacgacagagtcaaagccaacgacagagtcagccaacgacagagtcagagacaacgacagagtcagagacaatgacagagtcagagccaatgacagagtcagccaacgacagagtcagagccaacgacagaagtcagccaacgacagaatcagagacaacgacagagtcagccaacgacagaatcagagacaatgacagagtcagccaacgacagaatcagagacaacgacagagtcagccaatgacagagtcagagacgacagagtcagagccaacgacagagtcagccaacgacagagtcagagccaacgacagagtcagccaacgacagagtcagccaacgacagagtcagagccaacgacagagtcagccaacgacagagtcagagccaatgacagagtcagccaacgacagagtcagccaacgacagagtcagccaacgacagagtcagagccaaggacagagtcagagccaacgacagagtcagtcaacgacagagtcagccaacgacagattcagagccaacaccaagaagacagacccccaaagtaccaaaacaaaaacgtgcaagtccacgctgcgacaaaccacgctcagacccccagaggcggcggaacctcacacctccagtgaagactgcagagcgacgtcctcaccaagagcatgtggtgaagggagaaaaagccacttcaccgtccagacactcaacaagcacagcccccaccaggccaccgtcagcagagacagctcatgtgaacgtgatgtgcgggggagacatggcccacattaaccagggacatgtagaggccccacagggcagccatgagaagcatgttggcgcagcccgtgatcagtacgaaagacgagatgcccagtccgagaagagccagcaagtccagaccacaggtctccgagttcacgtctcacggcgcccaccccacgacggctctctcacatccacaggtctccgagttcacgtctcacggcgcccaccccacgacggctctctcacatccacaggtctccgagttcatgtctcacggcgcccaccccacaatggcactgtcacatccacaggtctccgagttcatgtctcacggcgcccaccccacgacggctctctcacatccacaggtctccgagttcacgtcccacggcgcccaccccacgacggctctctcacatccacaggtctccgagttcatgtcccacggcgcccacccacaacagctctctcacatcctctggacgtcagtatttgtagaacactgaatgcttacccagagatgctgacaggtgagagaagcacattcccatgtgtaaacgtgaagaatgaaaaagcagttgaaagtaaaaaagatacaccattcaaatgtgaatcaaaagaaagctggatctaa

SEQ ID NO: 117517 - DNA, 448 bp, Homo sapiens
ggcaaagctgagaaaccaggtttctcctcagcaagaaggaaaatccctgcaacgtggatgcgcctctacaggagccccaggctgacaacaaccttcctgatctggtttcaaccctggatgcttttacctggtgtgtccatcagggatttcagggactccagtgagttattaccctcgaatgctcggttctgcctgacaacccagaaatctctgccaagatgcctggtggtcttggggaaggctcagcaagtggttgaggttgataaccaagtacctaggagacacttttctctccctccaggaggagctgtgggtcagacacaccctgggatcattcacaagtggtcaataaaggcttggggagggccaggttttctaggccttctcaacggggtgggtgtttgtggatacacaagaagcctgtgaaacttctgatattggcaggaaa

SEQ ID NO: 117518 - DNA, 492 bp, Homo sapiens
atggatgagtcgtcatttaggggctccatcactcagagtggcagcgccaagacagccggcctcactgggttttgtaagctgtgcaagaccagcagctggcacacaggagctgctcagatacttgaaggaggaatggagaaggcaaacagcccccagtatgcagacccccagacccatctgtcctggcacacattgccccctgggtcccaagcaacctcagccaatgagtccaacgtcaacttcctgtccttgcctgacactaacagccctgagatcagacctgaccattcacctccagtaccagataggtccgtcagtcctttggaacatatcccacgaacattccccaaaccaggcaccggactccacacatcaacaccgtcacgaatccctctgcaggagccccaagatgagaataaccttcctgatctggtttcaaccctggatgctttcaactggtgcgtccatcaaggatttcagggactccagtga

SEQ ID NO: 117519 - DNA, 543 bp, Homo sapiens
atgcaaaccccagccgcctggttccagactcgcgttcccaaggtcccactacacttggtcactccactgcattctggtatcctggtctttggcagtgtccacgtaaaagagggagggatggaaagaggagagcgatttttgggatggaagccatctgcctcctctcaactctcgctgctcaacaagaaagggaagaaaaacaggaagatgcggggcagcaacagccgcagcctcttctcctcgggagggacgtcgtcctcctccctcctgggccggccatccctgcctcgggtcttgccagtggcttcggagctgccggaaggactggccatggctccgggggctctgcctgcacttggggaagaggaaggacccggcgcgagcggcctctcggctgagctggggcatctgagcgcgggctcgggcagggcttgggacctgcagccctccattcctgagcctcccccactccgtgggctcctgtgcggcccgagcctccccgacgagcaccaccccctgctccatggcgcccagtcccattga

SEQ ID NO: 117520 - DNA, 1153 bp, Homo sapiens
ctaaaagggcactctgttcttcttgatccactcagacatggcctgtgagtgaagaaacgggctctcctcctcaaagaaatcgctgctgatcctcacaccagcctgacactgcttcatgggttcttcaaagagagtattcccatagaaaagggacagcgccccgggggatgcaaggaactttgcctctctgtccctctctgtctgggtgccggtctccttcctgcccggctgcggcgcgtcctccccgtcctcgggctgtgcgcttcccccctccagcaacagccgcagcctcttctcctcgggagggacgtcgtcctcctccctcctgggccggccatccctgcctcggggcttgccagtggcttcggagctgccggaagggctggccatggctccgggggttctgcctgcactgtttgggtccacactgcctttataagctgtaacactcactgagaatgtctgcagcttcactcctgaagccagcaagaccatgaacccaccgggagaaatgaacaactccagacgtgcagccttaagagctgtaacactcaccgtgaaggtctgcagcttcactccaggagggtccgcagcttcattcttgaagtcagtgagaccaagaacccaccaattctggacacacttatacacttggcactgggaggtagttttacactgtttgtcaatttctgtggctgggatgaacttatcgtagttctcatagaccagggtttgcatgtcgctgtctagagcccggatctgcggcaccatgtccgtctcactgtctatcagctgggccagagggcactctctaggcagcttgtctaggtaaagttccgggtcgaagtgcgccccgttcagatcagtggagtccagggggtcgggccccgcggggagtcccaccgcctcccctttcgagaggccattgtaaagctttagcatcctgtgcgccttccgccgacgctccgtgagcctccacatcgggcccttctggggagtcccaaggtccacaccccgggctaggcccagtgacagctgccgccgccatagctccaatgaactgcccttcccctttgctgggtcatgaccacggagaacaggtccactgtcctcctgcgtggtgcaccatggaggctcagatccgtcctcgagg

SEQ ID NO: 117521 - DNA, 1471 bp, Homo sapiens
atgggaatgcgaaaagaaatgtactgcagcatgctgaattggtggtcatttgtgggctccatccctcagagtggcagcgccaagacagccggcctcactgggttttctaagctgtgcaagaccagcagctggcacacaggagctgctcagatacttgaaggaggaatggagaaggcaaacagcccccagtgtgcagatgtgagggtctcccagcggcaccatcctttgccatctcatgccaagggacaaagccagagcagggctctccaccaaggctgggttctcctccaaggaaatgtgataacaggacagaaagcatcgtggaaggataggggctttggagtcccacaaaccacagtttgcaagaccaggagcatcctgcacttccttgcacacatcctggcaacctcagccaatgagaccaatgccaacttcctgtccttgcctgacactgtcagccctgagatcagacttgaccattcacctccagtacctgataggtccatcagtcctttggaacatatcccacgaaaattccccaaaccaggcaccggactccacacatcaacaccgtcacctgagaaatccaggtttctcctcagcaagaaggaaaatacctgcaacgtggatgcacctctacaggagcctcaggctgacaataaccttcctgatctggtttcaaccctggatgcttttacctggcacaacgctaagtgcttctatggacgagcttcccttaatctcagcagcaacaaccccaggcaatggagcctgttgacagatccatttgccactgaagacagtaaggctcagacaggctacagccccagcctcttctcttcgggagggacgtcctcctcctcctcccttctgggccggccatccctgcctcggggcttgccagtgtcttcggagctgctggaagggctggccatggctccgggggctctgcctgaacttggggaagaggaaggacacggcgcgagcggcctctcggcggagctggggcgtctgagcgcgggctcggtgggtccgcgtggcgcggagctgggtatcggggccggtgcgggctcctccgcgggcggctcctggcactctggcgccctcttctggccgctgtcgcgcacctccgccacgccgggcccaggcctgcgtagctctcacatgtcctggcccaggaggtcgctgtcccttgcccatggacaggcccgctctggcaatgccctgcacctcctccccgccccggccaggttgcaccccgatggtctccctgctcaaggaggagagaagagaagggacgccacgagagggtggacatcggccacagccaccttgtctttgctcttaccctgtttcttccatgatttggaggtggtgggaaaaccgaggctgctcaaaactcgtggagaattcctcctgcaggatgacatgaatgcaccttcccattgcctaccaacagatcttttttgag

SEQ ID NO: 117522 - DNA, 1473 bp, Homo sapiens
ctagtgtttgaaatgagtcttgctgatttgcagaatgatgaagttgcatttagaaaattcaagctgattactgaagatgttcagggcaaaagctgcctgtctaacttcaatggcatgggtcttacctcctctgtcattgattgttctggtaattctgagccctggttcctttattttgcagataaccttcactcttctcgagcccgtgctcagacgccccagctccgccgagaagccgcttgagccgggtccttcttcttccccaagttcaggcagagcccgcggagccatggccagcccttccagcagctccgaagccactggcaagccccgaggcagggatggcagtcccaggatgggggaggaggacgtccctcccgaagagaagaggctggggctgtagcctgtctgagccttactgtcttcagtggcaaatggatctgtcaacaggctccattgcctggggttgttgctgctgagattaagggaagctcgtccatagaagcacttagcgttgtgccaggtaaaagtatccagggttgaaaccagatcaggaaggttattgtcagcctggggctcctgtagaggtgcatccacgttgcagggattttccttcttgctgaggagaaacctgggtttctcagctttggcacagtcagaatatttgtggtgagaccattcgtggtgctggtggtggggctgtcctcttctgctgaactctatttgcttcttttcccatacgtctttatccagaagagcttttagcaacaaagttacccaatgcccttccctagtctctccttgcaactggctctcagcagggggtgggaggaaattcgagcccgcgctcagacgccccagctccgccgagaggccgctcgcgccgtatccttcctcttctccaggtgcaggcagagccccccagccgtggccagcccttccggcagctccgaagccactggcaagccccgaggcagggatggccggcccaggagggaggaggacgacgtccctcccgaagagaagaggctgcggctgtagccgtcccgcatcttcctgtttttcttccctttctggttgggcagcaagagttgagaggaggcagatggcttccatcccagaaatcgctctcctctttccatcccctctctgagccttactgtcttcagtggcaaatggatctgtcaacaggctccattgcctggggttgttgctgctgagattaagggaagctcgtccatagaagcacttagcgttgtgctggaatccctgaaatccctgatggatgcaccaggtaaaagcatccagggttgaaaccagatcaggaaggttattgtcagcctggggctcctgtagaggtgcatccacgttgcagctattttctttcttgctgaggagaaacctggatttctcagctttggcacagtcacaacatttggggtgagaccattcgtggtggtggtgggggggcat

SEQ ID NO: 117523 - DNA, 1271 bp, Homo sapiens
tttcgtccggccccgatacccagctccgcgccgcgcggacccaccgagcccgtgctcagacgccccagctccgccgagaagccgcttgagccgggtccttcttcttccccaagttcaggcagagcccgcggagccatggccagcccttccagcagctccgaagccactggcaagccccgaggcagggatggcagtcccaggatgggggaggaggacgtccctcccgaaaagaagaggctggggctgtagctggaggggggaagcgcacagcccgaggactgcgaggacggggaggacccgccgctaccgggcaggaaggagaccggcacccatacaggtggcgacggcaaaggagcggaattctccacgagttttgagcagcctcgggtttcccaccacctccaaatcatggaagacacacggtgcaggcagagcccccggagccatggccagcccttccggcagctccgaagcccctggcaagccccgaggcagggatggccggcccaggagggaggaggacgacgtccctcccgaagagaagaggctgcggctcttgctgtaggggggaagcgcacagcccgacgactgcgagaaccggggaggacgcgccgcggccaggcagggaggagaccggcacccagacaggtggcgaccgcagaggagcagcacgggcagccctcctcgccgtgggcggcatcagagcccccctgcccagtcttggggttgctcctggatgccgtctgggaggcttgctcatggtgacatccttatctccccgtgcacgttaccgcattcagagcttgggtcacctggacactgaactcaggcgaattttctctgagatcctgggagaaggaggacagttctctggaaggttttccagggccgatcacggaaaggatgagaagggagaggtcctggtcggggacacaattacgatggcagtgtaacgccgggaaactttattgcatgaagtccctctcactccctctacctccttcttttacgtggactctgccaaagaccaggataccagaatgcagtggagtgaccaagtgtagtgggaccttgggaacccgagtctggagccaggcagctggggtttgcatcctggttctgcccctccttagctggctgacatggcacaagccacttaccctctctgagccttactgtcttcggtggcaaatggatctgtcaacaggccccattgcctggggttgttactgctgagattaagggaagctcatccatagaagcacttagcg

SEQ ID NO: 117524 - DNA, 1166 bp, Homo sapiens
  misc_feature (1)...(1166): n = a,t,c or g
agcggccgccctttttttttttttttcattcaggtatttatgtccacagtcaaaataaatcaaaatttaaagctataaccatttttaaaagataaagggagaatttgtggcacagctgcattaacaaaacagacacccagtctaaagtgcaacactgagagaggtattctctgttcccacggtggaataaatacacacaattacacataagatttcactaaagataggagatgaggcaaaatacccctttgaaattaccctggcccaacaaatagagggcaggctacattaatttaacattttactgcaaaatgggaaaaaatccccgaaggtgactaactcaaactcctcattttcatggcacatggaccttgggcttctgtgttctttccataggccacatcccaaatccagaaaggctcctggcacccccatggctccaaaaatggcaaccttcaagtccctggaggtcctcagcacagactggacattaacaaagcctgtgttcagccttcatccagaacctcccagggaaatcaggagcacaaacacagagcaaagcaccgtttctttaaacaaatggctttaactgtcgaatgagctctgacaagccatatgcatttcataaaccaaacccaaaacatcatctttcatatcttccctattttttctggccaaaaatgtttaagccatccaaagtaaaaaaaaaaaatttttaatttaaccaatgaaaaaaggaaacttcaaaagggtttaagcccaaaaaaacaaaacccaatccctcctgnaagccctaaactccatttgttttttgggcctgcgaaagcccatgtaagagggccgaatccaggcagtaagatggtcccctccccacagtcaagcgcccatggtggtccgggtaaagcattttggtcaaggcaggccttcgtttcaggttagacggggcacaccatcagcttttctggaaaaaaactttttgtagctctggaaactttgtttttcccagcataatcataccctgtgggaatcggaggtccagtttagttggtgtggcaaatatgataggtggtgctttctgtggaaaccacaggctttaatacatgcgggctataggccttccgaagcccatgctcctgccaacttctgcgtgaagcccactaaacttg

SEQ ID NO: 117525 - DNA, 468 bp, Homo sapiens
atggtcacaactacttgttactgtaagaaagcaaaacctatccctcgtaggtgcagtgccaaggaatggtcttgtcagctgccatgtggacagaagttgctttgtgggcaacataagtgtgaaaatccttgtcatgcaggaagctgtcagccttgtccaagagttagtagacaaaagtgtgtctgtggcaaaaaagtagctgaaagaagttgtgcaagtccactatggcactgtgatcaaataaaagaagcagaagccaaagctgctcttgaagaagaaaaacgaagacaacaggctgaactagaagcttttgaaaacagactgaagggtcgtcggaagaagaacaggaaaagagatgaagtggcagttgagctatcactatggcaaaaacataaatattatctcatttcagtgtgtggagttgtggttgtagtgtttgcctggtacatcacccatgatgtcaattaa

SEQ ID NO: 117526 - DNA, 444 bp, Homo sapiens; identical to SEQ ID NO: 117505

SEQ ID NO: 117527 - DNA, 265 bp, Homo sapiens
  misc_feature (1)...(265): n = a,t,c or g
tntacctcctcctcctcctattgctcgggctgtagtgccctcgaaacgtcagcttgtatcaggaaagttgaaaggagatgaccttcaggccattaagaaggagctgacccagataaaacaaaaagtggattctttcctgggaaaacctgggaaaaanttgaaaaggaacagagcaaacaagcagtagagatgaagaatgataagtcagaagaggagcagagcagcagctncgggaagaaagatgagactaatgtgaagatggagt

SEQ ID NO: 117528 - DNA, 316 bp, Homo sapiens; identical to SEQ ID NO: 117507

SEQ ID NO: 117529 - DNA, 342 bp, Homo sapiens
ccgggagtaggagactcagaatcgaatctcttctcccctccccttcttgtgagatttttttgatcttcagctacattttcggctttgtgagaaacccttaccatcaaacacgatggccagcacgtgtacctcctcctcctcctattgctcgggctgtagtgccctcgaaacgtcagcgtgtatcaggaaacacttcacgaaggggcaaaagtggcttcaattctaagagtggacagcggggatcttccaagtctggaaagttgaaaggagatgaccttcaggccattaagaaggagctgacccagataaaacaaaaagtggattctctcctggaaaacctgg

SEQ ID NO: 117530 - DNA, 1402 bp, Homo sapiens
tcgaagactgagcggttgtggccgcgttgccgacctccagcagcagtcggcattctctaacgcagaaacccgggagtaggagactcagaatcgaatctcttctccctccccttcttgtgagatttttttgatcttcagctacattttcggctttgtgagaaaccttaccatcaaacacgatggccagcaacgttaccaacaagacagatcctcgctccatgaactcccgtgtattcattgggaatctcaacactcttgtggtcaagaaatctgatgtggaggcaatcttttcgaagtatggcaaaattgtgggctgctctgttcataagggctttgccttcgttcagtatgttaatgagagaaatgcccgggctgctgtagcaggaagaggatggcagaatgattgctggccaggttttagatattaacctggctgcagagccaaaagtgaaccgaggaaaagcaggtgtgaaacgatctgcagcggagatgtacgggtcagtaacagaacacccttctccgtcccctctactcagctcctcttttgacttggactatgactttcaacgggactattatgataggatgtacagttacccagcacgtgtacctcctcctcctcctattgctcgggctggtagtcccctcgaaacgtcagcgtgtatcaggaaacacttcacgaaggggcaaaaagtggcttcaattctaagagtggacagcggggatcttccaagtctggaaaagttgaaaggagatgaccttcaggccattaagaaggagctgacccagataaaacaaaaagtggattctctcctggaaaacctggaaaaaatggaaaaggaacagagcaaacaagcagtagagatgaagaatgataagtcagaagaggagcagagcagcagctccgtgaagaaagatgagactaatgtgaagatggagtctgaggggggtgcagatgactctgctgaggagggggacctactggatgatgatgataatgaagatcggggggatgaccagctggagttgatcaaggatgatgaaaaagaggctgaggaaggagaggatgacagagacagcgccaatggaggatgactcttaagcacatagtggggtttagaaatcttatcccattatttctttacctaggcgcttgtctaagatcaaatttttcaccagatcctctcccctagtatcttcagcacatgctcactgttctccccatccttgtccttcccatgttcattaattcatattgccccgcgcctagtcccattttcacttcctttgacgctcctagtagttttgttaagtcttaccctgtaatttttgcttttaattttgatacctctttatgacttaacaataaaaaggatgtatggtttttaaaaaaaaaaaaaaa

SEQ ID NO: 117531 - DNA, 1349 bp, Homo sapiens
ggaattccaaacccgggagtaggagactcagaatcgaatctcttctccctccccttcttgtgagatttttttgatcttcagctacattttcggctttgtgagaaaccttaccatcaaacacgatggccagcaacgttaccaacaagacagatcctcgctccatgaactcccgtgtattcattgggaatctcaacactcttgtggtcaagaaatctgatgtggaggcaatcttttcgaagtatggcaaaattgtgggctgctctgttcataagggctttgccttcgttcagtatgttaatgagagaaatgcccggggttgctgtagcaggagaggatggcagaatgattgcctggccagggttttagatattaaccccggcctgcagagcccaaaagtgaacccgaggaaaagccaggtgtgaaacggatctgcaagcggagatgtacgggctcctcttttgaccttggacctatgactttcaacgggactattatgataggatgtacagttacccagcacgtgtacctcctcctcctcctattgcctcgggctgtagtgccctcgaaacgtcagcgtgtatcaggaaacacttcacgaaggggcaaaagtggcttcaattctaagagtggacagcggggatcttccaagtctggaaagttgaaaggagatgaccttcaaggccattaagaaggagctgacccagataaaacaaaaagtggattctctccctggaaaacctggaaaaaattgaaaaggaacagagcaaacaagcagtagagatgaagaaatgataaagtcagaaagaggagcagagcagccagctccggtgaaagaaagatgagacttaatgttgaagattggaagtcttgaaggggggtgcagatggactctgcctgaggaaggggggacctacttggatgatgatgataattgaagatccggggggattgaccagctggaagttgatcaaaggatgatgaaaaagaggctgaggaaaggagaggatgacagaggacagcgcccaatgggaggggatgactccttaagcacatagttggggtttagaaatcttatcccattatttcctttacctaggcgcttgtctaagattcaaatttttcaccagatcctctcccctagtatcttcagcacatgctcactgttctccccatccttgtccttcccatgttcattaattcatattgccccgcgcctagtcccattttcacttcctttgacgctcctagtagttttgttaagtcttaccctgtaatttttgcttttaattttgatacctctttatgacttaacaataaaaaggatgtatggtttttatcaaaaaaaaaaa

SEQ ID NO: 117532 - DNA, 482 bp, Homo sapiens
  misc_feature (1)...(482): n = a,t,c or g
tttttaaaataagatgaattattttatttctgaattctgaaggtctgctgggcttggccaggtgattctcattcttgtggtctcttatgaggtcagtggtggctagggctgaaaccatctcaaagccttcctcactcacatctcatgggtgatcgccagctgttgctcgnacacccacatctgggactatcggccaaaacactcagaacttctccatgtgtctgggcttcctagaagacactgttcaagtagagggcaagacaatcaagaatctcaagctctatttcaaaacatttcttcccactccactactgctctatatatttttcacaatactttataccttctaaccgtaatagttattatagaggtacatgtatggtcttactataacataaactccatgagggaagatatttttagttttggctcaatgaaatatccccagtgccaaggaagcactggccctacacattcatcca

SEQ ID NO: 117533 - DNA, 3051 bp, Homo sapiens
atggggttaatggttttgaatgtagaaaattgttcttcgtttggctggatagggcgtgcccctcctcggaacacaacagtagaccttaatagtggaaacatcgatgtgcctcccaacatgacaagctgggccagctttcataatggtgtggctgctggcctgaagatagctcctgcctcccagatcgactcagcttggattgtttacaataagcccaagcatgctgagttagccaatgagtatgctggctttctcgtggctctgggtttgaatgggtaccttaccaagctggcgactttcaatatccatgactacttgaccaagggccatgaaatgacaagcattggactgctacttggtgtttctgctgcaaaactaggcaccatggatatgtctattactcggcttcttagcattcgcattcctgctctcttacccccaacgtccacagagctggatgttcctcacaatgtccaagtgggctgcagtggttgggcattggccttgtatatcaaggggacagctcacagacatactgcagaaggtcctgttgggctgagataggacggcctcctgttcctgaaatgtaatactgcactgacagggagtcatactccttaggctgctggcttggccctgggcatggtctgcttgggggaacaaggaccctgctgtggcgtatgggaagaattgggggagagggaaaccttcaaggacttaatattcaatagaaaggctccagaaggttctaatgccacttcctgtgcatttatctccctcatcctgtacagaagcatcaggggcactgtcccccactcctggctcctcccactaggctccttgtctcagcagcagccgcagcctggcatgaggacgcctccaggactggaaggtggaggaaacagtgtaagaatgcaggctacactgcgtgaccaggattccaaaggctacggaagttctaggagggcagctgttccaactggctgtagcattctgaagcttcccagaggctccccagagtgcaagctaacagcgctctgtggagcaggacggttgtggcttgctggtgctatctgccctgactttgctgccaagaccggcccaggacccagtagacaggatgcccagccaataggcctccagctatcctgctgcacagccagtcccttctggtcaagccttctctctactcctaatcgtgagaccatgtctccttctcagcccccgagtcctctgtcagccccagatgtagtagaagatcacagagctttggtaggttctcacagtgaatatcagagaaaaaaaatccatgcttctggaaggagaaaggaaaaagttattttgaaatatgccagagcattcaatgataaagaaaaaattcttggaagagccagaggagaaaagtaccttacctatagaagaacaaaggtcaaacccatttgggctgaaagtagaaaggaagaacctactgcagagaaagagggggaagatctggacaggggtgagaggcagcccgcaggccccaacggctgtcttggaaagggagaagggactcctggtcctttgggacggcctcctggtcctgaaatggaatactgcactgacagagagtcatactccttagctgctggcttggccctgggcatggtctgcttggggcatggcagcaatttgataggtatgtctgatctcaatgtgcctgagcagctctatcagtacatggttggaggacgtaggcgctttcaaacaggaatgcatagggagaaacataaatcaccaagttatcaaatcaaagaaggagataccataaatgtggatgtgacttgtccaggtgctactctagctttggctatgatctacttaaaaaccaataacagggacttaaaattggggccttatgtagatcattactatagagactacccaacgcttgtcagaactactggacaagtgtgcacaattgatccaggtcaaacaggatttatgcatcatccatcattttttacgtctgagccaccaagtatttatcagtgggtgagttcttgtctgaagggcgaaggaatgccgccttatccttacctccctggaatctgtgaaagaagcagacttgtagtcttgagtattgcactgtacatacttggtgatgagagctcggtttctgatgaatcctcacagtatttaaccagaataactgtaggattcactttaagagatttggaaactcttccctttggaattgctcttcccatcagagatgcaatttatcactgtcgtgagcagcctgcctcagactggccagaagctgtctgtctcttgattggacgtcaggatctttccaagcaggcctgcgaaggaaacttacccaaagggaagtctgctgagcttaccattggaactcaccttttcagaagtacaaaaagtaaagttgatcagaaagctcacagcactgacaaccggtatcatctccaggctctccggcacctctatgtgctggccgcggagcccaggcttctagtgcctgtggatgtggacacaaacacgccctgctatgccctcttagaagttacctacaagattaaagtaaaaggcccaagatactgggaactgctcatagatttaagcaaaggaacacaacacttgaaaactgttgcatcttgcagacctgagatctatacctgcaacaataacgcacaaccatcaccaccatccatctctagaactgttgcatcttgcagacctgagatctatacctgcaacaataacgcacaaccatcaccaccatccatctctagaactgttgcatcttgcagacctgagatctatacctgcaacaataacgcacaaccatcaccaccatccatctctagaactgttgcatcttgcagacctgagatctatacctgcaacaataacgcacaaccatcaccaccatccatctctagaactgttgcatcttgcagacctgagatctatacctgcaacaataacgcacaaccatcaccaccatccatctttccttaccttttcagtaacaattctagtttctggtag

SEQ ID NO: 117534 - DNA, 422 bp, Homo sapiens
ggcacgagggcggcctcactgctatgggccgcaacaagaagaagaagcgagatggtgacgaccggcggccgaggctcgttcttagcttcgacgaggagaagaggcgggagtacctgacaggcttccacaagcggaaggtcgagcgaaagaaggcagccattgaggagattaagcagcggctgaaagaggagcagaggaagcttcgggaggagcgccaccaggaatacttgaagatgctggcagagagagaagaggctctggaggaggcagatgagctggaccggttggtgacagcaaagacggagtcggtgcagtatgaccaccccaaccacacagtcaccgtgaccaccatcagtgacctggacctctcgggggcccgggctgctcgggctgaccccacctgagggaggggctggagacag

SEQ ID NO: 117535 - DNA, 438 bp, Homo sapiens
  misc_feature (1)...(438): n = a,t,c or g
tggtgcctattatgggccctccaagtggctctgggtgctcagcctgctgtgaagcaggaacagctgaagtccccaggggttcttgcacacagcagggctcgggtttgaaancccaggctctgcctgcttggtcgcctgcatgagcttcctgctgtgctgacctctctggtttgtctcgtcatgtgtaaggtgacaccagatacctacctcttagggctgccccgagactaaaataagaccatgtgcatgaaccacttaccaaagtgcctgttgctctccaggtgtgcctaccgcatgttgccgctgctgtttctgctgggacgtctgactccagttccttctcccctctccagtgacaaggtcatttacaacttacatttacaatttatagtgtttaccagtattaaattctcagccactccttaaaaaaaaaaaaaa

SEQ ID NO: 117536 - DNA, 826 bp, Homo sapiens
gacgaggagaagaggcggtgagtggcaaagccggaccggactcccctcgagctgttcttcgcggccaaggccaggtctggggcgcagcggctgaaagaggagcagaggaagcttcgggaggaggtacgcagggggaaggtgggagggaggtctttgattcttagggcacttgcagccttggatttccctcctgacctggagaacagctgatgggcctggtttatacccttggtgggtgaccacacagtcaccgtgaccaccatcagtgacctggacctctcgggggcccggctgctcgggctgaccccacctgaggtgggtcccagtctcagccctgggaggaaggggcgtgggggcagaccagcttgtcagggttgctcaaggaagtccagagaccccctgctctctcagcggtgagtcttggcctgctgcctccccggtcccacccctcctggctggcagtagtgacctggcccttaacgggccccaggactccaaaaagcccccaagggcccctcgtaccagcaaggcccagcgccgccgtctcacaggcaaagcacggcacagcggggagtgagaccgagaacgaagcggtgccccagtttaggctgcggggacctgtccttgctcagcttggctgtccctgtagcccagcctgcacctaggtgtgcctaccgcatgttgccgctgctgtttttgctgggacgtctgactccagttccttctcccctctccagtgacaaggtcatttacaacttacatttacaatttatagtgtttaccagtattaaattttcagccactcctttcaaaaaaaaaaaaaaaa

SEQ ID NO: 117537 - DNA, 403 bp, Homo sapiens
  misc_feature (1)...(403): n = a,t,c or g
acctgatattcttccgccgtcgaccagggtttgaagatgcccactggataggaattcaccaattctcctctgagttcattttctcacaatgaccacaaccgctcacaagcgaaagacaagttcaattttggtaactgtgctggctccaaatacacagacagggaagaaaaccctgttcccccccaagtttgaaaggatgatgagccacatgcatgcccccaagacgcagaaaaggtggctttttgtcttcagtgagtatggatatcataacccatagtccagggaatgaaaaaattaaaatgccccccccaacaatgagcaaacaacccggggtgcttcaacaagactgcagggaaaagctctctcactgtttagtgtgcagtagcttagggnnnnnnnnnnt

SEQ ID NO: 117538 - DNA, 1860 bp, Homo sapiens
tcaaagtctgtcacagctgaaggaggagaattcagtcatgtctggttcagtggccacactacctgtcaggccatacagggttctttccagggctgtttcattctggcattgcaagcattctgctgagaacgcattgttaccctcatttgcagaagaaggaacagaagttcccgagagtgcattattaggctgcccacatctcacttccacaatccgcaggttgctgtagcaatcagccggcacggggacatgtgaagagctcctgagactcccaggaaaatacttggtgaagcagggggctgtcggggtgacggtgacagacctgcttttcagcctgtgaggaacagcagaccttttctctctaagctccttgggcagtgtggtaggagcacactctgcaggttgtgtttccgctctctcaatcacctcttttggctttttccggggcctggctggaggggtcccggcggacactccactgaggatggcagtctccagggcaaagcaggacaggatttcagctgctagaacctcgagatctcttttttcccctaaccaagtccaacttgctctcccaccctgcactgtggccagaagccccgtgctgggcaggggcacctgcactctgtcaccaggagccccgtgctgggcagaggtacctgcactgttgccgcgccgggtgggtgatctcaggacctgatattcttccgccgtcgaccagggtttgaagatgcccactggataggaattcaccaattctcctctgagttcattttctaaaggatagagcgacaacacaaaataccgcacgcccaccaatgggctggcggcctctccagcagagccggcagatttccccagctgtgggaggaaagctctgttctcttcctgtgatgatataagcctctcctcatccgtcagcttcagttgtaggagagactcctgcctaaatcggtggttggggttggcttgaggtttccagctgattggcctccacacgtgagggggacgcagccgggcctcctcgagtcccgcgttccttctgtgagggggacgcagccaggccttccgggccttcccgagtcccgcgttccttctgtgaggcggacgcagccgggcctcctcgagtcccgcgttccttccgtgagggggacgcagccaggccttccgggccttcccgagtcccgcgttccttctgtgaggcggacgcagccgggcctcccagacgcccgcgttccttacgtgagggggacgcagccgggccttccgggccttcccgagtcccgcgttccttacgtgaggcggacgcagccgggcctcccagacgcccgcgttccttacgtgagggggacgcagccgggccttccgggcttccggccttcccgagtcccgcgttccttctgtgagggggacgcagccgggcctcccagacgcccgcgttcctacgtgagggggacgcagccgggccttccggccttcccaagtcccgcgttccttgtccgcgttccttccttgagggggacgcagccaggccttccgggccttcccgagtcccgcgttccttccgtgaggcggacgcagccgggcctcccagacgcccgcgttccttccgtgagggggacgcagccaggccttccgggccttccggagtcccgcgttccttccgtgagggggacgcagccgggcctcccagacgcccgcgttccttacgtgagggggacgcagccaggccttccgggccttcccgagtcccgcgttccttacgtgagggggacgcagtccagccttccgggccttcccgagtcccgcgttcctttcgtgagggggacgtagccgggcctccccgagttccgcggtcat

SEQ ID NO: 117539 - DNA, 497 bp, Homo sapiens; identical to SEQ ID NO: 117417
  misc_feature (1)...(497): n = a,t,c or g

SEQ ID NO: 117540 - DNA, 4458 bp, Homo sapiens
ccttctcctgggggccagatgcatgctggaatcagtagctttcagcagagtaactcaagtgggacttacggtccacagatgagccagtatggaccacaaggtaactactccagacccccagcgtatagtggggtgcccagtgcaagctacagcggcccagggcccggtatgggtatcagtgccaacaaccagatgcatggacaagggccaagccagccatgtggtgctgtgcccctgggacgaatgccatcagctgggatgcagaacagaccatttcctggaaatatgagcagcatgacccccagttctcctggcatgtctcagcagggagggccaggaatggggccgccaatgccaactgtgaaccgtaaggcacaggaggcagccgcagcagtgatgcaggctgctgcgaactcagcacaaagcaggcaaggcagtttccccggcatgaaccagagtggacttatggcttccagctctccctacagccagcccatgaacaacagctctagcctgatgaacacgcaggcgccgccctacagcatggcgcccgccatggtgaacagctcggcagcatctgtgggtcttgcagatatgatgtctcctggtgaatccaaactgcccctgcctctcaaagcagacggcaaagaagaaggcactccacagcccgagagcaagtcaaaggatagctacagctctcagggtatttctcagcccccaaccccaggcaacctgccagtcccttccccaatgtcccccagctctgctagcatctcctcatttcatggagatgaaagtgatagcattagcagcccaggctggccaaagactccatcaagccctaagtccagctcctccaccactactggggagaagatcacgaaggtgtacgagctggggaatgagccagagagaaagctctgggtcgaccgatacctcaccttcatggaagagagaggctctcctgtctcaagtctgcctgccgtgggcaagaagcccctggacctgttccgactctacgtctgcgtcaaagagatcgggggtttggcccaggttaataaaaacaagaagtggcgtgagctggcaaccaacctaaacgttggcacctcaagcagtgcagcgagctccctgaaaaagcagtatattcagtacctgtttgcctttgagtgcaagatcgaacgtggggaggagcccccgccggaagtcttcagcaccggggacaccaaaaagcagcccaagctccagccgccatctcctgctaactcgggatccttgcaaggcccacagaccccccagtcaactggcagcaattccatggcagaggttccaggtgacctgaagccacctaccccagcctccacccctcacggccagatgactccaatgcaaggtggaagaagcagtacaatcagtgtgcacgacccattctcagatgtgagtgattcatccttcccgaaacggaactccatgactccaaacgccccctaccagcagggcatgagcatgcccgatgtgatgggcaggatgccctatgagcccaacaaggacccctttgggggaatgagaaaagtgcctggaagcagcgagccctttatgacgcaaggacagatgcccaacagcagcatgcaggacatgtacaaccaaagtccctccggagcaatgtctaacctgggcatggggcagcgccagcagtttccctatggagccagttacgaccgaaggcatgaaccttatgggcagcagtatccaggccaaggccctccctcgggacagccgccgtatggagggcaccagcccggcctgtacccacagcagccgaattacaaacgccatatggacggcatgtacgggcccccagccaagcgccacgagggcgacatgtacaacatgcagtacagcagccagcagcaggagatgtacaaccagtatggaggctcctactcgggcccggaccgcaggcccatccagggccagtacccgtatccctacagcagggagaggatgcagggcccggggcagatccagacacacggaatcccgcttcagatgatgggcggcccgctgcagtcgtcctccagtgaggggcctcagcagaatatgtgggcagcacgcaatgatatgccttatccctaccagaacaggcagggccctggcggccctacacaggcgcccccttacccaggcatgaaccgcacagacgatatgatggtacccgatcagaggataaatcatgagagccagtggccttctcacgtcagccagcgtcagccttatatgtcgtcctcagcctccatgcagcccatcacacgcccaccacagccgtcctaccagacgccaccgtcactgccaaatcacatctccagggcgcccagcccagcgtccttccagcgctccctggagaaccgcatgtctccaagcaagtctccttttctgccgtctatgaagatgcagaaggtcatgcccacggtccccacatcccaggtcaccgggccaccaccccaaccacccccaatcagaagggagatcacctttcctcctggctcagtagaagcatcacaaccagtcttgaaacaaaggcgaaagattacctccaaagatatcgttactcctgaggcgtggcgtgtgatgatgtcccttaaatcaggtcttttggctgagagtacgtgggctttggacactattaatattcttctgtatgatgacagcactgttgctactttcaatctctcccagttgtctggatttctcgaacttttagtcgagtactttagaaaatgcctgattgacatttttggaattcttatggaatatgaagtgggagaccccagccaaaaagcacttgatcacaacgcagcaaggaaggatgacagccagtccttggcagacgattctgggaaagaggaggaagatgctgaatgtattgatgacgacgaggaagacgaggaggatgaggaggaagacagcgagaagacagaaagcgatgaaaagagcagcatcgctctgactgccccggacgccgctgcagacccaaaggagaagcccaagcaagccagtaagttcgacaagctgccaataaagatagtcaaaaagaacaacctgtttgttgttgaccgatctgacaagttggggcgtgtgcaggagttcaatagtggccttctgcactggcagctcggcgggggtgacaccaccgagcacattcagactcactttgagagcaagatggaaattcctcctcgcaggcgcccacctccccccttaagctccgcaggtagaaagaaagagcaagaaggcaaaggcgactctgaagagcagcaagagaaaagcatcatagcaaccatcgatgacgtcctctctgctcggccaggggcattgcctgaagacgcaaaccctgggccccagaccgaaagcagtaagtttccctttggtatccagcaagccaaaagtcaccggaacatcaagctgctggaggacgagcccaggagccgagacgagactcctctgtgtaccatcgcgcactggcaggactcgctggctaagcgatgcatctgtgtgtccaatattgtccgtagcttgtcattcgtgcctggcaatgatgccgaaatgtccaaacatccaggcctggtgctgatcctggggaagctgattcttcttcaccacgagcatccagagagaaagcgagcaccgcagacctatgagaaagaggaggatgaggacaagggggtggcctgcagcaaagatgagtggtggtgggactgcctcgaggtcttgagggataacacgttggtcacgttggccaacatttccgggcagctagacttgtctgcttacacggaaagcatctgcttgccaattttggatggcttgctgcactggatggtgtgcccgtctgcagaggcacaagatccctttccaactgtgggacccaactcggtcctgtcgcctcagagacttgtgctggagaccctctgtaaactcagtatccaggacaataatgtggacctgatcttggccactcctccatttagtcgtcaggagaaattctatgctacattagttaggtacgttggggatcgcaaaaacccagtctgtcgagaaatgtccatggcgcttttatcgaaccttgcccaaggggacgcactagcagcaagggccatagctgtgcagaaaggaagcattggaaacttgataagcttcctagaggatggggtcacgatggcccagtaccagcagagccagcacaacctcatgcacatgcagcccccgcccctggaaccacctagcgtagacatgatgtgcagggcggccaaggctttgctagccatggccagagtggacgaaaaccgctcggaattccttttgcacgagggccggttgctggatatctcgatatcagctgtcctgaactctctggttgcatctgtcatctgtgatgtactgtttcagattgggcagttatga

SEQ ID NO: 117541 - DNA, 2302 bp, Homo sapiens; identical to SEQ ID NO: 117421

SEQ ID NO: 117542 - DNA, 1498 bp, Homo sapiens
ggaggagccgagccggagggagccgcggcgcccggccatgcaccgggcgcagtagcgggaggcgcgggcccgatggcgcgggccggggcgcggggactgctcggcggccgccgtcctcccggcctccggctcgcgctcgcgcttcggctcgcgttgctgctggcgcggccgccgtcgggccgcgcgggagcccccgaggcgcagggtcccgcggcgcccggcacgacagccccggaggggggcgaccgctgccgcggctactacgacgtgatgggccagtgggacccgcccttcaactgcagctccggagcctacagcttctgctgcggcacgtgcggctaccgcttctgctgccacgacgggccgcggcgcctcgaccagagccgctgttccaactacgacacgccggcctgggtccagacaggccggccgcccgcccgcgcccgcgacaccgcagcgccccgggaccccggccgcgagcgcagccatacggccgtctacgctgtgtgcggcgtcgcagcgctgctggtgacggtggtggccggggctggcttttgatgaggtgggagacagagggccacccctgactgctgtccccgcagggcgctgacagagcttctgaagcagccgggcccccaggagccactgcctcccaccctgggcctacggagaggtgacagcgagggcggagtgaaccggggcatcggaccgagccgcgtctcactcctcgctccagacaagaagcgcctcaacaacgcgccccgggggtcggccgccccggggcccccgcgcggcccgcggctgcagggcgccgggaccccttgtccagtcctgagcttgggtgctcggcgcggcgtcactcttccctgccctgtccccgcagaggccgccccgcgggacttctgtcagcgtttccccgccctcgagccgtccccgcggcaacccccggcgcgggctccgcgaccatccccggacttgcctgcgccgctggacgcctgcccctgggccccgccggtctacgcgccccctgccgcgccgggcccctatgccgcctggacctccagtcgcccggcccggcccgccccgctcagccacccgacggctcgggccttccaggtaccccggcgacccgggcacgcggcccggcgccagttcagtgtgaagatgcctgagaccttcaacccgcagctccccggcctttacggcagcgcgggccgcgggtcccggtacctaaggaccaatagcaagaccgaggtcaccgtgtgaagcggggccgcggtgccctcgaggcatgggctggggtcctgtctgcccgtcggagcctcaggccacagggagaggagcgcctgccgtaaggccagctcttctgtctgcctcaacggcagtggtgtcttggagcctgcaggccgcgggttcgtcttgtaaataagcccttttatgtggttcctgcccctgagaataaagaagccccagcgtggctgcgaggcaccattggtca

SEQ ID NO: 117543 - DNA, 262 bp, Homo sapiens
gagctagaggcccaccttgaggctgaggagggtgcgcggcagaagctgcagctggagaaggtgacgacagaggcaaaaatgaagaaatttgaagaggacctgctgctcctggaagaccagaattccaagctgagcaaggagcggaagctgctggaagatcgtctggccgagttctcatcccaggcagctgaggaggaggagaaggtcaagagcctcaataagctacggctcaaatatgaggccacaatcgcagacatggagg

SEQ ID NO: 117544 - DNA, 1921 bp, Homo sapiens
gtgcatgagctggaacgtagctgccgggtagcagaacaggcagccaatgatctgcgagcacaggtgacagaactggaggatgagctgacagcggccgaggatgccaagctgcgtctggaggtgactgtgcaggctctcaagactcagcatgagcgtgacctgcagggcagtgatgaggctggtgaagagaggcggaggcagctggccaagcagctgagagatgcagaggtggagcgggatgaggagcggaagcagcgcactctggccgtggctgcccgcaagaagctggagggagagctggaggagctgaaggctcagatggcctctgccggccagggcaaggaggaggcggctggagtgcagcgacgtgatctcagctcacagcaactctgcctcccaggcccagatgaaggagctatggcgtgaggtggaggagacacgcacctcccgggaggagatcttctcccagaatcgggaaagtgaaaagcgcctcaagggcctggaggctgaggtgctgcggctgcaggaggcccagcaggaccgggatgagatggcagatgaggtggccaatggtaaccttagcaaggcagccattctggaggagaagcgtcagctggaggggcgcctggggcagttggaggaagagctggaggaggagcagagcaactcggagctgctcaatgaccgctaccgcaagctgctcctgcagactgagcagaattgatgacatctccaattatgaggtcaatttagaacctggtgggcatgatgatatcacaagttgccaggggcggggccgtagcttgccgcagcgggcgccgattggcctctgctgctctcttgggggcggggctgtcctggcggacacgcccctctttctccccaggccgaagcctcgggacggtcctggaagccgggccttccagaagcgccagcagcagcagagcgccctgagggtgatgcagcggaactgcgcggcctaccctcaagctgagacactggcagtggtggcggctgtttaccaaggtgaagccactgctgcaggtgacgcggcaggatgaggtgctgcaggcacgggcccaggagctgcagaaagtgcaggagctacagcagcagagcgcccgcgaagttggggagctccagggccgagtggcacagctggaagaggagcgcgcccgcctggcagagcaattgcgagcagaggcagaactgtgtgcagaggccgaggagacgcgggggaggctggcagcccgcaagcaggagctggagctggtggtgtcagagctggaggctcgcgtgggcgaggaggaggagtgcagccgtcaaatgcaaaccgagaagaagaggctacagcagcacatacaggagctagaggcccaccttgaggctgaggagggtgcgcggcagaagctgcagctggagaaggtgacgacagaggcaaaaatgaagaaatttgaagaggacctgctgctcctggaagaccagaattccaagctgagcaaggttgggggcctgagggcagctgggaaagtggggatggggtgcattggtgggttaatgaatggtgaacttcacgccatgggggttaccacactgcggttctcaggagcggaagctgctggaagatcgtctggccgagttctcatcccaggcagctgaggaggaggagaaggtcaagagcctcaataagctacggctcaaatatgaggccacaatcgcagacatggaggaccgcctacggaaggaggagaagggtcgccaggagctggagaagctgaagcggaggctggatggggagagctcagagctgcaggagcagatggtggagcagcaacagcgggcagaggagctgcgggcccagctgggccggaaggaggaggagctgcaggctgccctggccaggaggcagaggttccagtga

SEQ ID NO: 117545 - DNA, 681 bp, Homo sapiens
taaaaatgagaagattgataaagtctaagaaagatatttaatcgggaacgccagaaatctctatcattaacacccagcccgctcagactccggtgaaggattccttcagctccctcatcaagacagtcaagatagtacttcagtaggtacaaactcttaagaaagatggccagacccagcatcccagaccgatttaagatgcacagtcctccgtatgttgtgctggttctcaacacggaatgtaagcaaatcactcccaagagtaaagatttccgtgcagtaacctcatggtcccaagatggaagtcctctgctgtccctgcagggttactttcgtattttgagaccggggaaatattccaggagcgacgccctcacggcacattgaccctgggacacctgatctcaagcggcctcccccgacggacgcgcagcacaccccaccccgctgggcctgtctcggcggtcgcttctaggggcctcacctcggggggctccacgacctcagtgtggatggccagggcaccgagccgctgctcgagcgccgctcccaactccgcgcccgccgtggagccgctatcgtggcgatgggcggaaaaacggcacggcttcccgcggctgcgcagaccgaagcctgaggcggaactgcccagagggatctcggccgacgccggcagcgtag

SEQ ID NO: 117546 - DNA, 311 bp, Homo sapiens
atggcggcgcacaggaagcacgtgtttgtggagaaggtgctgcagagactttttcctcctgttccaagtggccaaggaaagagggaaccccagacgctggccgtccaaaatccaccaaagaaagtgacctctgagaaagtgagccagaaacatgctgagcctttgacagacactggctctgagaccccgactgcccgacggctctacactgccagcgggcctcctgagggctacgtcccctgttggcccggagcccagcagctgtgggagcccccgagaacgcctccagcggggatgacacagaagatcag

SEQ ID NO: 117547 - DNA, 1562 bp, Homo sapiens
tcacgtttgcacaagctttgcaataagcccagacggtctggcacaacaaacgctaagcgtgtgggtccagactgtcaccccatgggcagagaaggggcccgctaacaccacgcgctgagggggcgcaggggagaggcgggaacccgtggagggaggcagcggcgcagggagcaggactggagggaggcgggtcccggacccagggctgaagtcggcagaactgcggccagtgcccgccgcgcccgggggagcgcgccaggcccgcggggccctagccgaggccgtagtaggtggaatacggggcagccacggaggaatcgggggcgaggcgcggagaggccccggatgcagcggtcccgccccgagaacggagcgcgcggaaccggcgcaggcctccgaggcttccagccgagacggcacccaggtttcccgagcagggtctgaggctccaaggacatcccggcggcgagaaggcgcgtagagacctgcccgggtcccgagccccgaccgcagccccagctcccgccgaggccctggaaaggcgggggagacgcgcggggcgatccaaaatttcctcaggcacccaatgcagttcccggcttctgtgtcatccccgctggaggcgttctcggggctcccacagctgctgggctccggccaacaggggacgtagccctcaggaggcccgctggcagtgtagagccgtcgggcagtcggggtctcagagccagtgtctgctgtgtggcccagttccttacaggcaacagaccagtactggtccatgacccgggggttggggatccccgatctgatgtcccctgcagtgctctgatcagtggaactggctgtcaaaggctcagcatgtttctggctcactttctcagaggtcactttctttggtggattttggacggccagcgtctggggttccctctttccttggccacttggaacaggaggaaaaagtctctgcagcaccttctccacaaacactgtggcagtcttctctgatttctttattttcctggtgaagcaagggcaagggctgaagtgggccaggggctggctgtgagcccctccatagctgtcggctgccaggagcagcccagaggagctgaggggaacctgccccctaaaccagcagatccctgtgcaggaaccaaacagccacgtgcgcagaggggcgtgcagcaggggacgtcccagtagccatccacggtggtgatgacctctggtagaggggcacacagcaggggaggtcccgtgcgcagaggggcacacagcagggaggttccagccgccgtccacggtggtgatgacttctggtagaggggcacacagcagggagggttcagcaaccgtccacgggtggttgacctctggtagaggggccaccagcaggggaaggtccgtttgcagaggggcacacagcagggaggtccagccagctgtccacggtgttaacgaccttcttaccccacaggtgacttgcagatttcgaaggggaggagcagctttgcaggggggatccagctgctggcactgagcacccagacgggagg

SEQ ID NO: 117548 - DNA, 393 bp, Homo sapiens
ggggcagctactgggtcagtgacaagaggctgcccccctgctcactcagccaggccctcacctacttcctggacatcaccacacccccaacccagctgctgctccaaaagctggcccaggtggccacagaagagcctgagagacagaggctggaggccctgtgccagccctcagagtacagcaagtggaagttcaccaacagccccacattcctggaggtgctagaggagttcccgtccctgcgggtgtctgctggcttcctgctttcccagctccccattctgaagcccaggttctactccatcagctcctcccgggatcacacgcccacggagatccacctgactgtggccgtggtcacctaccacacccgagatggccagggtcccctgg

SEQ ID NO: 117549 - DNA, 1089 bp, Homo sapiens
tttgagattttgatttgtttttaatgatttgcccacctaccacccaaactgcctaggacacgacagctggggaaagtgccattcaacaaagatttgaccccagcccatgagttgctgacagtggaagtcacataagttagataagtgtaccggactgagttcctccaggacaggaactatttcttcttaagcttggtagtctcagcaccccggacagtgcctggcacatggacttgtttgttgagtgagtgaagaaatgaatgaatactgggttgtgacagccttttccccaaagcagggcaggcgccctgagtcgctcacatcacccttggctttcagtcctcagagtacagcaagtggaagttcaccaacagccccacgttcctggagttgctggaggagttcccatccctgcaggtgtctgctggcttcctgctctccctgctccccattctgaagcccaggttttactccatcagctcctcccaggatcacacgcccacagcgatccacctgactgtggccgtgctcatgtaccacactcgagggttgcaaccagcaagggccacgctcatgagcacgcacagcagtagccaccccgaggggccacttcctgctgctgtcagtggagctcagtgcgccagcggcttccggctccccgaggacccctcccatcctcgtgtcctcatcgggcctggcacaggcatccctcccttcctcagtttctggcagcagcggctccatgactcccagcaaaagggtgtggctggaggcttcccaggagtgcagggaggccgcatgaccccggtgttcgagtgccgcagcccaaatgaggaccacatctaccaggaggagatgctggagatggctcggaagggggtgctgcctgcggtgcccacagcctattcctgcctgcctggcaagcccaaggtctgtgttcaggacatcctgcagcagcagctggccagcgaggtgctccgtgtgctccacaaggagccgggccacctctatgtttgcagggctgtgtgcatggcctgggatgtggcccacaccctagcagctggtggctgcctagctgaacttgaatga

SEQ ID NO: 117550 - DNA, 478 bp, Homo sapiens
aattgtagatcattagtccatgcggtggaattcgcctttccaccatcatccagagcaggacaaacacgccaggtggtgtcaggagcccaggtctccagctggagggaatgtcaaccctgcagtgggagcccatcatgcatcctaggcacagatgctaacgtaggcaccgcaggtaagctgggtttggtaccccttcctggcttcagaaagaagccaaacaaggagctttctgcagaatgaaacctcttttccatccacaagcactgctgactgtttggtggttgctgttagggcagtgagccttttgtccattctgagattgggctggtttctcctcttggccctggcctacagaccataaaggaaaacagcaagaggtccccagcaaacatctacagatggccctggacatcagccacattcagagaaacgtgtcatgttctgggagggctaaggcatcgagtaaggcctatggggc

SEQ ID NO: 117551 - DNA, 994 bp, Homo sapiens
atgggtttggctaaacaggctggaaaagtaaaagcaaaaggaccagagggtgcttggcttgaggagacccccagcattttccatgaactgcatgtggattcattgcctgcatcggatgacaaagacttgaatattgctactaagaccataaaggaaaacagcaagaggtcctcagcaaacatctacagatggccatggatatcagccacattcggagaaacgtgtcatgttctgggaggaataaggcatcgagtaaggcttatgggactggaggatctcagggcagggcctgcgacctggggcacaactttagacaccatcatcctgggagcggcactgcaccctcactagccagggtgttgatgacttcctcaatgccaaggccacgttcaagattttcgacttcagtgatgcgtttgtgctgagcaaggtgggcttctccgggatcttaattcaaaaggatgaaaataaggaggagttgtcagacaaggacatatacatggaggctggcatcttcgtgagtgccaatcgtggtcctggtgtggactactgtgggaacaggggtctctccatccagggacatggtggatggaccctacgtccctccattctggtttcacccggggtggaggtacgaggaaatgaggatagtgtggacactgctgcctgcatcccagcagccccagctcctgctccgaccttggctgaaagatgcacaggtacagcttgggtcactgcctcagagggtgcaagctataggccttggttgcttctacatagtgttaagccagtgagtccacacagcactagtctagagacttgggagcctccatatatatttcagaagatgtatgaaaatgcctggtgtccagacagaaggctgccaaaaaagcagagtctcatgggaaacctctacttgggcagtgcagaaggaaaatatggggttggagcccccacactggagaccaccatcatgcagaccccagattcatag

SEQ ID NO: 117552 - DNA, 407 bp, Homo sapiens
  misc_feature (1)...(407): n = a,t,c or g
accgctgattgcgccaagcccgttcccttggctgtggtttcgctggatagtaggtacggacagtgggaatctcgttcatccattcatgcgcgtcactaattagannnnnnnnnnnnnnnnnnnnnnnnnnnnnnnnnnnnnnntcccgccgtttacccgcgcttcattgaatttattcactttgacattcagagcactgggcagaaatcacatcgcgttaacacccgccgcgggccttcgcgatgctttgttttaactaaacagtctgattcccctggtccgcaccagttctaagtcggctgctaggcgccggccgaggcgaggcgcctcgcggaaccgcggtcccgggggcggacccggcgggggggaccaggccgcggncccttctccgtctgacgccgacgccg

SEQ ID NO: 117553 - DNA, 367 bp, Homo sapiens
cagtaataaatcttaaactacaagatatattaataaatgggataaaagccataataaatgtatcccccagaaaactaataaatatctaaccgccttaataataaaacctattctctattatatataagatattttttatatattataatattctatttattcaatttgagagcaggtactgtttattaaccaaccagcttagaaaaataatcatggtagacaccttagttcattcttctaataagcctgttgatctggtcatccctgttgccagcatctccacctctcatgtctcttcaccgtgccagactagcgtcaagctcaacagggtcttctttcccagctgattccgccaagccctcgtgcc

SEQ ID NO: 117554 - DNA, 810 bp, Homo sapiens
  misc_feature (1)...(810): n = a,t,c or g
cccttctgctccacgggaggtttctgtcctccctgagctcgccttatgacacctgcgttaccgtttgacaggtgtaccgcccccagtcaaactcccccacctggcaaacttgttccccccgggaagactgtgtgctcggcgcgcggtccgggcgcttggcgccagaagcgtagacgcacctcggcgcgcgcccacccgcctcaccgggtcagtgaagagcggatcagagtagtggtatttccccgctggccgcgcagggccggcggaccccggccccgggcccctcgcggggacaccgggggcgggcgccgggggcctccccacttattctacacctctcagagtctcttcacccgtgccaagactagagtcaagctcaacaggggtcttctttccccgctgattccgccaagcccggttcccttgtgctgtggtttcgctggatagtacggtagggacagtgggaattctcgttccttccattcatggggcgtcattaattagatgacgaggcatttggtccactaggcactngcattccacgcccggctccacgccagcgagccgggcttcttacccatttaaagtttgagaataggttgagatcgtttcggccccaagacctctaatcattcgctttaccggataaaactgcgtggcgggggtgcgtcgggtctgcgagagcgccagctatcctgagggaaacttcggagggaaccagctactagatggttcgattagtctttcgcccctatacccacggtcggacgaccgatttgcacagtcaggaccgcgtctcgtgccgaattc

SEQ ID NO: 117555 - DNA, 732 bp, Homo sapiens
atggatctctgctccctgcagaccctacacttttcacattctgctgaactgtcttcccaactcaagcagggacagatctctggaatccaaggaagagaagtttcctgtgcaagagatagaaataagaggcacccaaataagaaagaggaagtcaaactatccctgtttgcagataacatgatactaaatctagaaaagcccacagtctctgcccaagagctccttgagctgataagcaacttcagcaaaattttgggatacagaatcaatgtacaaaactcagtagcattgctatacactaacagtacccaagcagagccaaatcaggaaaacaatccctttcacaactgccaaaaaaaagaaaaatacataggaatactgctaaaccgggaggggctgctgcttgccctgcacatggagaatcagagcacaaacctgcctgacctagacccaatgctgctttgccccaccacctacccaggcggaggtgaaagaagagaaagagaaagaaagaggagaggagaaaaagagaagcagaaagtccttcggaaatacaaggaggcaatgagcaacaaggtgtgcaagtattttgatgaaggatgtgggagctgcccatttggagagaactgtttttacaagcatgtgtaccctgatggccgtagagagaagccacagagacaaaaagtgggaacatcaagcagatactgggcccaacgaagcaaccatttctga

SEQ ID NO: 117556 - DNA, 840 bp, Homo sapiens
tgtggttgcagttggagaggatcccgaagcggcgctcacacctactgtctcaaattgcttagcactcctccacttgcgaatgcacttgagacagtaggtgtggttgcaagtggaggagtgctaagcaatttgagagcaagatcataaagtcctgcccagaatgccggatcacatctaactttgtcattccaagtgagtactgggtggaggagaaagaagagaagcagaaactcattctgaaatacaaggaggcaatgagcaacaaggcgtgcaggtattttgatgaaggacgtgggagctgcccatttggagggaactgtttttacaagcatgcgtaccctgatggccgtagagaggagccacagagacagaaagtggggaacatcaagcagataccgggcccaaccgaaggaaccacttctgggaactcattgaggaaagagagaacagcaacccctttgacaacgatgaagaagaaggttgtcaccttttgagctgggcgaggatgttgcttatgcttttggctgcaggtggggacgacgaactaacagactcttgaaagatgagtgggacttgtttcatgatgagctggaagatttttatgacttggatctatagcaaccttgcgtggcgtgtgaactgttctgctgacctcagacagcagctgtcccctgtggtggtgtgccagtgcctgtgttctctcctaggcaggcctctcaactccaggtgctgtcctaagaatttttacccagggcctgtcttctcaacccctcacctttccctgaggagtgtgttgttttccctgttgaaaaaagttacaaaaataaatcttaaagttaa

SEQ ID NO: 117557 - DNA, 656 bp, Homo sapiens
gaaatcacttttatattgtcacatgggccctctgcacagagtccgatggctcctcccggggaagcctgattttgtgacgtgtgtatagtaaatgcaggccctctggcagcaccataattggtcggttaccctgagcccagagctctgaaagcatctgtggaatgatcacgggacccttctcctctgagaaggctcccggctgcctccccgccaccgagcttgtagcctgaatgcctggctgtcgcatggagcattttgcttctggggtgtcttccttagccaaagggaacgtgtcatttgctcgaccctggcccacccttgccgcccagctgttgtgctgggcacaggtctggggcacaggcctccatgatgaagacgcgtgggctgtcggtgctttcatccgtcacaaactggcacctgtacctgacgtcccccctggaatgtacaccattgaccggccacatgccacctggcatataacaggcattcatggtcacctcatagagcacctggcatatagcaactgctatacagctatcagcccatgtatttgttgtcattaccagcaacttcatcactatcaccaacaccaccatcatcatcaccactatcgtcaccatcatcaccatcaccaccatcattactgtcaccaccat

SEQ ID NO: 117558 - DNA, 1482 bp, Homo sapiens
atgcagctgcagatcctgacaatattcttggatctccaccacaacaccaacatctgcaatgaacttgagtcttccaatgtagatgatccttgtgatatctgggagaaggttcacattagcctcatcttcactgccaaaggaagtaagatacccaagtcctcagacttccaagctgaccgggagctcaacatgtttgatatcatttctcagtatgatggctgtccaggttccatcggcctcacctctggagcaggaagtactcaccacagagcaccctggactcagacttatccccaaggaccaacacacctcagtgggtcccctggctgcatccttgccagcatcactggcagagtaaccaagatgcctgagtcctcagaatccccagcctgggagctccctaggttcacagagctgtttctcagcatcaaggatgagtggacctgcatcttcttgcagctctgctgcccaacaatgcttctttcagggttcccccccatcaggattgagccttggtcaccgctaagtgaccagctcaatcctatcccactagaagctgctattgccacccactcacggattcaccattgtcctctggtgttcacggcatcacttccaggacctttgactgcagggaatcaaatggctgatcgtctagttgctactgcagtatctaatgctagacactttcacaatttaacccatgttaatgcctctggtctcaaatgcagatacagcaatacctggaaagcagctaaagctattatccagcgacgcccaacttgccaaaagagaaaaatcaaacagatcaggaacaacctgtacagcccgtatgagcagaaggtgttaggttttggagggaagaccactgaccttgcacatcagatcaaggcactcgaggatgacctctgtaagcaggagacaatccacttggtggctgccctcagttacatggacatccccaccacagaagcactagaatatggctcgggagcctgtctgggctgtcccatctctggtgtttccaaaggcaacaagacaaggtcaggggcagctggcttccacctcctgccttcaagtctgcactttgcatttggaggttcaagcagcaacatgcaaacagaccatatgtctgctggggaatggagcacagaagtccatactcacttctacctagatcttccagctcaagccatccccaaatacatggcaatcttgactcagatgatctccaggtacagcgaggtgagtgtttcatatgcaggccatgttttcacaggcttagaagtgtccctgatacggacacacaatgtccacagcccagggtcagaggatgacttaggttgtatccagcatgggggtccaacatacaccatggaagtgggcaaagccaagccaaacacatctggcatcaacttccactctatgaagcaatgtgacattggcaaggctccctcccattatgggagctcaaggaagtga

SEQ ID NO: 117559 - DNA, 1158 bp, Homo sapiens
atgacaaagagtcttggcctggggctgcgcacagcacacaagcatgctaccctcaagagcctgcaagtgcaaaggacactgtcccagaatcctgccggagagtctggggatgcagctcttgggttctgtggggaaagagacaagatgccaggaaggcccgatgcaaggagcaatggggtccttgagaagccccccaaccccacttggaggctcaggctcagcgctccaggcctctggggtgaggaaggggcagagggagacatatgcatgttctcagtgcaactgctggacatgcgctgcacaatttttgaactgaaagatcaaacagctccagctgcctacctcactctgccccaaaacagtctctctagtctgggtgaccagcaacctcagtccttcagcgccagccctgcggcggcccaagttaccagccagactgggggtagaggagaagtgtgcaagcagaggggccgcgtggagccaccttccaaattccctccctgggccagcgacgagtctcagacggaagtccaagacgtggcctcgggcctcctgtccgtctgtgaaatgggggcaggaaccagagctgagcttgagacccagacagggtctgagcaggactgggaagactatcgcctccccagttctgggcatagatcttggttactacggccaatgatcctgggaaaccgctttgtaccagtgacttctgtattatttgatctacatttccatcgaaacagtcagttctaccatattataactgtgatcatgtttgctcagtattgtgactattacaaggggagcaggactcttgagtcctgcagcagccgaagcatctcaagcagcatctgtctcccacgcccccttcctccagccagcgtggccccgtgcagcgtgagctcctgcagggagtgtctgcagggccacagctccctcactcatccgcggccccagcaggctccattggccacggccgtccttggcacagtcagcagcaaacctggcaaggcggcaagtggggaccgatgccagccctcgtggctttcagatctccatcagccaggactccaaaatagcatcgagaagcagtggatgtgctccatttcaggagcatatcaaggactgctgctcaactgttatagggccagggtctga

SEQ ID NO: 117560 - DNA, 369 bp, Homo sapiens
gtccctcagtgagttaggggacagtcagttttagtcctcaggaccctgctccaagcagagtcttggcctggggctgcgcacagcacacaagcatgctaccctcaagagcctgcaagtgcaaaggacactgtcccagaatcctgccggagagtctggggatgcagctcttgggttctgtggggaaagagacaagatgccaggaaggcccggtgagtggtcatcaaccagcttgtgggttgagacttctgagaacatgttgggaatcctgatacctggggattccagacatctgttgtggcagtatagggaacaagcaaaaggctccattcatggtggtgacatattttgccaaagattatttctcgtgcc

SEQ ID NO: 117561 - DNA, 564 bp, Homo sapiens
ctttaatggctgcgataactgtgactctccatgatccatgtttcttttatgcgcatatgatttgacgcacactcattcagagtcctccgagaggggcacccatacacggcagaagtgttcatctccaacatgaaagtgaccagctctcatcctcgtctccccaacaccataacgtcctcatcccgcctccaacccacaccaggccgaagccctcagagagtgttttcatcaggaaccactctcgaacctgaaggttgactttagcgtttagcaacccagggcggtgtgtgtgtttcccgttttgttttctgagtggtagcagtgatcaccgtaattccatgtagccatgtgctagcagaacccctgtgtcctcaccgtggcccgtgtgaccccagccgacgagtgcccggcggagcccccgctgccttcccatggtccagtgagctgccagggcatcacatgactctcagctgtgctcttgtcgcttctgtgttgtggtgacaccatgcgctccccagggccagacctgcacgcggcaggtctgtgcccgagtcacccacgggc

SEQ ID NO: 117562 - DNA, 1065 bp, Homo sapiens
tcagtcactgtcttcccccatgtttggattctgctcttgcatggggtgtctggctgaacacgcagggggtttgccagggtagttggagccaatgtaagactgcctcaggagagcttcatttatttcagagaagggctgcatgtgcgcattaatattgtatgttttgcaggtcatgtgtctgttgtaactgtttaacttcatcatcatagcatggaagaagccattgacaatacataagtggatgagcgtggctctgttccaataaacctttggcgtattcagctgtcgaagaccttctgtgcaccaggctccactgtcggcacaggggctgctgcagggaaggacatagaaccagccctggcagttggaatacagctcaaaatggaggactgcaagccatgagcgctcatagtaggaagagcctggagctgtttgatctttcagttcaaaaattgtgcagcgcatgtccagcagttgcactgagaacatgcatatgtctccctctgccccttcctcaccccagaggcctggagcgctgagcctgagcctccaagtggggttggggggcttctcaaggaccccattgctccttgcatcgggccttcctggcatcttgtctctttccccacagaacccaagagctgcatccccagactctccggcaggattctgggacagtgtcctttgcacttgcaggctcttgagggtagcatgcttgtgtgctgtgcgcagccccaggccaagactctgcaccaggtcctgcaagggcagggggagctcgatggttagatagggtggtgggctccccatcttctcctcttccttctcagccacatccctccagttatcttcagagaccgtggcccgtgtgaccccagccgacgagtgcccggcggagtccccgctgccttcccatggtccagtgagctgccagggcatcacatgactctcagctgtgctcttgtcgcttctgtgttgtggtgacaccatgcgctccccagggccagaccgctcagcccagagcaggcctgtgataaagacctggcggctgctgcttgtaggcat

SEQ ID NO: 117563 - DNA, 1665 bp, Homo sapiens
ctagctgagcagcaggtaaagagaacctgaagacctgagaatgatggcagaatggagaagcatgggggcttcagggaggagctgggagccctctccactatttggtgggtcaaattcacgtggatcaagtagacactgcgcaaaatatcctttctgttcctctccagaatcctttgtttcttttgctttggttttgatgttacagtccacagcgacttgagcaagaccggccagttcatcatgtcgcaagtaacgccaaatagcgcccagacaaagaggatgccccaatacgccggcattgtcgtattggcatttatatctatccttatcgcccagcatcatcttattctctattggaaatccccccatcttacagtaagtacaaaagtcccggacacccacgcagatcccaatagaatccgccaaatcattgtccagctttgaagtcttggaagaagttgccaccaggatgcaggtaggggtcaatctcctccaggatccagagagcatatcagccagcttcagggtcaggaaaggagcctgacaggtatgcagtaggacggggctggggctggccgtgtggatcacgtgggccttcagccccactctggtctccagaagttgagagaagcactgtgcctccagcactgtttcaaacaacattggcctggagctgcaggggttaggggagtggtgatagccgttgtattcagctactgttccgtcagcgttttgcagcggccagctgtcccacacatcaagtccttttgcagactcaatatttttaatcgttgattgatcgaattgaggcacttggtatttttcgttttgctgctgtttagggatctgcagcatatcatggcgtgtaatatgagagacgccgtacgtttctttgtatgctttttggttattttctttcgcgaaggcttgagtcgctcctcctgccagaagtgcagtcgtaaaagtcagaactgtggcttgttttacaatttttttgatgttcatgttcatgtctccttctgtatgtactgttttttgcgatctgccgtttcgatcctcccgaattgaagggatgctggcaggaggtatcagtttctcactatatgagtatctccacagggctgactgaattccctcagaacataacaactggcttctcaaagagacattgatctgttcaggcttcagacccggcgggacccaggcatactcttccaaagcacagcctgagtcatcatctgaggtcgagttcctctgaaagtcaaacatgagtttgctgatggtcttctccatctccagcggcatcactgtcaccatgtgctcctcctggggacacttgcagtgcaggcagatcttcctatccctagagggcctcatgaagacatccaggtctggcccatgggcagttttgggggctggttctcccatacctaggccctggatgaagacgcagctctcgggcacccttgggcctctacgaggaagcaggccccctcctgagtcaccctctggggcagtcaatagtgggggagcgcccgggacccccaagcctactacctgggccttcctcttgtgccttttcttcctccttttcctcctggactctaagaaagacaataggcccccggtcctcagggcaggtgtcagtgcatgtgcactgcacat

SEQ ID NO: 117564 - DNA, 1278 bp, Homo sapiens
tcacaacactggatttggcaatgatctattagctacgacacaggtccccaatccccgggccacgaactgataccagtccgtgtcctggaattctttttcaccaataaacatatttacttctattcgtccaaatttatatatagaagtacaggaatacaagtcatatgcgagtttccaaagtgcccttttctcacctctacttgggaacattccaactacttttaaagggatgtcctcatggggagggtcactgactctggggactgaagtcccagtgggcccagctcgagccaccagcccccagccttgaagggccaggtcctccagtgtctgctgtccccatagatctctctcaggctcaacctgcacctgtgggatgtgtatttggtagaaggggaacaggtgttgatgccgatggcatgcactgcctttaaggtttaatggagtaagtccacgtgtgcccaatggcactgggccttcctcttgtgccttttcttcctccttttcctcctggactctaagaaagacaataggcccccggtcctcagggcaggtgctcagtgcatgtgcactgcacatgtggaggtgctgcctgatcacgtctgtttttctttcagccaaacccaggcaagggtcctcagcagccagggctgtgctggcttcacgtggcaggaaggccctctgcagcggaactccatgtcccgactcccagtggacttggatgtggtgggcccttggttccataataatttcaaacagagctgctgagctcatgtcccttctgaatgtgtcctggacagcccagctgccccgcaatcccagacaccttggaaaatgctgttcaatgaggaagccggtcccgtcaaggccatgagagagaaaggtgagcatggcatccctgcagcccagccagccagtagcatgccctgggtccttggtcccaacctgtggaacagtgtccccctcccagggcacaattcgcaggccaagaggggcctggcctagaccccagcccaggctgacaccactgctgagcgcccctccgtggatgagacacttgcacccagtctctgggttggcaccatttcccaggaggaccagctggccacctgctggcaggctaatcacactgtggagggggctgagattggctttcactgcaccaagccacaatgtggacgtggatttgccggccctcagggccttggctctgccacctcgacttggaatgttctcagctccctccaggcttctagaagcatctgggacacagctcat

SEQ ID NO: 117565 - DNA, 1560 bp, Homo sapiens
atgtcacgtatcagtgatgactgttctgagctgtgccctcttaaagcaataaagaaagagaggaggaaagaaaagaaacaagaaaaatgggaaacatacagagagaagagaaacgacagagggggcagcgcagaagaaacggagagcgaaaaaaaagaaaaaataccaagaaaagatgaaacgcaggaagagaaggcgagaaaaaaagacaaaaggggaagacagaagaacgaaagaggagaggggggaggaggagaagagagacgaaagaggaaggagggagctaaagaaacaagaaacaagcctaaagcgaagaaaaaaaaggaagaacaggaaaaaacagaaaggagaggagaaaagaagaagggagagaaaaggagaggaagagtagaaaaagaccgaagaggagggaggcaaaagaacaaaacgagagagagagactggggaggagaacagcagaaaacagagagagaggaggagtgggcacggaagaggtggaaagtgccagggggatgggagagagaggcgccgcatagggagctagagaaaaacgaacagttggacaaacattcaagttctagggcaaagctgtatgatgcagggcagctggacctctgctccaacctcattcagagttgtgacccagaatgcccaatgcaggccacaagcctcaccaggtatcctaccactacgcagatttttcttcgaggagcacaagggtgggtctgcgtggaactgttcaggagctacggtgtcgaagacaccagtgcttgggaacgtgacatgagaaattttggatgcatgacccgagaaaagcaaggcaaaccagggcagctgctagcacacaggcacctctgtgcacatcagaaaatgagcctcctctgtgcggacaactcacaaaaagggtgcctgtctcccgctaatgcagccccttgctatggtgtgcaggtggcaatactgacgtcagcccccacctgcccctaccacctggagcctttgtgcaggagtttctcgctgtcagatcagcaggaggctatttcagaccctcgaaccgcagtccgcatagcccgcagcggcgcatcctccaatccccgactgtgcgtgacgctaacctttccacgcgttctccagcctttcccacaccccccacagcggtggggggaggcgacgaagggaggaagactccccgccaagggctctccagcccgcacagcggcagggcgatgcgggagaagcgcagggatgccgcccgacgccagagccatatttacatcggctgctgctttgccaaaaagccgacttgtgcccagtaatattgcctttaaaggaaaaagaaaggacctaagcactaaagctgctgccccaaatctgctcgcgctccggtatcctcgccccagtgccccagtgggaggctcgcacgcgcccagcccgggacagcagctgcagccggaggaggaggggaacgaggaggaagaggaggaggaggaaggggaccgcgcgccggtcttcaccacggggcggaaagaccgcgactctctcgcggaattctctcatacctaa

SEQ ID NO: 117566 - DNA, 528 bp, Homo sapiens
atgcctcgccctgcttcggctcgcgcacggtgcgcacacacactggcctgcgcccactgtctggcactccctagtgagatgaacccggtacctcagatggaaatgcagaaatcaccgtcttctgcgtcgctcacgctgggagctgtagaccggagctgttcctattcggccatcttggctcctccccaggattttcttggggattctattggatctgtatatagctttgggaatcttgtggagtcatctatggtgaatggaggtttgacatcacaaacaaaagaaaacgggttaagtacctcacagcaggtgcctgcacagcggaagaagctcctcagagccccaactctggccgaactggacagctctgagtctgaggcccgctcagggtgtacggactgggtgctggaatggacacttgatcttgctggccatcagcgtattctccctttgatgagaggagctgattctgtgatttctaggtctcttccagttccaaaacgtggtagttttgctccagaagcatga

SEQ ID NO: 117567 - DNA, 709 bp, Homo sapiens
atgaaggaggcgaggcccatggccacccctggcttgggttcaaggagagcaaagtgtggcttcagtgactcaggcaaaatcagcacgaagttcttaaggatccccgaacccacacacacgggggacagatggggacgagcagcccagagcagcgcagcacagcctctggagctccgggctggagagccaccagcagctgcgtacttctggcgtcccctcaccatgtgcaccatgcacacgggtcacaagaggctgcaagtacccccccagtgccctggacacaaagggagtaccatggatggcctcctgggatctatcctttctcctctcacctccacaaagcttactgccaaatcctgccagagaggagctgtgaagacggcagcaggctccatggaagcgtcactgctggagagatgtgactacccctgaatctacaaagaatcttgtggagtcatctatggtgaatggaggtttgacatcacaaacaaaagaaaacgggttaagtacctcacagcaggtgcctgcacagcggaagaagctcctcagagccccaactctggccgaactggacagctctgagtctgagccacgcacagccgttcactcttcctgcacagcccatcggtgctcagcttggtgcttagctgtgtctgcggtctgcccctcacgtccttgtcagagtcagcgtggcctcgctttgtcttag

SEQ ID NO: 117568 - DNA, 446 bp, Homo sapiens
cgtgcaagaatcccgggaggggcttgttgcagttatctcgaagagacggcagccttcccagtgtggggcagtgaggatagacccaaggaggcagaatcaaaagacatttgggtacctcagcttccccgactggaataatgaaataccctccctactgcacctgcccatgctttcaatctgcactacacccagtccctggaggtctctcggggaaggaagccgagtcccagtgactctctcctcaccatccatcctctcaggctccaggggaagatcccacgcccctcagccagtctccccaaacatagtaccctaccggctcttggcttccctgccacgtgcgggcgttgctccaagccccaagccggcattgccgcctcgcggcaccgctccagctcctccgcatcgatactgctgttactactttccgaatcgctcacacgaaa

SEQ ID NO: 117569 - DNA, 1582 bp, Homo sapiens
gagaggggcctcgcactgatacatagagaacttatacgcccgcttggccgaggcaagatggcggcgcccagtggcacagtgagcgattcggaaagttttaacagtattagcgatgcggaggagctggagcggtgccgcgaggcggcaatgccggcttggggcttggagcaactcccgcacgtggcagggaagccaagagccggtgctgcaaatagccagttgtcaacctcccaaccgagcctcatgcataaggtgaatgagcatgaacaagatggcaacgagcttcagaccacccctgaattccgagcccacgtagccaaaaagctgggagccctgctggacagcttcattaccatctcaaaagcagcaaaggagccagcaaaagctaaggtacagaaagtcgctttgggaggattgatggtttccgccttttcttcacatcttgtccctggaaggccgtttagaaggaagagtctccccaacccccgccgaaagcgacagccctccagctccagcagtgaggacagtgacgaggagtggcggcggtgccgggaggcagctgtgtcggcgtccgacatcctacaggagtcagccattcacagccctggaactgtggagaaggaggcaaagaagaaaaggaagttgaaaaagaaagccaagaaggtggccagtgtcgactcggctgtcgctgccaccacccccaccagcatggccacagtccagaagcagaagtcaggtgagctcaacggggaccaggtgtcgcttgggaccaaaaagaagaaaaaggcaaagaaggccagcgagacctctccattcccaccagcaaagagtgctacagctatacctgcaaactgaacccacccatgggcacagggctcaaccagctccaaggacaaggtgtcccccccaccctggggacaaggcattttcaagccccacctccctctccaaggtcaaggactgggctggcaaacccagactgcccatgagaccctgatggtgatgaaggcttgctcgagaggtgggccaaaaaagtggctgtagggtgagaagaccaatcaaggcctgcccctctgtgctcccacggaaggctggcgggggcgctgtggttccagaacatttcatgacctcaggaaaaaaggaaccttccagttatttgagactagtggccaagtggtgaaacctccatctccttagaactgtcttgaggtggcaggggaaagggagaccttccccaccacctccttagcctggtgtgagaaacagtttttagaaaatgagagaagggatccccaagaggccaaggcccagagaaacttttgttcttctctccttagcccacatagacttcacagaatcgtctgagaaaggagagctttttcacccctggctttctagaattttctttgtctgcatttgtgaatataccacacatgatgggtgtctctgagccgaccaggattatggaaactcaattgtcagaggacccaaaacaaaacttagagtgatttggatattgcctctctgtcaatgctgaaccttaagacattttaagtaaacatcctcctcctctctaaaaaaa

SEQ ID NO: 117570 - DNA, 1470 bp, Homo sapiens
atgattgacggaggtcacacagcaactggtatgacagggacaggtttccggaattccagtgtcttaacaccaaagcctgtagtatttctcagagagaacaacaccactgctcgtgtgtgctcagaagaaagtttagtggtcgtaacatccaatacatccaacctgcagatcaatacacaaagaccctggaggaagggcaccactttggagccagcattttcggcctcggaaatgagacccagagcgcctcgcgcgagcagccccaacctccccgcagacgacatgcgacaccgcccgggtgacccaggctcgggaatctctaggcttcacggacgcagaaccagggaagacacgcctcaatgcgcgtgtgcaactctatcccgtcctttaaagaaggccatgtggcctcttcaccaatcggaatcctgctttttccctggtcccgccttattcccagacttccggcgtctcgctggccgcaaaacaaccctaaactacagggctcggcgactcccagagacttctgggggagaggccgggggggaccctctttgcagataccgagggaagagaagtctcccatctgtccttagtactttctctggcgacgtgggagaggccagggaggagcctctttgtagctatcaagggaagagaagtctcccatctgtccttagtactttctctggcgacgtgggagaggccagggaggagcctctttgtagctatcaagggaagagaaatctcccatctgtccttagtactttctctggcgacgtgggagaagccagggaggagcctctttgtagctatcaagggaagagaaatctcccatctgtccttagtactttctctggcaacaggggagaggccgggggggaccctctttgcagataccgagggaagagaagtctcccatctgtccttagtactttctctggcgacgtgggagaggccagggaggagcctctttgtagctatcaagggaagagaaatctcccatctgtccttagtactttctctggcgacgtgggagaagccagggaggagcctctttgtagctatcaagggaagagaaatctcccatctgtccttagtactttctctggcaacaggggagaggccgggggggaccctctttgcagataccgagggaagagaagtctcccatctgtccttagtactttctctggcgacgtgggagaggccagggaggagcctctttgtagctatcaagggaagagaaatctcccatctgtccttagtactttctctggcgatgcgggagaggccagggggaccctctttgcagctatcgagggaagagaaacctcccatctgtctttcgtactttctctccgtaccctggaccctagccttgaccaggctaccgtcatctcgtggaaactgagtagcctcttaactggcctctacacttcatgtcactgggacgtgtctctttctcactga

SEQ ID NO: 117571 - DNA, 793 bp, Homo sapiens
atggccggagaggatgagactcctgtgcccttgccaatctgtgggacacgtcctattgtgcagcagcagcgcatatggcacctgtaccgagtcatctccgaaaacatcagcgagtggaagtgcatggcttttgccaagttcagcccagctatggcccaggagaagacagagggctggctgacagaggcagcacggatgagcacaaccctggagctgcacagccccgtgctgcagcactgcatgcgcatcctgggggagtttcgcagctacctgcccctgctcactaagctgggcagcctccacccacagagcctcaactgccagtgtctcctgcgtgatccaatccccaagtctcggctccaagcctgtccccgaagcagttacccagtcctggttcctgagacccagctgttccaggtctggcagaatgaaaatgaacgaattcatgcccaagagactatacggcggttgcagcggtactgggaagcgcgccagctgcgcctgctcaacttcatcctgcatgtaccctacgagcccccagcctcagagcgctccaagaggcaggtgctccgcagcccccaatgggaggtagtggacaaagatagtggcaccttcatcctctcagattacagcaacctgcaggattccatccaggaaaagtcttcaggtgttgtccaagatcttggccatcgaaaagtcaggagatttaaacaaaatagctttggagtgggtggccatcatgcatggcctgggtaaccttgaagcacatgttttgacggtgatggagtcatag

SEQ ID NO: 117572 - DNA, 1340 bp, Homo sapiens
ggcacgagggcgtccccagcccgcggcccctctgctgccggcccccggctcgccggctgcgggagtggcctcaagatggatgaagacggcggcggcgagggtggtggcgtgcctgaagacctctcattagaagagagagaagaacttctagacattcgtcgaagaaaaaaggaacttattgatgacattgagaggctgaaatatgaaattgcagaggtgatgacagagatcgacaatctaacttccgtagaggagagcaaaacgactcagaggaacaaacagatagccatgggaagaaagaaattcaacatggatcccaaaaagggaattcagtttctaatagaaaatgacctgctacagagttccccagaagacgtcgcccagttcctttataaaggagaaggcctaaataagaccgtcattggggactacctgggtgaaagggatgaatttaatattaaagttcttcaagcctttgttgaactccatgagtttgctgatctcaaccttgtacaagccttaaggcagttcttatggagcttcaggctgcccggggaggcgcagaagattgatcgcatgatggaggctttcgcttctcgctactgcctgtgcaaccccggggtcttccagtccacagacacgtgctacgtgctgtcattcgccatcatcatgctcaacaccagcctccacaaccacaacgtgcgtgacaagcccacggcagaacggttcatcgccatgaaccgcggcatcaacgagggcggggacctccctgaggagctgctgaggaatttgtatgagagcattaagaacgagccatttaagatcccggaggacgacgggaacgacctgacccacaccttcttcaaccccgaccgcgagggctggctcctgaagctgggagggcgtgtgaagacctggaagcgccggtggttcatcctgaccgataactgcctctattactttgaatacacaacagataaggagcccaggggaatcatcccgttggaaaacctcagcatcagggaggtggaggacccccggaaacccaactgttttgagctctacaatcccagccacaaagggcaggtcatcaaggcctgtaagacggaggccgacggccgcgtggtagaggggaaccatgtggtgtaccggatctcagccccgagcccggaggagaaggaggagtggatgaaatccatcaaagccagtatcagcagagatcccttctatgacatgttggcaacgaggaaacgaaggattgccaataaaaaatagctttcctggctaaaagacccaggtaaaagacccaaccccagcagaaagacaccgcgggcggcccc

SEQ ID NO: 117573 - DNA, 609 bp, Homo sapiens
atgacaaggcagctttctaattgctgggtggccgccgagtgctgtgaccctctgagacacgtcacccagcaggttctccaagaagcaccaattgtctcacaagctgtaggaggccccagcaggaccaacctggccacaacccctggcagccatcgttctacttactgtctctccggagctgtctcttctaggaacctcatcgagcccgccggcgaggaggccggcgcgacccgggcgcgcgctgaggagccgcccggtcgcctgcgcgctccctccggcggcgtccccagcccgcggcccctctgctgccggcccccggtcgccggctgcgggagtggcctcaagatggatgaagacggcggcggcgagggtggtggcgcagtgtactgtaacttggagctcaaggcatctggtgtgatactggctgtagcagcagagaagccctccagtggacaagctgtgctcacaaacacagaacatagtgaaccttcccatttgaaagggaaatcgagtgagaaaagttacctacacgcaacaccaaaggaagacatagctagcttcatcgcatttttaaatgtgtacaaacagcaaggacctccagatggatga

SEQ ID NO: 117574 - DNA, 524 bp, Homo sapiens
taatgcgagttccatgtgatgtgggccccttcaaaacaaagaccaaagaaatggtctatttcacagcggagcaggagtgagcggaggatggaagggtgtgatcaaggcccgacttgactctgacatccctttcctctggttagggggcgggacaccacgtgagggtctgcagggagagggtctgggagtggccttcctgggttttatggcctgcttcagggaagaaaggcagggaggttagaatggcctcaacggtgaaatatttatctttttcttcctccctaatcccagaattcagaaactgttagtgggtttgcataagttcaatgagaatctgttcttgtaatagggcacaattgaaaacattggttatattaccaaggctttgactggaatgtcctattttcagatacgactaaaggagttagggttgactgcatggtccaataaagccccttggaaaaaagctggcctggtacctcacatacgtggttcccttacagatgagtaaagaatgtcaattc

SEQ ID NO: 117575 - DNA, 760 bp, Homo sapiens
accccgcgcgcgcctctctgtcgtggcgcggcttccgcggctcgttctctgcaaatgggctccgtggcctagccgcccccgtccccgccacccgtgatcgtgcgccgaggcccgcgagggttctgccgcccagatcccaccagccagcaagctaaagcatggcggsccatcccctccagcggctcgcgtcgtggccacccacgactactaccggcgccgcctgggttccacttccagcaacagctcctgcagcagtaccgagtgccccggggaagccattccccacccccccaggtctccccaaggctgacccgggtcaattggtgggccactcagtgctttttcgggaagtccacccttcccggttcatggccaacggtgttgggaagtccgcagagcactcggaacctccccaggcctccagcagcatgaccgcctgtggcctgggctcgggacgccccgaggaagcagcccggcggcggctgcagcaaagcagaccttcgcatcaacacagcagacaccaaaaaccacgtgagagccccgctctcctaccggcccggccccagcactcgctaagcttttcctgacacctggaacctgtgcacctgggcaaccaagccggaaaattaaacttccaagcaggccagtagccccgatgggcacaattgaaaacattggttatattaccaaggcttttgactggaatgtcctattttcagatacgactaaaggagttagggttgactgcatggtccaataa

SEQ ID NO: 117576 - DNA, 801 bp, Homo sapiens
ttaccctgttaatgtcacaccaaaagctcctacccctgccccagataaaaaccccaagaagtttccaccacagtcgccatctgcaccaccaacatcggcaccaccaaaagcagcaccataaaaaacaccaccaccacttttactaccatcactgaaatcatcaccatcaccaccatcactgtcacaccccatcaccttcaccaccaccaccgtcaccattactaccatcaccatcaccaccatcctcaccagcaccatcagcaccacaacattaatcaccattaccaccactatcaccaccaccatcagcaccatcaacgccaccaccatcccagctgcacggtctgccctcaggaggagtgaacaatgaacacaggaagaggccacatagatgctggaaggtccaggatcccagataaccttggttatctttatattcctaccacccactctgaacttcgtcttgcattgagtaaacaccttccctccttcttgtagaataaagtctctatttattaccgccaatctccagatctctgtccccacctcaatcttaatccccaccaataccatcaccgctatcatcaccagtattaccaccaccaccgccgccacaaacactaccctcaccaccaccaccaccttcaccaccaccatcacaaccaccaccaccagaaccaccaccaccatcaggaaacacctcttcaccgcaccctcggactgccccagggcccccgccgccgctccagcgccgcgcagccaccgccgccgccaccgccgcctctgcttagtcgccgccat

SEQ ID NO: 117577 - DNA, 1234 bp, Homo sapiens
gatgggaccccccgcctgaattcccgggtcgacgacctcgtcgagagtcgtcggggtttcctgcttcaattttgcttgtgacggaacccggcgctcgttccccaccccggccggccgcccatagccagccctccgtcacctcttcaccgcaccctcggactgccgccaaggcaccccgacggcgctgcagcgccgcgcagctcaccgccgccgccgccgccctctccttagtcgccgccatgacgaccgcgtccacctcgcaggtgcgccagaactaccaccaggactcagagggcggccatcaaccgccagatcaaccctggagctctacgcctcctacgtttacctgtccatgtcttactactttgaccgcgatgatgtggctttgaagaactttgccaaatactttcttcacccaatctcatgaggagagggaaccatgctgagaaactgatgaagctgcacaaccaacgaggtggccgaatcttccttcaggatatcaagaaaccaggaagtgatgactgggagagcgggctgaatgcaatggagtgtgcattacatttggaaaaaaatgtgaatcagtcactactggaactgcacaaactggccactgacaaaaatgacccccatttgtgtgacttcattgagacacattacctgaatgagcaggtgaaagccatcaaagaattgggtgaccacgtgaccaacttgcgcaagatgggagcgcccgaatctggcttggcggaatatctctttgacaagcacaccctgggagacagtgataatgaaagctaagcctcgggctaatttccccatagccgtggggtgacttccctggtcaccaaggcagtgcatgcatgttggggtttcctttaccttttctataagttgtaccaaaacatccacttaagttctttgatttgtaccattccttcaaataaagaaatttggtacccaggtgttgtctttgaggtcttggatgaatcagaaatctatccaggctatcttccagattccttaagtgccgttgttcagttctaatcacactaatcaaaaagaaacgagtatttgtatttattaaactcattagtttgggcagtatactaaggtgtggctgtcttggattcagatagaactaagggttcccgactctgaatccagagtctgagttaaatgtttccaatggttcagtctagctttcacagtttttatgaataaaaggcattaaaggctg

SEQ ID NO: 117578 - DNA, 1260 bp, Homo sapiens
atgaaggcagaaataaagatgttctttgaaaccaacgagaacaaagacacaacataccagaatctctgggacacattcaaagcagtgtgtagagggaaatgtatagcactaaatgcccataagagaaagcaggaaagatctaaaattgacaccctaacatcacaattaaaagaactagaggagcaagagcaaacaccttcaaaagctagcagaaggcaagaaataactaagattagagcagaactgaagagctggttttttgaaaagatcaacaaaattgataaactgctagcaagactaataaagaagaaaagagagaagaatcaaatagatgcaataaaaaatgacaaaggggatatcaccagtgatcccacagaaatacaaactaccatcagagaatactataaacacctctacgcaaataaactagaaaatctagaagaaatggttgaattcctcgacacatacacactcccaagactaagccaggaagaagttgaatctctgaatagaccaataacaggctctgaaattgaggcaataattaacagcttaccaaccaaaaaaagtccaggaccagatggattcacagctaaattctaccagagtgttggaagttctggccagggcaatcaggcaggagaaggaagaaagggcattcaattaggaaaagaggaagtccaattgtccctgtttgcagatgacatgattgtatatctagaaaaccccatcatctcagcccaaaatctccttaagctgataagcaacttcagcaaagtctcaggatacaaaatcaatgtgcaaaaatcacaagcattcttatacaccaataacaaacaaacagagagtcaaatcatcagtgaactcccattcacaattgcttcaaagagaataaaatacctaagaatccaacttacaagggatgtgaaggacctctccaaggagaactacaaaccactgctcaatgaagtaaaagaggatacaaagaaatggaagaacattccatgctcatgggtaggaagaatcaatatcgagaaaatggccatactgcccaaggtaatttatagattcaatgccatccccatcgagctaccaatgactttcttcacagaattggaaaaaactactttaaagttcatatggaaccaacaaagagcccgcattgccaagtcaatcctaagccaaaagaacaaagctggaggcatcacgctacctgacttcaaactatactacaaggctacagtaaccaaaatagcatga

SEQ ID NO: 117579 - DNA, 2133 bp, Homo sapiens
atggaggaggatctaccaagcaaatggaaaataaaaaaacaaacaaaaaaagcaggggttgtaatcctagtctctgataaaacagactttaaaccaacaaagatcaaaagagacaaagaaggccattacataatggtgaagggatcaattcaacaagaagagttaactgtgctaaatatatatgcacccaatacaggagcacccagattcatgaagcaagtccttagagacctacaaagagacttagacccccacacaacaataatgggagactttaacaccccactgtcaacattagacagatcagcgagacagaaagttaacaaggatatccaggaattgaattcagctctgcaccaagcagacctaataaacatctacagaattctccaccccaaatcaacagaatatacattcatctcagcaccacatcgcacttattccaaaattgaccacatagttggaaggaaagcactcctcagaaaatataaaagaacagaaattataacagactgtctctcagaccacagtgcaatcaaactagaactcaggattaagaaactcactcagaacagctcaactacatggaaactgaacaacctgctcctgaatgactactggatacataacaaaacgaaggcagaaataaagatgtgctttgaaaccagtgagaacaaagacacaacataccagaatctctgggacacatgtaaagcagtgtgtagagagaaatttatagcactaaatgcccacaagagaaagcaggaaagatctaaaattgacaccctaacatcacaattaaaagaactgagaagcaagagcagacacattcaaaagctagcagaagaaaatctagaagaaatggataaatacctggacacatacaccctcccaagactaaaccaggaagaatttgagtccctgaatagaccaataacagggtctgaaattgaggcaataattaatagcttaccaaccaaaaaaagttcaggaccagacggattcacagccaaattctaccagagcatagtgctggaagttctggccagggcaatcaggcaggagaaagaaataaagggtattcaattaggaaaagaggaagtcaaattgtccctgtttgcagatgacatgattgtatatttagaaaaccccatcatctcagcccaaaatctccttaagctgttaagcaacttcagcaaagtctcaggatacaaaatcaacgtgcaaaaatcacaagcagtcctatacaccaataacaaacaaacagagagccaaatcatgagtgaaccttcattcacaattgcttcaaagagaataaaatacctaggaatccaacgtacaagggatgtgaaggacctattcaaggagaactacaaaccactgctcaacaaaataaaagaggacacaaacaaatggaagaacactccatgctcatggataggaagaatcaatatcatgaaaatggccatagtgcccaaggtaatttatagattcaatgccatccccatcaagctaccaatgactttcttcacagaattggaaaaaactactttaaagttcatatggaaccaaaaaagagcccgcattgccaagtcaatcctaagccaaaagaacaaagctggaggcatcacgctacctgacttcaaactatactacaaggctacagtaaccaaaacagcatggtactggtaccaaaacagacatatagaccaatggaaaagaacagaggcctcagaaataataccacacatctacgaccatctagtctttgacaaacctgacaaaaacaagaaatggggaaaggattccctatttaataaatggtgctgggaaaactggctagccatatgtagaaagctgaaactggatcccttccttacaccttatacaaaaattaattcaagatggattaaagacttaaatgttagacctaaaaccataaaaaccttagaagaaaacctaggcaataccattcaggacataggcatgagcaaggactttatgtctaaaacaccaaaagcaatggcaacaaaagccaaaattgacaaatgggatctaattaaactaaagagcttctgcacagcaaaagaaactaccatcagagtgaacaggcaacctacagaatgggagtaa

SEQ ID NO: 117580 - DNA, 1899 bp, Homo sapiens
atgggagactttaacaccccactgtcaacattagacagatcaacgagacagaaagttaacaaggatatccaggaattgaactcagctctgcaccaagcagacctaatagacatctacagaactctccaccccaaatcaacagaatatacattcttttcagcaccacaccacacctattccaaaattgaccacatacttggaagtaaagctctcctcagcaaatgtaaaagaacagaaattataacaaactgtctctcagaccacagtgcaatcaaactagaactcaggattaagaaactcactcaaaactgctcaactacatggaaactgaacaacatgctcctgaatgactactgggaacataacaaaatgaaggcagaaataaagatgttctttgaaaccaacaagaacaaagacacaacataccagaatctctgggacacattaaaagcagtgtgtagagggaaatttaaagcgctaaatgcccacaagagaaagaaggaaagatcccaaattgacaccctaacatcacaactaaaagaactagaaaagcaagagcaaacacattcaaaagctagcagaaggcaagaaataactaaaatcagagcagaactgaaggaaacagagacacaaaaaacccttcagagattaatgaatccaggagctgtgttggaagttctggccagggcaattaggcaggagaaggaaataaagggtattcaattaggaaaagaggaagtcaaattgtccctgtttgcagatgacatgattgtatatctagaaaaccccattgtctcagcccaaaatctccttaagctgataagcaacttcagcaaagtctcaggatataaaatcaatatacaaaaatcaccagcattcttatacaccaataagagacaaacagagagccaaatcgtgagtgaactaccattcacaattgcttcagtgagaataaaatacctaggaatccaacttacaagggatgtgaaggaactcttcaaggagaactacaaaccactgctcaatgaaataaaacaggatacaaacaaatggaagaacattccatgctcatgggtaggaagaatcaatattgtgaaaatggccatactgcccaagggaatttatagattcaatgccatccccatcaagctaccaatgactttcttcacagaattggaaaaaactactttaaagttcatatggaaccaaaaaagagcccacattgccaagtcaatcctaagccaaaagaacaaagctggaggtatcacgctacctgacttcaaactatactacaaggctacagtaaccaaaacagcatggtactggtaccaaaacagagatatagatcaacggaacagaacagagccctcagaaataatgctgtgtatctacaaccatctgatctttgacaaacctgacaaaaacaagcaatgggaaaaggattccctatttaataaatggtgctgggaaaactggctagccatatgtagaaagctgaaactggatcccttccttacaccttatacaaaaattaattcaagatggattaaagacttacacattagacctaaaaccataaaaaccctagaaggaaacctaggcaataccattcaggacataggcatgggcaaggacttcaagtctaaaacaccaaaagcaatggcaacaaaagccaaaattgacaaatgggatctaattaaactaaagaacttctgcacagcaaaagaaactaccatcagagtgaacaggcaacctacagaatgggagaaaattttcgcaacctactcatctgacaaaaggctaatatccagaatctacaatgaactcaaacaaatttacaagaaaaaaacacccaaccacatcaaaaagtgggtgaaggatatgaacagacacttctaa

SEQ ID NO: 117581 - DNA, 1296 bp, Homo sapiens
atgagaaagaagcaatgtgagaattccggtaacttgaatggtcagagtgttttatgttctccaaatgaccataccagttcttcaacaagagtacttaaccaggctgaactggctggaatgacagaaatagaattcagaatatggacaggaacaaagatcattgagattcaggagaacagcaaaacccaatccaaggaaaataagaatcacaataaagtgatactggagctgaaggacaaaatagccagtattaaaatgaatctaacagtgtgtagagggaaattcatagcactaaatgcccacaagagaaagcaggaaagatctaaaacggacaccctaacatcacaattaaaagaactagagaagcaagagcaaacacattcaaaagctagcagaaggcaagaaataactaagatcagagcagaactgaaggaaatagagacacaaaaaacccttcaaaaaatcgatgaatccaggagctggttttttgaaaagatcaacataattgatagactgctagcaagactaaagaagaagaaaagagagaagaatcaaatagacacaataaaaaatgacaaaggggatattaccactgatcccacagaaatacaaactaccatcagagaatactataaatacctctacgcaaataaactagaaaatctcgaagaaacggataaattcctcgatacatacactctcccaaaactaaaccaggaagaagttgaatctctgaatagaccaataacaggctctgaaattgtggcaataatccatagcttaccaaccaaaaggagtccaggaccagatggattcacagcggaattctaccagaggtacaaggaggaactgacaaacagccaaatcatgagtgaactcccactcacaattgcttcaaagagaataaaatacctaggaattcaacttacaagggatgtgaaggacctcttcaaggagaactacaaaccactgctcaatgaaataaaagaggatacaaacaaatggaagaacattccatgctcatgggtaggaagaatcaacatcgtgaaaatggccatactgcccaaggtaatttatagattcaatgccatccccatcaagctaccaatgcctttcttcacagaattggaaaaaactactttaaagttcatatggaaccaaaaaagagcccacattgccaagacaatcctaagccaaaagaacaaagctggaggcatcatgctacctgacttcaaactatactacaaggctacagtaaccaaacagcatggtactggtaccaaaacagagatgtag

SEQ ID NO: 117582 - DNA, 1098 bp, Homo sapiens
atgattatctcaatagatgcagaaaaggcctttgacaaaattcaacaacacttcatgctaaaaactctcaataagttcggtattgatgggacatatctcaaaataataagagctatctatgacaaacccacagccaatatcatactgaatgggcaaaaactggaagcattccctttgaaaactggcacaagacagggatgccctctctcactactcctattcaacatagtgttggaagttctggccagggcaattaggcaggagaatgaaataaagggtattcaattaggaaaagaggaagtcaaattgtccctgtttgcagacgacatgactgtatatctagaaaaccccattgtctcagcccaaaatctccttaagctgataagcaacttcagcaaagtctcaggatacaaaatcaatgtacaaaaatcacaagcattcttatacaccaacaacagacaaacagagagccaaatcatgagtgaactcacattcacaattgcttcaaagagaataaaatacttaggaatccaacttacaagggatgtgaaggacctcttcaaggaggactacaaaccactgctcaatgaaataaaagaggatacaaacaaatggaagaacattccatgctcatgggtaggaagaatcaataccgtgaaaatggccatactgcccaaggtaatttatagattcaatgccatccccatcaagctaccaatgactttcttcacagaattggaaaaaactacttcaaagttcatatggaaccaaaaaggagcccacatcgccaagtcaatcctaagccaaaagaacaaagctggaggcatcatgctacctgacttcaaactatactacaaggctacagtaaccaaaacagcatggtactggtaccaaaacagagatatagatcaatggaacagaacagagccctcagaaataacgccgcatatctacaaccatctgatctttgacaaacctgagaaaaacaagcaatggggaaaggattccctatttaataaatggtgctgggaaaactggctagccatatgtagaaagctcaaacaaaaccacaatgagataccatctcacaccagttag

SEQ ID NO: 117583 - DNA, 1413 bp, Homo sapiens
atgttctttgaaaccagtgagaacaaagacacaacataccagaatctctgggacacacttaaagcagtgtgtagagggaaatttatagaactaaatgcccacaagagaaagaaggaaagatctaaaattgacaccctaacatcacaattaaaagaactagagaagcaagaacaaacacattcaaaagctaccagaaggcaagaaataactaagatcagagcagaactgaaggaaatagagacacaaaaaacccttcaaaatatcaatgaatccaggacctggttttttgaaaagatcaacaaaattgatagacagctagcaagactaataaagaagaaaagattaaagaatcaaatagacgcaataaaaaatgataaaggggatatcaccaccgatcccacagaaatacaaactaccatcagagaatactataaacacctctacacaaataatctagaaaatctagaagaaatggataaattcctggacacatataccctcccaagactaaaccaggaagaagttaagtccttgaatagaccaataacaggctctgaaattgaggcaataattaatagcccaccaaccgaaaaaactccaggaccagacggattcatagccgaattctaccagagcttcaaagagaataaaatacctaaaatccaacttacaagggatgtgaaggacctcttcaaggagaactacaaaccactgctcaacgaaataaaagaggatacaaacaaatggaagaacattccatgctcatggatgggaagaatcaatatcatgaaaatggccatactgcccaaggtaatttatagattcaatgccatccccatcaagctaccaatgactttcttcacagaattggaaaaaactactttaaagttcatatggaaccaaaaaagagcccacattgccaagtcaatcctaagccaaaagaacaaagctggaggcatcacactacctgacttcaaactatactacaaggctacagtaacccaaacagcatggtactggtaccaaaacagagatatagaccaatggaacagaacagagccctcagaaataataccacacatctacaaccttgacaaacgtgacaaaaagaagaaatggggaaatgattccctatttaataaatggtgctgggaaaactggctagccatatgtagaaagctgaaactggatcccttccttacaccttatacaaaaattaattcaagatggattaaagacttaaatgttagacctaaaaccataaaaaccctagaagaaaacctaggcaataccattcaggccataggcatgggcaaggacttcatgactaaatcaccaaaaacaatggcaacaaaagccaaaattgacaaatgggatctaattaaacagcaaaagaaactaccatcggagtga

SEQ ID NO: 117584 - DNA, 1542 bp, Homo sapiens
atggagctgaaagccaaggctcaagaactatgtgaagaatgcagaagcctcaggagccgacacgatcaactggaagaaagggtatcagtgatggaagatcaaatgaatgaaatgaagcaagaagagaagtttagagaaaaaagaataaaaagaaacaaacaaagtctccaagaaatatgggactatgtgaaaagaccaaatctatgtctgattggtgtacctcaaagtgacagggagaatggaaccaagttggaaaacactctgcaggatattatccaggagaacttccccaatctagcaaggcaggccaccattcagattcaggaaatacagagaacgccacaaagatacttctcgagaagagcaactccaagacacataattgtcagattcaccaaagttgaaatgaaggaaaaaatgttaagggcagccagagagaaagtgttggaatttctggccagggcaattaggcaggagaaggaaataaaggttattcaattaggaaaagaggaagtcaaattgtccctgtttgcagatgacatgattgtgtatctagaaaaccccattgtctcagcccaaaatctccttaagctgataagcaactacagcaaagtctcaggatacaaaatcagtgtacaaaaatcagcagcattcttatacatgaataacagacaaacagagagccaaatcatgagtgaactcccattcacaattgcttcaaagagaataaaatatctaggaatccaacttacaagggacgtgaaggacctcttcaaggagaactacaaaccactgctcaatgaaataaaagaggatacaaacaaatggaagaacattacatgctcatgggttggaagaatcaatatcatgaaaatggccatactgcccaaggtaatttatagattcaatgccatccccatcaagctaccaatgactttcttcacagaattggaaaaaactactttaaagttcatatggaaccaaaaaagagcccgcattgccaagtcaatcctaagccaaaagaacaaagctggaggcatcatgctacctgacctcaaactatactacaaggctacagtaaccaaaacagcatggtactggtaccaaaacagagatatagatcaatggaacagaacagagccctcagaaataatgccgcatatctacaactatctgatctttgacaaacctgacaaaaacaagcaatggggaaaggattccctatttaataaatggtgctgggaaaactggctagccatatgtagaaagctgaaactggatcccttccttacaccttatacaaaaattaattcaagatggattaaagacttaaacgttagacctaaaaccataaaaaccctagaagaaaacctaggcaataccattcaggacataggcatgggcaaggacttcatgtctcaaacaccaaaagcaatggcaacaaaagccaaaactgacaaatgggatctaattaaactaaagagcttctgcacagcaaaagaaactaccatcagagtgaacaggcaaccaacaaaatggtag

SEQ ID NO: 117585 - DNA, 1170 bp, Homo sapiens
atgggagactttaacaccccattgtcaacattagacagatcaacgatacagaaagttaacaaggatatccgggaattgaactcagctctgcaccaagtggacccaatagacatctacagaactctccaccccaaatcaacagaatatacattcttttcagcaccacaccacagctattccaaaattgaccacatagttggaagtaaagcactcctcagcaaatgtaaaagaacagaaattataacaaactgtctcccagaccacagtgcaatcaaactagaactcaggattaagaaactcactcaaaaccactcaactacatggaaactgaataacctgctcctgagtgactactcggtacataacgaaatgaaggcagaaataaagatgttctttgaaaccatgttggaagttctggccagggcaatcaggcaggagaaagaaataaagggtattcaattaggaaaagaggaagtcaaattgtccctgtttgcagatgacatgattgtatatttagaaaaccccattgtctcagcccaaaatctccttaagctgataagcaacttcagtgaagtctcaggatacaaaatcaatgtgcaaaaatcacaagcattcttatacaccaataacagacaaacagagagccaaatcatgagtgaactcccattcacaattgcttcaaagagaataaaatacctaggaatccaacttacaagggacgtgaaggacctcttcaaggagaactacaaaccactgctcaatgaaataaaagaggatacaaacaaatggaagaacattccatgttcatgggtaggaagaatcaatatcgtgaaaatggccatactgtccagggtaatttatagattcaatgccgtccccatcaagctaccaatgactttcttcacaaaattggaaaaaactactttaaaggtcatatggaaccaaaaaagagcccacattgccaagtcaatcctaagccaaaagaacaaagctggaggcatcatgctacctgacttcaaactatactacaaggctacagtaaccaaaacagcatggtactggtaccaaaacagagatctagaccaatggaacaaaacagagccctcagaaataataccacacatctacaagcatctgatctttgacaaacctgacaaaaacaagcaatga

SEQ ID NO: 117586 - DNA, 1578 bp, Homo sapiens
atgttgactgaaacctttcccagccagaaaaagaacagcagtggccaccaacataaccaaaagcagctgttatttgcaaagatatgccgaatgttcaaagatatacaaactaccatcagagaatactacaaaaacctctacgcaaataaacgggaaaatctagaagaaatggatagattcctggacacatacaccctcccaagactaaaccaggaagaagttgaatctctgaatagaccaataacaggctctgaaattgtggcaataatcaatagcataccaaccaaaaagagtccaggaccagatggattcacagcagaattctaccagaggtacaaggaggagctggtaccattccttctgaaactattccaatcaatagaaaaagagggaaacctccctaactcattttatgaggccagtatcgtccagataccaaagcctggcagagacacaacaaaaaaagagaattttagaccaatctccttgaccaacattgatgcaaaaatcctcagtaaaatactggcaaaccgaatccagcagcacatcaaaaagtttatccaccaaaatcaagtgggcttcatccctgggatgcaaggctggttcaaaatacacaaatcaataaatgtaatccagcatataaacagaaccaaagacaaaaaccacatgattatctcaatagatgcagaaaaggcctttgacaaaattcaacaatgcttcatgctaaaaactctcaataaattaggtattaatgggacgtatctcaaaataataagaactatctatgacaaacccacagccaatatcatactgaatgggcaaaaactggaagcattccctttgaaaactggcacaagacagggatgccctctctcaccactcctattcaacatagtgttggaagttctggccagggcaattagacaggagaaggaaataaaagcccaaaatctccttaagctgataagcaaccttagcaaaatctcaggatacaaaatcaatgcacaaaaatcacaagcattcttatacaccagtaacagacaaacagagagccaaatcatgagtgaactcccattcacaattgcttcaaagagaataaaatacctaggaatccaacttacgagggacgtgaaggacctcttcaaggagaactacaaaccactgctcagtgaaataaaagaggatgcaaacaaatggaagaacattccatgctcatgggtaggaagaatcaatatcttgaaaatggccctactgcccaagataatttatggattcaatgccatccccatcaagctaccaatgactttcttcacagaattggaaaaaattactttaaagttcatatggaaccaaaaaagagcccacatcgccaagtcaatcctaagccaaaagaacaaagctggaggcatcatgctacctgacttcaaactatactacaaggctacagtaaccaaaacagcatggtactggtaccaaaacagagatatagatcaatggaacacaacagagccctcagaaataatgccgcatatctacaactatctgatctttgacaaacctgacaaaaacaagaaatga

SEQ ID NO: 117587 - DNA, 1653 bp, Homo sapiens
atgccctctctcaccaatcctattcaacatagtgttggaagttctggccagggcaatgaggcaggagaaagaaataaagggtattcaattaggaagagaggaagtcaaattgccctgtttgcagatgacatgattgtatatctagaaaaccccacagtctcagcccaaaatctccttaagctgataggcaacttcagcaaagtctcaggatacaaaatcaatgtgcaaaaaccacaagcatttttatacaccaataacagacaaacacagagccaaatcataagtgaactcccattcacaattgcttcaaagagaataaaatacccaggaatccaacttacaaaggatgtgaaggatctcttcaaggagaactacaaaccactgctcaaggaaataaaagaggatacaaacaaatggaagaacattccgtgctcatggataggaagaatcaatatcgtgaaaatggccatactgcccaaggtaatttatagattcaatgccatctccatcaagctaccaatgactttcttcacagaattggaaaaaactactttaaagttcatatggaaccaaaaaagagcctgcattgccaagtcaatcctaagccaaaagaacaaagctggaggcatcatgctacctgacttcaaactatactacaaggctacagtaaccaaaacagcacagtactggaaccaaaacagagatagagaccaatggaacagaacagagccctcagaaataatgccgcatatctacgaccacctgatctttgacaaacctgacaaaaacaagaaatggggaaacaattccctatttaataaatggtgctgggaaaactggctagccatatggagaaagctgaaactggatcccttccttacaccttatacaaaaattaattcaagatggattaaagacttacatgttagacctaaaatcataaaaaccctagaagaaaacctaggcaataccattcaggacatagtcatgggcaaggacttcatgtctaaaacaccaaaagcaatggcaacaaaagccaaaattgacaaatgggatctaattaaactaaagagcttctgcacagcaaaagaaactaccatcagagtgaacaggcaacctacaaaatgggagaaaatttttggtatctactcatctgacaaaggtctaatatcaagaatctacaatgaactccaacaaatttacaagaaaaaaacaaacaaccccatcaaaaagtgggtgaaggacatgaacagatacttctcaaaagaagacatttatgcagccaaaagacacatgaaaaaatgctcatcatcactggccatcagagaaatgcaaatcaaaaccacaatgagatactatctcacaccactcagaatggcgatcattaaaaagttcggaaacaacagacaggagacagtaagagaaatggcctgtctcctcagcggcacaatggactttagacatcgcgcctgttttgtactctccaagccggacttctctactcgctggcctggcgctgatgcccagaggccccctgtgcttgtggttgtggccttagacagttccctgccctttcctcaggcatcagggcagaggcctccgagcctggaggatgtggacggaggggccggtgccctcgtggctccctgctag

SEQ ID NO: 117588 - DNA, 1932 bp, Homo sapiens
atgcaagtgatggtattgaggaggaatatggatatacaggtgcaaggctctgaggtaaacacttcagaaagcatcagaagttccaatccaatggcttcaattgcctctgaaaataagagaagaaatcaggggctcagagtgaaggggcacacgaaacatggtcagaggttgggacagagcgacggtggtcactgtggagtggagatgagagctaatgggccatatgaagggtgtgatcatgaatttactatgatactactatgtcctgttgtgtggctttctccatcatcaccacactgctcagatacagatatggaaaagtcggaaatgaggttaggattttgccatatcaacgtgaaaaaaaaggcaaacaaggaagctgccattcctattactagagagccatctacacttacagctgtctctccaggtttcaataaccttcccaatggctcctcaggcccaagggcagtgtctcccctctcctacggccagaaagctttagtaaccattaaaagcactaatagaaatgtaaaagaagataaacataggggtaaggtgaccagcttatcctggttgcccaagacttgcccagttttcatgctgaaatcctccaattcaggtcaactggagacgcctggtcaccctatctgggggtcaaaatcaaatgcctataaagagatcagcactgaggctctctgtgaggaagctacccaaagccagggaaagaatcacctgaaagaattagaaggacagtgcccagagttcacacaaacattggaattctgcctgttcccaatagccacagtgcaaactttcataagcaacttcagcaaagtctcaggatacaaaatcaatgtacaaaaatcacaagcattcttatacaccaataacagacaaacagagagccaaatcatgagtgaactcccattcacaattgcttcaaagagaataaaatacctaggaatccaacttacaagggacatgaaggacttcttcaaggagaactacaaaccactgctcagtgaaataaaagaggatacaaacaaatggaagagcattccatgctcatgggtaggaagaatcaatatcgtgaaaatggccatactgcccaaggtaatttatagattcaatgccatccccatcaagctaccaatgactctcttcacagaattggaaaaaactactttaaagttcatatggaaccaaaaaagagcccacattgccaagtcaatcctaagccaaaagaacaaagctggaggcatcacgctacctgacttcaaactatactacaaggctacagtaaccaaaacagcatggtattggtaccaaaacagagatataaatcaatggaacagaacagagccctcaaaaataacgccacatatctacaactatctgatctttgacaaacctgagaaaaacaagcaatggggaaaggattccctatttaataaatggtgctgggaaaactggctagccatatgtagaaagctgaaactggatccattccttacaccttatacaaaaattaattcaagatggattaaagacttaaacgttagacctaaaaccataaaaaccctagaagaaaacgtaggcattaccattcaggacataggcatgggcaaggacttcatgtctaaaacaccaaaagcaatggcaacaaaagccaaaattgacaaatgggatctaattaaactaaagagcttctgcacagcaaaagaaactaccatcagagtgaacaggcaacctacaaaatgggagaaaattttcacaacctactcatctgacaaagggctaatattcagaatctacaatgaactcaaacaaatttacaagaaaaaaacaaacaaccccatcaaaaattggagcaatatatttgaagcactgaaagaaataattgtcaacctaaaagcatttatcctctaa

SEQ ID NO: 117589 - DNA, 2451 bp, Homo sapiens
atgattgtatgtctagaaaaccccatcatctcagccccaaatctccttaagctgataagcaacttcagcaaagtctcaggatacaaaatcagtgtgcaaaaatcacaaggattcttatacaccaataacagacaaacagagagccaaatcatgagtgaactcccattcacaattgctacaaagagaataaaatacctaggaatccaacttacaagggatgtgaaggatctcttcaaggagaactacaaaccactgctcaatgaaataaaagaggacacaaacaaatggaagaacattccatgctcatgggtaggaagaatcaatatcatgaaaatggccatactgcccaaggtaatttatagattcagtgccatccccatcaagctaccaatgactttcttcacagaattggaaaaaactactttaaagttcatatggaaccaaaaaagagcccgcattgccaagtcaatcctaagccaaaagaacaaagctggaggcatcatgctacctgacttcaaactatactacaaggctacagtaaccaaaacagcatggtgtaccaacattcgaccaggagagactggaatggatgtaacaagccgctgcacccttggagaccccaacaaactgccagaaggggttccccaacctgcccgcatgccctatatctcagacaagcaccctcgacaaaccttggaagtgattaaccttctgagaaagcaccgggagctatgtgatgtggtgctagttgtgggcgccaagaagatatatgcccatcgagtcattttgtcagcctgtagtccctacttccgagctatgtttacaggagaattggcagagagccgtcagacagaagtagtgatccgagacattgacgagagggctatggaattactgattgactttgcgtatacctcccagataacagtagaagagggcaatgttcagactcttctgccagctgcttgcctcctccagctggcagaaatacaggaagcctgctgtgaattcttaaagagacaattagatccttctaactgcctgggcattcgggcttttgctgacacacattcatgtcgtgagttgctaaggatagcagacaagttcacccaacataactttcaagaggtaatggagagtgaagagttcatgttgcttccagccaatcaactcattgatataatatccagtgatgagctaaacgttcgcagtgaagaacaagtgttcaatgcagtgatggcctgggtcaaatacagtattcaggaaagacgtcctcaattaccccaggtgctgcagcatgttcgtttgcctttgcttagtcccaagttcctggtcggcacagtaggctctgatcccctcatcaaaagtgatgaagaatgcagagacttggtagatgaggctaaaaactacctcctattgccgcaagaacgaccactaatgcaaggaccaaggacgagaccacggaaacctatccgatgtggggaagtactctttgcagttggtggttggtgcagtggagatgccatttccagtgttgaacgatatgatccacagaccaatgaatggagaatggtggcttcaatgagcaaaaggagatgcggagttggggtcagtgttcttgatgatctgttatatgcagtaggaggccatgatggatcctcttatctcaatagtgttgaaaggtatgaccccaaaacaaaccagtggagcagtgatgtggcccctacaagcacctgcaggacaagtgttggtgtagcagtacttggaggctttctttatgctgtgggtggccaggatggtgtgtcttgcctcaacattgttgagaggtatgatccgaaggagaacaagtggactcgggtagcttctatgagtaccagaagactaggtgtggctgtggctgtgttaggagggttcttatatgctgtaggtggctctgacgggacatctcctctcaacacagtggaacgttacaatcctcaggaaaacagatggcacactatagcccctatggggacccggaggaaacacctaggctgtgcagtatatcaggacatgatctatgctgtaggaggtagagatgacactacagagctgagcagtgctgagagatacaaccccagaaccaaccagtggtctccagtggtggccatgacatcacgccgtagtggagttggcctggcagtggtcaatggacagctcatggcagtaggaggttttgatggcacaacatacttgaagaccatagaagtttttgatcctgatgccaatacatggaggacttgttcctcaaccccaagacctaagagaatagctatagtactagtcataatatcaatgttccaggcagcaaagttggaagaagggaaaaagcttttgcatcctctggatgtattgcgaaagaaatgtccagactttgagggctacagggtacagaccaaagaaattcagtag

SEQ ID NO: 117590 - DNA, 2505 bp, Homo sapiens
atgactgaattgactggcatacaacaaccacaaattgttctctttgagcacaaagggcataaattggttcagggaagttcatctgatgcaggaaaggtcaatcggatataccaacactacgaggccagtgataaattcaattatacaacaggattggcttggaaaacagctccagagcaaacagggaaaaccgtaagaaagcaacagataaaactcaatgtaaagaaaatggaatccaggtcaaagatgcaggaacacagttcctcaccaccaatggaacaaagctggagggagaatgactttgatgagttgagagaagaagccttcagacgatcaaactactctgagctacaggaggaaattcaaaccaaaggccaagaagttaaaaactttgaaaaaactttagatgaatatataactagaataaccaatacagagaagtgcttaaaggagctgatggagctaaaagccaaggctcgagaactacgtgaagaatgcagaagcctcaggagccgatgcgatcaactggaagaaagggtatcagtgatggaagatgaaatgaatgaaatgaagcgagaagggaagtttagagaaaaaagaataaaaagaaacgaacaaagcctccaagaaaaatgggactatgtgaaaacaccaaatctacgtctgattggtgtacctgaaagtgatggggagaatggaaccaagttggaaaacactctgcaggatattatccaggagaacctccccaatctagtaaggcaggccaacattcagattcaggaaatacagagaacaccacaaagatactcctcgagaagagcaactccaagacacataattgtcagattcaccaaagttgaaatgaaggaaaaaatgttaagggcagccagagagaaagaaatacaaactaccatcagagaatactacaaacacctctacgcaaataaactagaaaatctagaagaaatggataaattccttgacacatacactctcccaagactaaaccaggaagaagttgaatctctgaatagaccaataacaggatctgaaattgtggcaataatcaatagcttaccaaccaaaaagagtccagaccagttggattcacagccgaattctgccagagaaaaagagggaatcctctctatctcattttgtgaggccagcatcatcctgataccaaagctgggcagagacacaaccaaaaaagagaattttagaccaatatccttgatgaccattgacacaaaaatcttcaataaaatactggcaaaccaaatccagcagcacatcaaaaagcttatccaccatgatcaagtgggcttcatccccgggatgcaaggctggttcaatatatgcaaatcaataaatgtaatccagcatataaacagaaccaaagacaaaaaccacatgattatctcaatagatgcagaaaaggcctttgacaaaattcaacaactcttcatgctaaaaactctcaataaattaggtattgatgggacgtatttcaaaataataagagctatctatgacaaacccacagccaatatcatactgaatgggcaaaaactggaagcattccctttgaaaactggcacaagacagggatgccctctctcaccactccttttcaacatagttttggaagttctggccggggcaattaggcaggagaaggaaataaagggtgttcaattaggaaaagaggaagtcaaattgtccctgtttgcagacgacatgattgtatatctagaaaaccacattgtctcagcccaaaatctccttaagctgataagcaacttcagcaaagtctcaggatacaaaatcaatgtacaaaaatcactagcattcttatacaccaataacagacaaacagagagccaaatcatgagtgaactcccattcacaattgcttcaaagagaataaaatacttaggaatccaacttacaagggacgtgaaggacctcttcaaggagaactacaaaccactgctcaatgaaataaaagaggatacaaacaaatggaagaacattccatgctcatgggtaggaagaatcaatatcgtgaaaatggccatactgtccaaggtaatttacagattcaatgccatccccatcaacctaccaatcactgtcttcacagaattggaaaaaactactttaaagttcacatggaaccaaaaaagagcccacattgccaagtcaatcctaagccaaaagaacaaagctggaggcatcacgctacctgacttcaaactatactacaaggctacagtaaccaaaacaggatggtactggtaccaaaacagagatatagatcaatggaacagaacagagccctcagaaataacgacacatatctacaactatctaatctttgacaaacctgagaaaaacaagcaacggggaaaggattccctatttaataaatggtgctgggaaaactggctagccatatgtagaaagcagtgtgttttcattgtacctccaacagaagggtag

SEQ ID NO: 117591 - DNA, 2292 bp, Homo sapiens
atgaataatgctaaagaaaactttcttggaaggttccaagatggccgaataggaacagctccagtctacagcccccagcatcagcgacgcagaagacgggtgatttctgcattaccaactgagcctccactggtgatacccaggcaaacagggtttggagtggacctccagcaaactccaacagacctgcagctgagggtcctgactgtgagaaggaaaactaccaaacaggaaggacattccaccaaaaccccatctgtacgttaccatcatcaaagaccaaaggaagataaaaccacaaagatggggagaaaccagagcagaaaagctgaaaattctaaaaatgagagcgcctcttctcctccaaaggaatgcagctcctcgccagcaacagaacaaagctggatggagaatgactttgacaagtacacagaagtaggcttcagacaactggtaataacaaacttctctgagctaaaggaagatgttcaaacccatcacaaagaagctaaaaatcttgaaaaaagattagacgaatggctaactagaataaacagcatagagaataccttaattgatctgatggagctgaaaaccatggcacgagaactacgtgactcatgcacaagcttcagtagacaattcgatcaagtggaggaaagggtatcagtgattgaagatcaaatgaacgaaatgaagcgagaagagaagtttagagaaaaaaagatgctggaagttctgcccagggcaatcaggcaggagaaagaaataaagggtattcaattaggaaaagaggaagtcaaattgtccctgtttgcagataacatgactgtatatttagaaaaccccatcatctcagcccaaaatctccctaagctgataagcaacttcagcaaagtctcaggatataaaatcaatgtgcaaaaatcacaagcattcctatacaccaataacagacaaacagagagccaaatcatgagtgaactctcattcacaattgcttcaaagagaataaaatacctaggaatccaacttaaaagggatgtgaaggaactcttcaagaactacaaaccactgctgaaggaaataaaggaagacacaaacaaatggaagaacatcccatgttcatgggtaggaagaaccaatatcgtgaaaatggccatactgcccaagataatttatagattcaatgctatccccatcaagccaccaatgactttctttacagaattggaaaaaactactttaaagttcataaggaaccaaaaaagagcccacattgccaagacaatcctaagcaaaaagaacaaagctggaggcatcatgctacctgacttcaaactatactacaaggctacagtaacaaaaacagcatggtactggtaccaaaacagagatatagaccaatggtacagagcagaggcctcagaaataatgccacatatctacaactacctgatctttgacaaacctgagaaaaacaagcaatggggaaaggattccctatttaataaatggtgctgggaaaactgcctagccatatgtggaaagctgaaactggatcccttccttacaccttatactaaaattaattcaagatggattaaagatttaaatgttagacctaaagccataaaaatcctagaagaaaacctaggcaataccattcaggacacaggcatgggcaaggacttcatgtctaaaacaccaaaagcaatggcaacaaaagccaaaattgacaaatgggatctaattaaactaaagagcttctgcacagcaaaagaaactaccatcagagtgaacaggcaacctacaaaatgggagaaaatttttgcaacctactcatctgacaaagggctaatatccagaatctacaatgaactcaaacaaatttacaagaaaaaaacaaacaactccatcaacaagcgggcgaaggatatgaacagacacttctcaaaagaagacatttatgcagccaaaagacacatgaaaaaatgctcatcatcactggccatcagagaaatgcaaatcaaaaccacaatgagataccatctcacaccaccagaggtggaagtggttctggaaactttgatcatggtcatggaggtggtggtcgtggaggaagcttcagttgtcatggtggctttggtggcagtcatggtggtggtggttatggtggcggtggggatggctataatggatttggtaatgatggaagcaattttggaggtggtggaagctacaatgattttggcagttacaacaatcagtcttcaaattatggacccatga

SEQ ID NO: 117592 - DNA, 3935 bp, Homo sapiens
aaaatctagaagaaatggataaatacctggacacatacaccctcccaagactaaaccaggaagaatttgagtccctgaatagaccaataacagggtctgaaattgaggcaataattaatagcttaccaaccaaaaaaagttcaggaccagacggattcacagccaaattctaccagagcatagtgctggaagttctggccagggcaatcaggcaggagaaagaaataaagggtattcaattaggaaaagaggaagtcaaattgtccctgtttgcagatgacatgattgtatatttagaaaaccccatcatctcagcccaaaatctccttaagctgttaagcaacttcagcaaagtctcaggatacaaaatcaacgtgcaaaaatcacaagcagtcctatacaccaataacaaacaaacagagagccaaatcatgagtgaaccttcattcacaattgcttcaaagagaataaaatacctaggaatccaacgtacaagggatgtgaaggacctattcaaggagaactacaaaccactgctcaacaaaataaaagaggacacaaacaaatggaagaacactccatgctcatggataggaagaatcaatatcatgaaaatggccatagtgcccaaggtaatttatagattcaatgccatccccatcaagctaccaatgactttcttcacagaattggaaaaaactactttaaagttcatatggaaccaaaaaagagcccgcattgccaagtcaatcctaagccaaaagaacaaagctggaggcatcacgctacctgacttcaaactatactacaaggctacagtaaccaaaacagcatggtactggtaccaaaacagacatatagaccaatggaaaagaacagaggcctcagaaataataccacacatctacgaccatctagtctttgacaaacctgacaaaaacaagaaatggggaaaggattccctatttaataaatggtgctgggaaaactggctagccatatgtagaaagctgaaactggatcccttccttacaccttatacaaaaattaattcaagatggattaaagacttaaatgttagacctaaaaccataaaaaccttagaagaaaacctaggcaataccattcaggacataggcatgagcaaggactttatgtctaaaacaccaaaagcaatggcaacaaaagccaaaattgacaaatgggatctaattaaactaaagagcttctgcacagcaaaagaaactaccatcagagtgaacaggcaacctacagaatgggagacaatttttgcaatctactcatctgacaaagggctaatatccagaatccacaaagaactcaagataatttacaagagaaaaacaaacaaccccatcaaaaagcaaacaggatctggaatggacatccagcaaactgcagcagacctgcagcagaggagcctgaccgtcaggaggaaaactaacaaacagaaaggaatagcatccacatcaacaaaaaggacgtccacaccaaaaccccatccaaaggtcatcaacatcaaagaccaaagaaagcaggaaagatctaaaattgacaccctaacatcacaattaaaagaactagagaagcaagagcaaacacattcaaaagctagcagaaggcaagaaataactaagatcacagcagaactgatggagacagagacacaaaaaacccttccaaaaatcaatgaatccaagaactggttttttgaaaagatcaacaaaattgatagacctgcagcaagactaataaagaagaaaagagagaagaatcaaatagacgcaataaaaaatgataaaggggatatcaccaccaatcccacagaaatacaaactaccatcagagaatactataaacagctctacgcaaacaaactagaaaatctagaagaaatggataaattcctgaacgcatacatcctcccaagactaaaccaggaagaagttgaatctctgaataggccaataacaggctctgaagttgaggcaataattaatagcctaccaaccaaaaaaagttcaggaccagacggattcacagccgaattctaccagaggtacaaggaggaactgctgataagcaacttcagcaaagtttcaggatacaaaatcaatgtgcaaaaatcacaagcattcttatacaccaataacagacaaacagagagccaaatcatgagtgaactcccattcacaattgcttcaaagagaataaaatacctaggaatccaacttacaaggaatgtgaaggacctcttcaaggagaattacaaaccactgctcaacgaaattaaagaggacacaaacaaatggaagaacattccatgctcatggataggaagaatcaatattgtgaaaatggccatactgcccaaggtaatgtatggattcaatgccatccccatcaagctaccaatgactttcttcacagaattggaaaaaactactttaaagttcatatggaaccaaaagagagcccacattgccaagtcaatcctaagccaaaagaacaaagctggaggcatcatgctacctgacttcaaactatactacaaggctacattatccaaaacagcatggcagtggtaccaaaacagagatatagaccaatggaacagaacagagccctcagaaataatgccgcataactacaaccatctgatctttgacaaacctgacaaaaacaagcaatgggaaaaggattccctatttaataaatggtgctgggaaaactggctagccatatgtagaaagctgaagctggatcccttccttacaccttatacaaaaattaattcaagatggattaaagacttaaacgttagacctaaaaccataaaaaccctagaagaaaacctaggcaataccattcaggacataagcatgggcaaggacttcatgtctaaaacaccaaaagcaatggcaacaaaagccaaaattgacaaatgggatctaattaaactaaagagcttctgcacagcaaaagaaactaccatcagagtgaacaggcaacctacaaaatgggagaaaattttcgcaacctactcatctgacaaagggctaatatccagaatctacaatgaactcaaacaaatttacaagaaaaaaacaaacaaccccatcaaaaagtgggtgaagggtatgaacagacacttctcaaaagaagacatttatgcagccaaaagacacatgaaaaaatggtcatcatcactggccatcagagaaatgcaaatcaaaaccacaatgagatgccatctcacaccagttagaatggcgatcattaaaaagtcaggaaacaacagtgttttccatactcctgactgtgctgaccccaccagcatatttctctatcctctatatttcctgcaaaatgttaatgggtctagaaacttgatcaggtccaggatccatgcgctttttaatgcgctttatgaactctttatatttgagataattatggttaaaactcctaaggaagccacagaaaaggattattatagctcctccacactcctgaaaccttgtttgctttctccgaggcagaaatcccacaaggtcttcacgttgccagctgtcgagctaacgaactgccagtgtgttcttgaatgggagcactcagcctaccgaggctcccctgagcagcttgcgctgtcttcaccatgtgattgcttttatctggccagtgcaggagctgctcctaatcaccctgctgtttgcctccaagggtcaaactggggaccatcactacctaaacaaatgaggaggatgtcacctttgggggagactgataagcagttggcaggcaggccacgggcaagagaaggcgccagcagccagcagtctgcaaaggccgtaaatatgttacactctcagcagggagatgggcaatataggcaccaagaggcctttgtttaa

SEQ ID NO: 117593 - DNA, 3231 bp, Homo sapiens
atggggaaaaaacagagcagaaaaaccggaaactctaaaaagcagagcgcctctcctcctccaaaggaatgcagctcctcaccagcaacggaacaaagctggacggagaatgactttgacgagttgagagaagaagacttcagacgatcaaactactccgagctacaggaggaaattcaaaccaaaggcaaagaagttgaaaactttgaaaaaaattcagacgaatgtataactggaataaccaatacagagaagtgcttaaaggagctgacggagctgaaagccaaggctcgagaactacatgaagaacgcagaagcctcaagagccgatgcgatcaactggaagaaagggtatcagtgatggaagacaaaatgaatgaaatgaagcgagaagggaagtttagagaaaaaagaataaaaagaaacaaacaaagcctccaagaaatatgggactatgtgaaaagaccaaatctacgtctgattagtgtacctgaaagtgacagggagaatggaaccaagttggaaaacactctgcaggatattatccaggagaacttccccaatctagcaaggcaggccaacattcagattcaggaaatacagagaacgccacaaagatactcctcgagaagagcaactccaaggcacataattgtcagattcagcaaagttgaaatgaaggaaaaaatgttaagggcagccagagagaaagaaatacaaactaacatcagagaatactacaaacaccgctacgcaaataaactagaaaatctagaagaaatggataaattcctcaacatatacacccttcgaagactaaaccaggaagaagttgaatctctgaacagaccaataagaggctctgaaattgtggcaataatcaatagtttaccaaccaaaaagagtccaggaccagatggattcacagccgaatactaccagaggtataaggaggaactggtaccattccttctgaaactattccaatcaatagaaaaagagggaatcctccctaactcattttatgaggccagcatcatcctgataccaaagccgggcagagacacaaccaaaaaagagaattttagaacaatatccttgatgaacattgatgcaaaaatcctcaataaaatactggcaaaccgaatccagcagcacatcaaaaagcttatccaccatgatcaagtgggcttcatccctgggatgcaaggctggttcaatatacgcaaatcaataaatgtaatccagcatataaacagaaccaaagacaaaaaccacgtgattatctcaatagatgcagaaaaggcctttgacaaaattcaacaactcttcttgctaaaaactctcaataaattaggtattgatgggacatatctcaaaataaaaagagctatctatgacaaacccacagccaatatcatactgaatgggcaaaaactggaagcattccctttgaaaactggcacaagacagggatgccctctctcaccactcctattcaacatagtgttggaagttctggccagggcaattaggcaggagaaggaaataaagggtattcaattaggaaaagaggaagtcaaattgtccctgtttgcagatgacatgattgtatatctagaaaaccccattgtctcagcccaaaatctccttaagctgataagcaacttcagcaaagtctcaggatacaaaatcaatgtacaaaaatcacaagcattcttatacaccaataacagacaaacagaaacccaaatcatgagtgaactcccattcacaattgcttcaaagagaataaaatacctaggaatccaacttacaagggacgtgaaggacctcttcaaggagaggtccttgaaccactgctcaatgaaataaaagaggatacaaacaaatggaagaacattccatgctcatgggtaggaagaatcaatatcgtgaaaatggccatactgcccaaggtaatttatagattcaatgccatccccatcaagctaccaatgactttcttcacagaattggaaaaaactactttaaagttcatatggaaccaaaaaagagccctcatcgccaagtcaatcctaagccaaaagaacaaagctggaggcatcacgctacctgacttcaaactatactacaaggctacagtaaccaaaacagcatggtactggtaccaaaacagagatatagatcaatggaacagaacagagccctcagaaataacgctgcatatctacaactatctcatctttgacaaacctgagaaaaacaagcaatggggaaaggattccctatttaataaatggtgctgggaaaactggctagccatatgtagaaagctgaaactggatcccttccttacaccttatacaaaaattaattcgagatggattaaagacttaaacgttagacctaaaaccataaaaaccctagaagaaaacctaggcattaccattcaggacataggcatgggcaaggactacatgtctaaaacaccaaaagcaatggcaacaaaagccaaaattgacaaatgggatctaattaaactcaagagcttctgcacagcaaaagaaactaccatcagagtgaacaggcaacctacaaaatgggagaaaattttcgcaacctactcatctgacaaagggctaatatccagaatctacaatgaactcaaacaaatttacaagaaaaaaacaaacaaccccatcaaaaagtgggtgaaggacatgaacagacacttctcaaaagaagacatttatgcagccaaaaaaacacatgaaaaaatgctcaccatcactggccatcagagaagtgcaaatcaaaaccacaatgagataccatttcacaccagttagaatggcaatcattaaaaagtcaggaaacaacaggtgctggagaggatgtggagaaataggaacacttttacactgttggtgggactgtaaactagttcaaccattgtggaagtcagtgtggcgattcctcagggatctagaactagaaataccatttgacccagccatcccattactgggtgtatacccaaaggattataaatcatgctgctataaagacacatgcacacgatcttctgacgagccgcgttctgtacgctgcaggtttctgaaccatggcatccgttccaggaacgcatgcatcccgctcccggaacgcatgccattctgttcctggaaccgctatgccataccgttcctaggaagcgctatgccatag

SEQ ID NO: 117594 - DNA, 3756 bp, Homo sapiens
atgacaggatcaaattcacacataacaatattaactttaaatataaatggactaaattctgcaattaaaagacacagactggcaagttggataaagagtcaagacccatcagtgtgctgtattcaggaaacccatctcatgtgcagagacacacataggctcaaaataaaaggatggaggaagatctaccaagccaatggaaaacaaaaaaaggcaggggttgcaatcctagtctctgataaaacagactttaaaccaacaaagatcaaaagagacaaagaaggccattacataatggtaaagggatcaattcaacaagaggagctaactatcctaaatatttatgcacctaatacaggagcacccagattcataaagcaagacctcagtgacctacaaagagacttagactcccacacattaataatgggagactttaacaccccactgtcaacattagacagatcaacgagacagaaagtcaacaaggatacccaggaattgaactcagctctgcaccaagcagacctaatagacatctacagaactctccaccccaaatcaacagaatatacatttttttcagcaccacaccacacctattccaaaattgaccacatacttggaagtaaagctctcctcagcaaatgtaaaagaacagaaattataacaaactatctctcagaccacagtgcaatcaaactagaactcaggattaaaaatctcactcaaagccgctcaactacatggaaactgaacaacctgctccttaatgactactgggtacataacgaaatgaaggcagaaataaagatgttctttgaaaccaacaagaacaaagacaccacataccagaatctctgggacacattcaaagcagtgtgtagagggaaatttacagcactaaatgcctacaagagaaagcaggaaagatccaaaattgacaccctaacatcacaattaaaagaactagaaaagcaagagcaaacacattcaaaagctagcagaaggcaagaaataactaaaatcagagcagaactgaaggaaatagagacacaaaaaacccttcaaaaaatcaatgaatccaggagctggttttttgaaaggatcaacaaaattgatagacccctagcaagactaataaagaaaaaaagagagaagaatcaaatagacacaataaaaaatgataaaggggatatcaccaccgatcccacagaaatacaaactaccatcagagaatactacaaacacctctacgcaaataaactagaaaatctagaagaaatggataaattcctccacacatacactctcccaagagtaaaccaggaagaagttgaatctctgaatagaccaataacaggctctgaaattgtggcaataatcaatagtttaccaaccaaaaagagtccaggaccagatggattcacagacgaattctaccagaggtacaaggaggaactggtaccattccttctgaaactattccaatcaatagaaaaagagggaatcctccctaactcattttatgaggccagcattattctgataccaaagccgggcagagacacaaccaaaaaagagaattttagaccaatatccttgatgaacattgatgcaaaaatcctcaataaaatactggcaaaccaaatccagcagcacatcaaaaagcttatccaccatgatcaagtgggcttcatccctgggatgcaaggctggttcaatatgtgcaaatcaataaatgtaatccagcatataaacagagccaaagacaaaaaccacatgattatctcaatagatgcagaaaaagccttagacaaaattcaaagggttcttcatgctaaaaactctcaataaattaggtattgatgggacatatctcaaaataataagagctatctatgacaaatccacagccaatatcatactgaatgggcaaaaactggaagcattccctttgaaaactggcacaagacagggataccctctctcaccattcctattcaacatagtgttggaagttctggccagagcaatcaggcaggagaagggaataaagggcattcaattaggaaaagaggaagtcagattgtccctgtttgcagatgacatgattgtatatttagaaaaccccattttctcagcccaaaatctccttaagctgataagcaacttcagcaaagtctcaggatacaaaatcaatgtgcaaaaatcacaagcattcttatataccaataacagacaaaaagagagccaaatcatgagtgaactcccattcacaattgcttcaaagagaataaaatacctaggaatccaacttacaagtgttgtgaaagacctcttcaaggagaactacaaaccactgctcaatgaaataaaagaggatacaaacaaatggaagaacattccatgctcatggataggaagaatcagtattgtgaaaatggccatactgcccaaggtaatttatagattcaatgccatccccatcaagctaccaatgactttcttcacagaattggaaaaaactactttaaagttcatatggaaccaaagaagagcccacattgccaagtcaatcctaagccaaaagaacaaagctggaggcatcacactacctgacttcaaactatactacaaggctacagtaaccaaaacagcatggtactttttaccaaaacagagatatagatcaatggaacacaacagagccctcagaaataacaccgcatatctacaactatctgatctttgacaaacctgagaaaaacaagcaatggggaaaggattccctatttaataaatggtgctgggaaaactggctagccatatgtagaaagctgaaactggatccttatacaaaatttatacaccttatacaaaaattaattcaagatggattaaagacttaaatgttagacctaaaaccataaacaccctagaagaaaacctagacattaccattcaggacataggcatgggcaaggacttcatgtctaaaacaccaaaagcaatggcaacaaaagccaaaattgacaaatgggatctaattaaaactaaagagcttctgcacagcaaaagaaactaccatcagagtgaacaggcaacctacaaaatgggagaaaatttttgcaatctactcatctgacaaagggctaatatccagaatctacaaagaactcaaacaaatttacaagaaaaaaacaaacaaccccatcaaaaagtgggtgaaggatatgaacagacacttctcaaaagaagacatttatgcagccaacagacacatgaaaaaatgctcatcatcactggccatcagagaaatgcaaatcaaaaccacaatgagatactatctcacactaattagaatggcaatcattaaaaagtcaggaaacaacaggtgctggagaggatgtggagaaataggaacacttttacactgttggtgggactgtaaaccagttcaaccagtgtggaagacagtgtggcaattcctcagggatctagaactagaaatactatttgacccagccatcccattactgggtatatacccaaaggaatataaatcatgctgctataaagacacatgcacacaaacctcacaagtccttcagcttcagtacatatctctgtactacgagtcccacgtgtatgcttcagtccagggggcctctaagctccaacagctctatgcggatgcctccaacgacacacccaaccctgaatccattcctgatctccttgccccaaacctag

SEQ ID NO: 117595 - DNA, 485 bp, Homo sapiens
cacttcgcattgacccgctgctgcaggaaacggcacgaggggaaatgcaaacgtgcctttgatgccactacagcgaggataaagacggtctggaaccccttgtgggtacaacgtaacttctcagaacggcaccatctactcccctggctttcctgatgagtatccgatcctgaaggactgcatttggctcatcacggtgcctccagggcacggagtttacatcaacttcaccctgttacagacggaagctgtcaacgattacattgctgtttgggacggtcccgatcagaactcaccccagctgggagttttcagtggcaacacagccctcgaaacggcgtatagctccaccaaccaagtcctgctcaagttccacagcgacttttcaaatggaggcttctttgtcctcaatttccacgcatttcagctcaagaaatgtcaacctcccccagcggttccacaagcagaaatggttaactgagggg

SEQ ID NO: 117596 - DNA, 732 bp, Homo sapiens
atgaccacaggtcactttagtcgccatcttggttttggtggatttgggccggcttctttacggcgtctttttgtcaggaaggtctttgtgatctataccttgtgccgacctcctacctcatcctgtgacttagaacacctgacctcctatgaatttagcctacgattgttggagtcgttattaaattctctgtctgcatcagctctccttggtcccatcttaaacccacgttccacgcaacgtcctggcttgctgatggagatacagacggctgtgttctgtactttgcttctagctgttcctcgtaccagtgacacccaatgcagctctgtccccgagcccagatacggaaggagaattggttctgagttttctgccggctccatcgtccgattcgagtgcaacccgggatacctgcttcagggttccacggcgctccactgccagtccgtgcccaacgccttggcacagtggaacgacacgatccccagctgtgtggctccagaactacgtgaagaatgcagaagcctcaggagccgatgcgatcaactggaagaaatggtatcagtgatggaagatgaaatgaatgaaatgaagcgagaagggaagtttagagaaaaaagaataaaaagaaacgagcaaagcctccaagaaatatgggactatgtgaaaagactgaatctacgtctgattgtcgtacctgaaagagacagggacaatggaaccaagtag

SEQ ID NO: 117597 - DNA, 1119 bp, Homo sapiens
atgatggcacgtggagcaggtgttctcattagaaaaatctaccctcttaactataaacacagtgctgtagagcaggtctccagggcatactcattttatactcagaggcctgttgtccccgagcccagatacggaaggagaattggttctgagttttctgccggctccatcgtccgattcgagtgcaacccgggatacctgcttcagggttccacggcgctccactgccagtccgtgcccaacgccttggcacagtggaacgacacgatccccagctgtgtggtaccctgcagtggcaatttcactcaacgaagaggtacaatcctgtcccccggctaccctgagccatacggaaacaacttgaactgtatatggaagatcatagttacggagggctcgggaattcagatccaagtgatcagttttgccacggagcagaactgggactcccttgagatccacgatggtggggatgtgaccgcacccagactgggaagcttctcaggcttaacgccacacggaagctgtcaaggtgtatggcttgcacccttcggaacggggtctgagctgcacctgggcacttgtgattcaaagatggagccagaacagccagtatgcggaaagcagcatcctgaggattcacagggccgtagggccctgggcctggcccacaaaatcatcttctcctcccaggattctaggtctctgatgggaggggacggtcccgatcagaactcaccccagctgggagttttcagtggcaacacagccctcgaaacggcgtatagctccaccaaccaagtcctgctcaagttccacagcgacttttcaaatggaggcttctttgtcctcaatttccacggagattttgtgaagtaccagtgccaccccgggtacaccttggtggggaccgacattctgacttgcaagctcagttcccagttgcagtttgagggttctctcccaacatgtgaagcaactccgtcttctcagtgtgtctgggtcagcccgcacagaccagaggcaagactgcccgctcacggccctgcaccaaaacgacatgtgtgtcagaaggccagtttgttaatttgtggcaaagaaggaatgcagctggtctga

SEQ ID NO: 117598 - DNA, 1077 bp, Homo sapiens
  misc_feature (1)...(1077): n = a,t,c or g
gccctttttttttttttttgttaaagtgaattaatttattgattcatccattccataaatgtgagctcctttgaatgttatccttgctggggggatctgtgcccccaggcctggcgggctgtcacaggccaaggcctccccacaggagccctgtggttacagagctgcaggctcaaggagcccatgggtcagagaggcaaaggctgggctgctggtttgctttcaggctgtagggggtgagtgggtgggaggcaaatgggagcggccccttgccccaggtttgcctcaagtttttggagtaaccgccttctggaggcgtttcccggtagaaaccggaaggacgtgttgcgaagcggcgctggccgcagcncaaggcacttgcttggagctcagtgtctgagtagagccccttggtgctggaacaatcaagcaagctttccgttcccacgctgtcccagggcaaaaggtcaaggaactgcccgggcctccttttcttggcttggatgtaggattcagcacgagggtcccatcagagtccaggggcgcaggcgaccccacagaagagagcccgcatgggcacacctgcatccaccaatgccatgcaggcagcccaatcttcggcctcaggatcacttcgagtgtggccttgttgaaaatctctttgctgaccttcacctcggccggcccgtacacacccgccaggacagaggtgtcacccttatcgggttccttcgccgccgtcgccgtcgccacggcctccatcctgattctctcggacttttcaaccgcccggcgggccccgcacactaacctccggcccacgcacgcaagagacactttcgcctgagaatgttccgggtccgggtgcaccgctgcgcccaggcaccgaagttccgggcctaaggcagacgttgcattgcgcatgcgtggcctctctcgggctccgccctccgcagccaggaaggaaaggggctccccggagagtgagagacccttaaacctctcggacggttctggttgctgcaagcacttcactacggtcagggcataggaaaggagctctaacttgaaagccat

SEQ ID NO: 117599 - DNA, 411 bp, Homo sapiens
cgggggagggaggcccggaatgcagcagccgtcggggccgcccaggcgtgcacctgattccaccgcacccaggggccatcccgtctgggcggggtgcgggggcagctagctctgccgttacgagcaggcctgggcgattgcatctttcctgtttgagccaaatcggagttttctattctccactccacgcacccgcttccctgtgctggggtcctcaccccatcctgttctggggccacgcacaggagacaggactgcggcaccctcattctccagggaagccccgctgtttcaaactgagactcagcacccccagcactagcttgccggctgtcctgtggtggggggcagggtgagcgcacggccccacccagccggtgtggagagaagactccttgggaagtcccaggc

SEQ ID NO: 117600 - DNA, 608 bp, Homo sapiens
cttcatcctacgagagagaagttgtcccatctccaaccccttaggttaaaaagtttaaaaataaaagcaagaaagccagggccctccctctcctctaccctcctgaacctttcagatgaacagcctcaccgaatgctgcccttctctccggggctggggagctccccagagcctgccaatgccggctctccagacacctggctctgcccacctgcgctgccagggtttgctgagtgtggagactgaagttctttggtgtcaccccacagtcatccagagcgcagtggctctcaaattacactgagcaatctctccatgtttttaattaccccccaattatccactaagtggctcctcactttccaacaccgcatgcttgcctcagtttgccaaacctgcaatgtgcttctcccttgtagcagcctcctccttgcccaagagaagtggcccctctcagccttgaaattcctgagtcctttgtctatggcatacttgggacacacatcacaggctgcctttgtatttcactggttctgccactttccccttgaggactgtaaactccccaagggcagaggcagggccccggggatttcacagggcagtct

SEQ ID NO: 117601 - DNA, 825 bp, Homo sapiens
gccacacaaccagagggcgcaggccgcgttcccagcatccacccccaaggtgagtcggaggctgccttgcaggacctcaggaccctgatggggtcttccagacttcactcaggaaaggagtcaatcgggcacaacagcagcgccggcagctcctcccagggcccacaccatccaaggcgaaagacagccatccttgagaaggggggtagggagcctcaccgaatgctgcccttctctccggggctggggagctccccagagcctgccaatgccggctctccagacacctggctctgcccacctgcgctgccagggtttgctgaaatcctgttaaacccagaaaagggcgcagtgaaccgagaagtggctgggcctctcaactgcccggtggagacagccgcctgcctctacgacctgggacttcccaaggagtcttctctccacaccggctgggtggggcggcaagctagtgctgggggtgctgagtctcagtttgaaacagcggggcttccctggagaatgagggtgccgcagtcctgtctcctgtgcgtggccccagaacaggatggggtgaggcacctcccccgggccctccccgaccagtccgacggcagcgggcgaatgaggaagtcggccgcggaggcggaaaccgggccgggtgcaaggtctgcagcgggacggtccgactctgactcaggaggacgccctgacagctgccaaacggtgcccgctgcccgttacctccgtgcctcagacgccagaaacttccacgggagcggctgccccgggctcccaacccgtgagggccccgccctctagggcggg

SEQ ID NO: 117602 - DNA, 1338 bp, Homo sapiens
  misc_feature (1)...(1338): n = a,t,c or g
atggagtctggcgcctggggaggcgcggaggtgcttccagcggacggcagcgcgcgagaacgtcgggacctggttccctctttaatcacacccccgggggcgcttcgtgtgaggttccacgggggaaggcgagaggcgcaggctgccacacacgcactgtttggaagaggggaagcattgccccccctgcaccacctcaccaagatggctactttgggacacacattccccttctatgctggccccaagccaaccttcccgatggacaccactttggccagcatcatcatgatctttctgactgcactggccacgttcatcgtcatcctgcctggcattcggggaaagacgaggctgttctggctgcttcgggtggtgaccagcttattcatcggggctgcaatcctggggacccccgtgcagcagctgaatgagaccatcaattacaacgaggagttcacctggcgcctgggtgagaactatgctgaggagtatgcaaaggctctggagaaggggctgccagaccctgtgttgtacctagctgagaagttcactccaagaagcccatgtggcctataccgccagtaccgcctggcgggacactacacctcagccatgctatggatgcagcctcacaggctgaaggctttcttcaaccagagtgtggatgaagaccccatgctggagtggagtcctgaggaaggcctcacgggggttgtgctgctcctgatcctggccatcatgtatgtctttgcctcccaccacttccgccgccgcagtttccggggcttctggctgacccaccacctctacatcctgctctatgtcctgctgtaccttgatggaccatttggagagggccaccaggagtggcataagtttgaggtgtcagtgttagtgggagggggcattggggtcaccccttttgcctccatcctcaaagacctggtcttcaagtcatccgtcagctgccaagtgttctgtaagaagatctacttcatctgggtgacgcggacccagcgtcagtttgagtggctggctgacatcatccgagaggtggaggagaatgaccaccaggacctggnttacatctgtgagcggcacttccagaaggttctgaaccggagtctattcacaggcctgcgctccatcacccactttggccgtcccccctttgagcccttcttcaactccctgcaggaggtccacccccaggtccggaagatcggggtgtttagctgtggcccccctggcatgaccaagaatgtggaaaaggcctgtcagctcatcaacaggcaggaccggactcacttctcccaccattatgagaacttctag

SEQ ID NO: 117603 - DNA, 903 bp, Homo sapiens
atgcccgcaggctaccatgttctttccgacgtggtgagcgtggaaacgcccggttgccccgccgagttcctcaacatccgcatcccacctggagaccccgtgttcgaccccgaccagcgcggggacgtgcctgagcctccccgacgagtgccgccccctgctgcacggcgcccaatcccatcgaccacccaagggctgaggagtgtgggcgcacggtgcgggactggcaagcagctccacctgcagccccagtgcgagatccactgggtgaagccagctgggctcctgagtctagtgggaacttggaggacctttatgtctagctcagagcttgtaaatataccaatcggcactcggtatttagctcaagctgtaacactcaccgtgaaggtctgcagcttcactgctgaagccagcgagaccacgagcccaccgggaggaacgaacaactccagacgcgccgccttaagagctgttacactcaccgcgaaggtctgcagcttcactcctgagccagcgagaccacgaacccaccagaaggaagaaactcccaacacatctgaacatcaaaaggaacaaactccggacacgtcggcttttaagaactgtaacactcacggcgaaggtctacagcttcactccttgagcccggggagaccaccaaccccaccgggaagaccaaacaactggagaaaccctgggcttaaaagctggaacacttacccggggaaggtccgcaactttcattggctgttctccaagaaggagattgaagacatccgaaataccaccctgcgggacgtgctggtcgctgttatcaacattgaccccagtgccctgcagcccaatgtctttgtctggcataaagggggctttctgcctgtgtccccagttcttccctag

SEQ ID NO: 117604 - DNA, 799 bp, Homo sapiens
gccactcgctttggtgggaacctcgtgcttgtggggctgggctttgagatgaccaccgtacccatactgcatgcagccatccgggaggtggatatcaagggcgtgtttcgatactgcaacacaactgtaacactcacggcgaaggtctacagcttcactcctgaagccagggagaccacgaacccaccgggaggaacaaacaactgcagaaacgctggcttaagagctgtaacactcaccgcgaaggtccgcagcttcactgctgagccagcgagaccacgaacccaccagaaggaagaaactccgaacacatccgaacatcagaatgaacaaactccggacacgccccctttaggaactgtaacactcaatgcgagggtccgcagcttcattgttgaagtcaactcgcagaaccccctgctcatgtgggcggcgcccgaccccgcccccggtcagaacgggccccgggggctgtacgccttcggggcagagagagggaaccgggaacccttcctgcaggcgctgggcctggttttggttcgcttacacaaacttgtggggccaaaggctggcccgccaagaccccagactgggaaggacgaggagctgtttcaacaaccaccgccagagggtcatcgccacctaccagataacctctcctcacacatgcacatacagtaggacccgctgtttcccagtcaaggagattgataaagaacaaagtcttaccagtcaccactacttgagctgctcccattgctttggccacgagcaaagtgaccatcccgattggccctaa

SEQ ID NO: 117605 - DNA, 3993 bp, Homo sapiens
  misc_feature (1)...(3993): n = a,t,c or g
atgggcttctgcctggctctagcatggacacttctggttggggcatggacccctctggctgagtgctccctcctggaccctcattttggagaatacaacaggatcaagaggaggaattgtatgggggacaagatgccccagaaaaagggcaaagtcatccacatcaccagtccagtccctggagctcagaaccccatttcgtgggaggtgcagcgatttgatgggtggtacaacaacctcatggagcacagatggggcagcaaaggctatcacgtgctttcagacctggtgagcgtggaaactcccggctgccccgccgagttcctcaacattcgcatcccgcccggagaccccatgttcgaccccgaccagcgcggggacgtggtgctgcccttccagagaagccgctgggaccccgagaccggacggagtcccagcaatccccgggacccggccaaccaggtgacgggctggctggacggcagcgccatctatggctcctcgcactcctggagcgacgcgctgcggagcttctcggggggacagctggcgtcggggcccgaccccgcttttccccgagactcgcagaaccccctgctcataacgggccccgggggctgtacgnagagagggaaccgggaacccttcctgcaggcgctgggcctgctctggttccgctaccacaacctgtgggcgcagaggctggcccgccagcacccagactgggaggacgaggagctgttccagcacgcacgcaagagggtcatcgccacctaccaggtcagccgataccggccatttctggaccccagcatctcctcagagttcgtggcggcctctgagcagttcctgtccaccatggtgccccctggcgtctacatgagaaatgccagctgccacttccagggggtcatcaatcggaactcaagtgtctccagagctctccgggtctgcaacagctactggagccgtgaggtactggaggccacagctgccctgtacaaccaggacttatcctggctagagctgctccctgggggactcctggagagccaccgggaccctggacctctgttcagcaccatcgtccttgaacaatttgtgcggctacgggnatggctgttctccaagaaggagattgaagaaatccgaaataccaccctgcaggacgtgctggtcgctgttatcaacattgaccccagtgctctgcagcccaatgtctttgtctggcataaagaactccaggaagtgctgagtgagggcagaactgagactcagagagagctgaacatcgctgtgtatgagtggctgcccagcttcctgcagaaaacactcccggagtatacaggataccgtcctttcctagaccccagcatctccccggaatttgtggtggcctctgagcagttcttctctaccatggtgccccctggtgtctacatgagaaatgccagctgtcatttccggaaggtcctgaacaagggttttcaaagctcccaagctctcagggtctgcaacaactactggattcgggagaaccccaatctgaacagtacccaggaggtgaatgagctgctgctgggaatggcctcccagatttcggagttggaggacaacatagtggttgaagatctgagggctgccctgtacaaccaggacctatcccagctagagctgctccttggcgggctcctggagagccatggggaccctggacccctgttcagtgccattgtcctcgaccagtttgtacggctgcgggatggtgaccgctactggctgttctccaagaaggagattgaagacatccgaaataccaccctgcgggacgtgctggtcgctgttatcaacattgaccccagtgcaccctgccctcaacctaagcagctcacaactgacggcctgccccagtgtgcacccctgactgtgcttgacttctttgaaggcagcagccctggttttgccatcaccatcattgctctctgctgccttcccttagtgagtctgcttctctctggagtggtggcctatttccggggccgagaacacaagaagctacaaaagaaactcaaagagagcgtgaagaaggaagcagccaaagatggagtgccagcgatggagtggccaggccccaaggagaggagcagtcccatcatcatccagctgctgtcagacaggtgtctgcaggtcctgaacaggcatctcactgtgctccgtgtggtccagctgcagcctctgcagcaggtcaacctcatcctgtccaacaaccgaggatgccgcaccctgctgctcaagatccctaaggagtatgacctggtgctgctgtttagttctgaagaggaacggggcgcctttgtgcagcagctatgggacttctgcgtgcgctgggctctgggcctccatgtggctgagatgagcgagaaggagctatttaggaaggctgtgacaaagcagcagcgggaacgcatcctggagatcttcttcagacacctttttgctcaggtgctggacatcaaccaggccgacgcagggaccctgcccctggactcctcccagaaggtgcgggaggccctgacctgcgagctgagcagggccgagtttgccgagtccctgggcctcaagccccaggacatgtttgtggagtccatgttctctctggctgacaaggatggcaatggctacctgtccttccgagagttcctggacatcctggtggtcttcatgaaaggctccccagaggataagtcccgtctaatgtttaccatgtatgacctggatgagaatggcttcctctccaaggacgaattcttcaccatgatgcggtatggggtgtgcctttctaatcctgagacttcctgctctgtgtcaaaggtggaggtggaggtggaaatggntattagagatatctttaaacaaaacatcagctgtcgagtctcgttcatcactcggacacctggggagcgggcagcagtgcccactccccggctgtacacagaggcgctgcaagagaagatgcagcgaggcttcctagcccaaaagctgcagcagtacaagcgcttcgtggagaactaccggaggcacatcgtgtgtgtggcaatcttctcggccatctgtgttggcgtgtttgcagatcgtgcttactactatggctttgccttgccaccctcggacattgcacagaccaccctcgtgggcatcatcctgtcacgaggcacggcggccagcgtctccttcatgttctcttatatcttgctcaccatgtgccgcaacctcataaccttcctgcgagagactttcctcaaccgctatgtgccttttgatgccgcagtggacttccaccgctggatcgccatggctgctgttgtcctggccagtatgacaggtgtgcttctgctcctggtcctggccatcatgtatgtcttcgcctcccaccacttccgccgccgcagcttccggggcttctggctgacccaccacctctacatcctgctctatgccctgctcatcatccatggcagctatgctctgatccagctgcccactttccacatctacttcctggtcccggcaatcatctatggaggtgacaagctggtgagcctgagccggaagaaggtggagatcagcgtggtgaaggcggagctgctgccctcagcctccatcctcaaagacctggtcttcaagtcatccttgggcagacaaatgctctgtaagaagtacatctgcgagcggcacttccagaaagtgctgaaccggagtctgttcacgggcctgcgctccatcacccactttggccgtccccccttcgagcccttcttcaactccctgcaggaggtccacccacaggtgcgcaagatcggggtgttcagctgcggccctccaggaatgaccaagaatgtagagaaggcctgtcagctcaagatagaaaatgacaatgaaatacttgatgctgatacagcacaagccttggcaaaggttaataaacaattgtaa

SEQ ID NO: 117606 - DNA, 666 bp, Homo sapiens
ggtgttgctggacgagcgcagcgccgccctggacggcgccaagcgcgacggcaccctggccctggcggccggcgcgctctgccgcgaggcgcgcgccgcgcaagtcttcttcctcaaaggaggatacgaagcgttttcggcttcctgcccggagctgtgcagcaaacagtcaacgtctcagccaattgtcccaaccattttgagggtcactaccagtacaagagcatcctctgtgggatgacaacccacaaggcagacatcagctcctggttcaacgaggccattgacttcatagactccatcaagaatgctggaggaagggtgtttgtccactgccaggcaggcatttcccggtcagccaccatctgccttgcttaccttatgaggactaatcgagtcaagctggacgaggcctttgagtttgtgaagcagaggcgaagcatcatctctcccaacttcagcttcatgggccagctgctgcagttagagtcccaggtgctggctccgcactgttcggcagaggctgggagccccgccatggctgtgctcgaccgaggcacctccaccaccaccgtgttcaacttccccgtctccatacctgatcactccacgaacagtgcgctgagctaccttcagagcctcattacgacctcatctcactgctga

SEQ ID NO: 117607 - DNA, 669 bp, Homo sapiens
gaggatacgaagcgttttcggcttcctgcccggagctgtgcagcaaacagtcgacccccatggggctcagccttcccctgagtactagcgtccctgacagcgcggaatctgggtgcagttcctgcagtaccccactctacgatcaggttagtaggtgtccctgccacagggaagaagtaagaactggcaaaggcatggaagagtagtgccagggaggaatatagaaagtaacctgcagcattatttataacggaggggacacagggatatgatttattccacagttaagtggtctgacggagccgagtctccaattgtaggctctacggaaatgaacttgctggtcctgcccaggcaaatgggcttagttccctatttatttatcctccagcaacagaactgagttcactcggtatctgaaattgacttttccagcagaaagtttttgtgggtatgggcactggccttggctttgagcaagcttgatgaatgttggatatttctggatttcagggtggcccggtggaaatcctgccctttctgtacctgggcagtgcgtatcacgcttcccgcaaggacatgctggatgccttgggcataactgccttgatcaacgtctcagccaattgtccccaaccattttgagggtcactaccagtacaagagcat

SEQ ID NO: 117608 - DNA, 2043 bp, Homo sapiens
tttgggctgtgtgtgcgacgcgggtcggaggggcagtcgggggaaccgcgaagaagccgaggagcccggagccccgcgtgacgctcctctctcagtccaaaagcggcttttggttcggcgcagagagacccgggggtctagcttttcctcgaaaagcgccgccctgcccttggccccgagaacagacaaagagcaccgcagggccgatcacgctgggggcgctgaggccggccatggtcatggaagtgggcaccctggacgctggaggcctgcgggcgctgctgggggagcgagcggcgcaatgcctgctgctggactgccgctccttcttcgctttcaacgccggccacatcgccggctctgtcaacgtgcgcttcagcaccatcgtgcggcgccgggccaagggcgccatgggcctggagcacatcgtgcccaacgccgagctccgcggccgcctgctggccggcgcctaccacgccgtggtgttgctggacgagcgcagcgccgggcctggacggcgccaagcgcgacggcaccctggccctggcggccgggcgcgctcttgccgcgaggcgcgcgccgcgcaagctcttcttccctcaaaaggaggatacgaagccgttttcggcttcctgtccggagcttgtgcagcaaaaagttcgacccccatggggctcagccctttccctgagtactagcgtccctgacagacgcggaatctggggtgcaagttcctgcagtaccccaactctacgatccagggtggcccggtggaaatcctgccctttctgtacctgggcagtgcgtatcacgccttcccgcaaggacatgcttggatgcctttgggcataactgcccttgatccaaacgtgctcagccaaattgtcccaaaccattttgaagggtcacttcccagtacaagagcatccctgtggaaggacaacccaaaggcagacatcagctcctggtgtcaacgaaggccattgacttcatagactccatcaagaatgctggaagaagggtgtttgtccactgccaggcaggcatttcccggtcagccacacatctgccttgcttaccttatgaggactaatcgagtcaagctggacgaggccctttgagtttgtgaaagcagaggcgaagcatccatctcttcccaacttcagctttcatggggccagcttgctgcagtttgagtcccagggtgctgggctccgcactgtttcgggcagaggctggggagccccggcaaatgctgggctcgaccgaggcacctccaccaccaccgtgttcaacttccccgtctccatccctgtccactccacgaacagtgcgctgagctaccttcagagccccattacgacctctcccagctgctgaaaggccacgggaggtgaggctcttcacatcccattgggactccatgctccttgagaggagaaatgcaataactctgggaggggctcgagagggctggtccttatttatttaacttcacccgagttcctctgggtttctaagcagttatggtgatgacttagcgtcaagacatttgctgaactcagcacattcgggaccaatatatagtgggtacatcaagtccatctgacaaaatggggcagaagagaaaggactcagtgtgtgatccggtttctttttgctcgcccctgttttttgtagaatctcttcatgcttgacatacctaccagtattattcccgacgacacatatacatatgagaatataccttatttatttttgtgtaggtgtctgccttcacaaatgtcattgtctactcctagaagaaccaaatacctcaatttttgtttttgagtactgtactatcctgtaaatatatcttaagcaggtttgttttcagcactgatggaaaataccagtgttgggtttttttttagttgccaacagttgtatgtttgctgattatttatgacctgaaataatatatttcttcttctaagaagacattttgttacataaggatgacttttttatacaatggaataaattatggcatttctattg

SEQ ID NO: 117609 - DNA, 732 bp, Homo sapiens
atggggcaaacttcgatgatgacgggcggggagtgtacgcaggccatcgggggacagcacagggcagttggtccccagccgcctactgaacgtgaagatgacaaggaagaagacctttacaatgatccattcccacttcacgaacagtcaagatattttctcttctttatgattttttttacctgcgcctgccagccagatagcagtggggtcggaaagggtgacctgcagtccacgttgctggaagggcatggcacagctccacctgacctggatctctctgctattaatgacaaaagcatcgtcaaaaagacgccacagttagcaaaaacaatatcaaagaaacctgagtcaacatcattttctgcccctcggaaaaagagcccgatggagaacaatcttgctgagtttgaaagaagggcagaaaagaatttattaataatgtgtaaggagaaggagaagctacagaaaaaggcccacgagctgaagcgcaggcttctcctctctcagaggaagcgggagctggcagatgtcctggatgcccaggttggggaagaagcctatttttctgtgaagtccacatgtccctgcaactttaccctgtactacgaggtggctgcacggggcaatattgtgctatcgggccagcagcctgcccacaccacccagcagcgaagcaagcgggcggcccctgcccctggagaaaccgattcgtttaacacacctttctga

SEQ ID NO: 117610 - DNA, 345 bp, Homo sapiens
atggagaacaatcttgctgagtttgaaagaagggcagaaaagaatttattaataatgtgtaaggagaaggagaagctacagaaaaaggcccacgagctgaagcgcaggcttctcctctctcagaggaagcgggagctggcagatgtcctggatgcccaggttggggaagaagcctatttttctgtgaagtccacatgtccctgcaactttaccctgtactacgaggtggctgcacggggcaatattgtgctatcgggccagcagcctgcccacaccacccagcagcgaagcaagcgggcggcccctgcccctggagaaaccgattcgtttaacacacctttctga

SEQ ID NO: 117611 - DNA, 1410 bp, Homo sapiens
gccttgaggtggaaggcgggaaaatggcggattcctcggggcgaggcgctggagaagcctgcaaccggccccacaaattctagcagtgccaagaagaaggataaaagagttcaaggtggaagagtgattgagtcccggtatctgcaatatgaaaagaagacaacccaaaaggctcctgcaggagatgggtcacagacccgagggaagatgtctgaaggtggaaggaaatccagcctgctccagaaaagcaaagcagatagcagtggggtcagaaagggtgacctgcaagtccacgttgcctggaagggcatggcacaagctccacctgacctggatctctctgctattaatgacaaaagcatcgtcaaaaagacgccacagtttagcaaaaacaatatcaaagaaacctgagtcaacatcattttctgcccctcggaaaaagagcccggatttatctgaagccattggaaatgatggagtctcagacactactgctgacgctactatccgtaaagatggagaacaatttttgcttgagtttgaaagaagggcagaaaagaatttattaataatggtgtaagggagaaggagaagctacagaaaaaggcccacgagctgaagcgcaggcttctcctctctcagaggaagcgggagctggcagatgtcctggatgcccatatcgagatgctcagccccttctaggcagtggccacacgcttaaaagagcaatacaggacatttgctacggtcctggacactaccaggcacgagctgcccgtgaggtccatccacctggcaggaagataggcaagcagtctcttagacgcccctgcaagcttgaaactgatgaccacctcagccgctccctgcgagaacttgatgttggtgattcggaagaaaatgtgcaggtgctggacttactgagcgaactcaaggacgtttacggcgaaaaaggaccttgagctccgaaggagctttgccccaggtgctggaactctccgcagaggcaagcaaaagaggcagccttggcaaaccaagaaagtttgggaaaaaaaacccagggcatggcgccccccagccggtggtatttcaatcaagacagtgcctgcagagaatcttgggggagcacccaagaacacgcccctgtctgaggaacgacaacccgggtgcctcgtcagcccccgctcaggccacgttcatcagcccaagcgaagatttttcttcaagcagccaggcaagaagtcccgccctctctctctcgttcagggagggacttgtcatgactcatggttacattcaggatacttgagcactttatatactaccgtagcactgtagctattttttatgtgataatcttgtttgataaaaaagtaaacctgttttgcaattgaaaaaaaaaaaaaaaaa

SEQ ID NO: 117612 - DNA, 1797 bp, Homo sapiens
aaggacagtgccgggccagggcccccagtcgccctcctcctgccgggtgcagcgtcctcagccctgctccaggctgtcgccgggctgcaccacggtgtagctcccctggcccaaggacagctgccggctgaagaaggatgtggtgcgcttcggcttcactcgcctgatccccttgccgtcctccacgtagtcgatggtggagagatgctggatccggctggacaccacactgccctgcctccgcagcttggggcgctgaacaggagccagtgaggagctggggtccgagggcgagccagtcgcactgtcctgggggcctgcgggctccgccgcctggctcagttcgatgcagtactcaatgagactgctcatcagttcggcctgcttggagtagatcttgaggagcttgttgacaggtgtgaccccgctgtccctgtcgaactccagccacaggatgggctcctcctcctcaggggaggtgtggtcccacgacagctcctggaagcacaggcccagcaggacgtgcttctctctgctgtccacgacgtgcacaccttccaggctgatggccacagaaactgatttgcgcccaccccggtgcaaaaagccttgggctggcttgtcaacctcaccgtggaagaaggcacacccatagaagggcagcttgtggcacttgaggaggtaggcgcggtagtgggtgcccagggcggcctcacacccgccgtcgctgctgacctcctgcaccttgcggtaggcgttcagcaggctctgctcacccggcccggccctggccccacggccccggagggcagcaaagagaccctggccccgcttacagaggtgggcagggaggaaggagtccagcttctccctcaggtcgcaggctgccggccagtcgggctggtaggtcacgagctgcacgcggcacaccagggcgcccagagcctcgcagtcctcaacgtcgcacaggtaccgtgcagccagcacgttgcccttggcctcctcatagagcagccgcaggacctcctcgtcggggatctggagctcccgcccctttgggaagaacacgttccttcggaactgcaggaaaggctcatccatggccacgtcgtcgtccggggcactggtgaagcgcagcagcagctccggccactggcgtcccagcttgtagggctggttcttgggtttcagctgcacctccagcagaggggagaccagccagagcgcgaagacatccagggcgatgtccggaagcttcaggacctcgcggacggcgcagtgcagctcatgggcacggagcgagggcaggttctccacagccaggggcaccaccgtgtcatctgccaggtataccagcacgtcagccgctcgggctcccacggaggacacgctgcttcggtgggatcgctcagcggggccgggctgcccggcactgccttctgtcccgtccatctgcaaaggcaaagagaaacagcagttaccgggagccagggatggggggctggaggtctcctcaagctctcggtgagtacggtaagggatcccaggctgggtccgcaaggttgagcggcgctgcctcgcagggtcgcagagcccgccacctgagaggcaaggctcctgcctggaatcctgccccgccgccaagcccgccaccgcccgcactcgggctcccgctaaggacgcagcgggaagcgacgcggaagccacggcgggaggaagcgcggcgcccgaggccccgcccccttcgacccgggggagccaatgggagcccagggccgccccgcgcggcccgcgcat

SEQ ID NO: 117613 - DNA, 1939 bp, Homo sapiens
ttttatgaaataaattttactaagcaataagcaataatgtagaaaaatacattttacctacaaactcaataaacaagaaacaaagggttcatatttagtgcataattacttactagtggctacagaggggtttctaaaatttacaataagtgcctgcatcaaacaaaaaaaaaagtgagaagcattcacaagtttaagagaagtgaatgaaaaatggtaaacagtacttaaacagtgcaggagggtaggaaggagaggtctccataaaaccacaaaggaaaagggtagctcctacagagcaggtttcaaaggagaggatcctggccatttcacaagatgagaagcatggacagcactggagaaaaacacattgtactttgcatccatttccaatacccagcgcccaaagtcaggaccactgggactggatttgccctcagcttcccagacctggggcaatctcaaaccagtccatttccagggtcgtcctcctaccacctcaggctctgcctcttccaatatacctctatgtccttcactttgttccaattgccctaatttggggatattagattccctggccactcaggaagtacagaaaagagagcggtctaacgaagccgcccttttctgtacagttcctcaactcttctcctagggagaggcgtgaattctggggagaagcacaatttggatcgagctgttgttttatcaggagaattttcttctgggctgagagtctgaagagagacaactacacataaaaggagaatcaaagaaagcagaaatattggaattgccacccaaccagggggacagagcccagttgagttaggctgggattgaagcagcctgccccagagactcactgggaaagaatgcccttcagcaattctccatatctttacctcaaaatctccctggagcagggcatcattgtttatgtacagtagcaaatggtaagtagtaatatcttcaggcctgtcatggataaaaatactatccttttaattccagtttacaaaaataggagtaatattcaaaacaatgattgtctacttttctatttatttttataaaaacataaacagctcgggcgaattttcaatccttgtgcacgctttgtatgaacttctctctatactttatatatatatatatatatatattctttatatatatttataatatatatcaataattggtccacaaagtatatctgtgcattctctagtgctttgtagaaagaaaaacaatattattatcaaaatattcatttaatggctttacttcattacataaatacatgtttggatagaacacacgagcgatgactgttgagtcagtttggaaaacgacttttcattgcgtcagggctgtatacacagggtagctggtaacccatcgctacaaataagctattcggcgtcctttgtttttaaccctttgtttatacctcttccctaggacggccgccaagtatttcttgacagccatttgtttccggtagcggctgtagctgtccgtgaagatcccgtccgagtggcgcttggagagcggctccgcgtcgtcccccgcgccgccgccgaggctcccacccacgccccgggccacgagcgactgcaggtgcttcccggcggacagctggtccagcactttgcggtaggcctcgttaaggatcccgtgggcgacatctcttctcccggccgggcggtaccaggcggcggcggcgcgcggcgcggaggcggggctccctgcgcccggcggctccgagccaccgaagtctggcagcgggtttccgtcctcgccgtacgcctcttcctctggcctgatcccggggaaccggagtccggcggcggcaggtgagctgtagacgctgctgtgcatgattatcccatagaccagcagggccagcctcgctccgctacacatggtcatt

SEQ ID NO: 117614 - DNA, 1302 bp, Homo sapiens
tcaactgtgatccaggttggggttcgtaaactcagaggtcagggggacatcaggtgtctgagccctggcagagtccaggggagatttagaggcgggtccctccagcaacacgtgggaattctgggagcttgctgggttctcagtgctctttttgggaaatcggcgggctgccctaggtctttgcgagctgccttccctgagggctggagttgagttcacagctgtgcagcgtctgtggagctctgcgggcgccacctggtggtcaaaactggcagtgccgttagcgggctcagcgggacgtgagaacccaggcagcttgctagatgggcttctatttacattagagaacaatctctccaggggacagggtgccccttcaactcctcccgctgccaggagagctgccaggtaggacggcgggcaaagcgcttcttcaagttcctgcgctggagtcaccacccgagaggcatcgccgtctggcgttggtgtctgagcagaagccgcaggaaccagcgggagcagcaggaggagctgcgggactcgtttgccgaggctcgtgttctgctcaaaagtttgtagacgcgcagaaccaggagggagcgtgacacggagagaagggggcgcagagagagaggcagaagaaagaaagagggggcgatgaggtgaagcgcggaggagcaaggtggccgtaagtccacccggaggaagaagcaggcgattaagggaaagagggaaagtcagaaaagaaggggaggaaggcaagggagagggcgggcggctagcccgcctttgtaggagccgcgggccaggcagccgcgagggtcggcggcgccttctctgctccgaggtctctccggctgcctctgaagctgcggcttctgctgctgctaccgagatcttttgttgctcatggccattgtctagctgggcatgtttgacatctctctgcaggagagctttcctattcatgaaaatctggccttggccgtgagggaagtggctcctgtaagggcgcaaagcagcgtggcaggggtccgagctggggttctgtccccgctgggctgccgccccagctggactaccgccagggaactcagcgccaattacctccaggagaagctgcagcgggacctgtctggtcccatgtagggaagtctcttcatcttctgaatcccgacttccattattcaggaggggttctgatgacattgtcttgaaaacaccctcctctgtaatgctcaccctgatcccggggaaccggagtccggcggcggcaggtgagctgtagacgctgctgtgcat

SEQ ID NO: 117615 - DNA, 2701 bp, Homo sapiens
tcacaggtctatggtgtcgctgcccacgctcagctcgtcgatctgtcggcaggcgtccaggaactgctcctgcagcaaggcctcctcggcctgcagctcagaagcaggctctggggagtcgcgagagggtggggacagggcctggtaggatcctgaggccgggaggctggggctgcttcccgagggccgcgggggactgaggacgcagaccagagggcagcgcgggggcctgtcggggctggaacacagcagcatggacgagctgtcccgcgagagtccgcagaacgagccagatgagacgctgctgcctgcgggccaagccccaggggaggggagctccgggggcgcagcggggccagaggcctcccctgatctctcactggccctgcccccggtccccagcgaggcggtgcggtagagtccgagcccaggcagagcgtcctcgaaggcagggccctggaagaggccaggcgcaagcagggcctcgctgcagagggcctcctcgatgctgcgtcgcaggttgattggggagggcgggcggaagtccacggtgtaatcgctgcagggagaggaagccggggacggggccgggttggccgccgcgccttcgaagccccggcaacctccgccctggagtaggaggtctgggcctggccctgccagcgcgcacagctgcagcagctccgcgtccccgcgagcgatggcgctccccaggggctccttgtctgggggcccagtgacccagcctcccggcagcagcggagccgcgtggcccggggacaagcggaagagcttggcccagcagcgcggcggcacgcgaggactgcagagcgccgggtagaggcccagcagcgccaacgggagcgcgacgcccacctcgcccaggcgcaggcctagctggaaggcccaccagggccagggcccttccaggccggattggccgccgtagcccagggcgtgcagcacctcatagccctgcagggctccgctcagcagcccgaaggtgcccgccaccggggccgtgcgcgccgcgcgccgccaggactcccgaggggcgggggggctgcgcccctgcggcacgggggtggcgcccaaaaaacccgaccctcccaggggcgccccggcccgccgccgccgcccgccccagcaggagagcgccagccgcagcccggaaaggaaagcggcgagaaaggcgtgcagcccgcgcgaggcgagccgcaggggccgcagcgggcgatgcgcggcgctcccgcagggcggcggcggccgccagccccagccccaggagcagcagcgcagccaggccggtggggcaccgcggcgggcgcggccgggccagcagcaggcaggccagccccaggccggcagccaagcagggcagcggaaggtcctgcagcagcagccaggcgagcgcgggcagtcgatccctgtgcccataggcgtcgtagaagagcgggaaggcccgcgtggtcccggccgacagcagcagcaggtccagcagcgccaggcagggggcgccgggcgggcagcgccagggcaagagggccagagccagcagcgccagcaaggcaaccaggccgaagagcgcgcctaccccgtacacgtgggcctcccaggccagcccccagcgagccctggcctctgcccagtcggcctccagggtcaggaaaaagaggggcctcggcgcctcgggaggctgcccctcgcgttcaggcaattctcccacgctgcaggaccctggcccacactctggctgccccgaagggttcccgaggctggcgggaggagagaggtcatctgggccagagatggggactgtggggtctaatgatgttgttgcaatcgaggcaaaacttagggaagcagctgggtccagaggacttgggctggagagcttcctctccagggagtatgggggcagggacagagtggtaccaaggaaccccagagaacccgaaactccagaggcagagcttgtggatgtagtttcacctggggggctcaggccggagaagttccggagtggggacagagtagtgccaaagaatccaaagggtcccaggcgcccagcaatctctgccaggctggcccgcaggctgggcagcaggggcagcgttcgatgcccaagcgtgggggctgcacctgctctcagtgccatgtcaaacttcagctccagctcgctctggtggggcctgggagcactggatggaagtgctgtcaccatcagagcagtgtcccaggtcacagtgctcctcctgggctgatagggggcagtgggcccatcgctgggcccagagcgccgggatgtggactccggaagcagggaggaggcccggggctttgagccaccttcggtggagccccactcagtgagagagttccctgaggagcccaccagcaattcccaaagggggtcagtcctcagcccactggccacctcttcccctggctcctggcctggcccaagagagagtggctgggtctctgtgactgggctcccccagacagcagcaggtccccgaagatggaatttgaagttaagtcccaggttgagagacagcatagaggcctcactttgaggtacgggggtcaaagtggtggcaggggcacctgggatggagggggtgggctgggggcccacagtagcagcaaacaggacgcagcagaacagtcccagccctagacagccatgcctggccat

SEQ ID NO: 117616 - DNA, 914 bp, Homo sapiens
  misc_feature (1)...(914): n = a,t,c or g
gcacgagggtttttttttttttattttaggctgtccattccccaactttattccaccaaatctggtgtctgtaagaaagctgggggtcaagccagnctggggggcggctgtcccagactccccctggccccaatgccctcaagggagggagcggcaagatcacgggagatgcgccggccccggggaatccggcgttccccaaaagaaggactctttcatcccgaaggatctcaggggaaaagtcaaaacggggctgacccccaaaggatgtagagggagcccggctccagcaagagttccgagccactcccccggctcctgggtgtgcaccagaccgcataacgctgggagacaggagagacaggcccggcgattggtggccccgcagaacttgatgctgtccacgtggggctttgatgtaaccgcgggtttccaagttccaagcaacgtgcacggaggagagcaagggtctggccggggcccaaaaagcggccgcctgcacgcgctgcaaggatggcccggctggcttctgaccagcgcgacttctctgtctctcggaaggcgggggatggccgcttcccagtgatcggtattcgtagcggcggcggcgcagctacgggctccagttctcggctcagcgtctcctcctctgccgtgctcaggaagccaggccgcaccacgggcgcagttcctgcaggcggctcagcacggaagggcccgagcctcgcacccatgctgggccctggcagcgtccgcagcgccagcagccccagtcccggccataatcccggagcggggtcatgagagagggcagggttgggggaacgcccccgccaaaagccattggcggtacctgcggcagcgattgacttccctcagagtcccgcctctcgctccaacatcangactcgtgc

SEQ ID NO: 117617 - DNA, 408 bp, Homo sapiens
  misc_feature (1)...(408): n = a,t,c or g
tctaattgctgtggtacaaaaggacaagggttaaaagagaacagtgggagctctctttcccagctaactcacgcagtgtgacgcagaggctttcagcacagcccagggtgcccgggactgaaaactccttcaccagccccctccacaggatatagaagacttagatcactacgagatgaaagcagagcccattagtgggaaaaagttggaggatgaaggaattgaaaaagaaaatttggcaatattagagaaattaggaagactgaaagacaagagcatttaactgcaaactgttgtcgttgtcagctgggttgtcttcctgaagtatgaatccgggctgaagcagtgcctactcgacagaaccggtcatcgtacaaagaaatgccacgtgactcanaggcaaagccn

SEQ ID NO: 117618 - DNA, 452 bp, Homo sapiens
ccaaattttctttttcaattccttcatcctccaactttttcccactaatgggctctgctttcatctcgtagtgatctaagtcttctatatcttttggggacggtgcctgtgctttgcacaggacgaggtggcagctggcttgcctgctggcctgcttcctggagataggatgctcagacccaccgctgctcttcaggggtcgtggaaggaattaatgcacttccttctgtcccccaatctctgtccctttacgtgtctctggagctgagcaggtattctttttctttcttcatctcagtagagcaatgcccgccgcccgacccatggagccctgcttggggactgggggcctcgatgttctccttcaccatatgcgaacagatctccctccagcagccttgccaggcagtgccggacgcgtgggtcgactcgggacctccgcgtgcgaacac

SEQ ID NO: 117619 - DNA, 2586 bp, Homo sapiens
atggacccacagctggagcggcaaatggaaaccacgcagaacctggtggactcctacgcggccattgtcaacaagaccgtgtgggacctcatggttggtgtcacgcccaagaccatcatgcacgtcatgatcaacaacaggcatgcaccgcctcatgggagcagggggctcctgtggcattggggatgcaggtggccatgttggccagggggagatgctggccagccctatgggaccagtatactaatagagaagaaaagagagaagaatcaaatagacacaataaaaaatgataaaggggatatcaccaccaatcccacagaaatacaaactaccatcagagaatattataaacacctctacgcaaataaagtagaaaatctaaaagaaatcgataaattcctggacacatacaccctcccaagactaaaccaagaagaagttgaatccctcaacagatcaataacaggctctaaaattgaggcaatagttaacagcctaccaaccaaaaaaagtccaggaccagaaggattcacagtcgaattctaccagaggtacaaggaggagctggtactattccttctgaaactattccaatcaatagaaaaagagggaatcctcccgaaatcattttataaggccagcatcatcctgataccaaagcctggcagagacacaacaaaaaaagagaattttagaccaatatccttgatgaacattgatgcaaaaatcctcaataaaatactggcaaaccaaatccagcagcacatcaaaaagcttatccaccatgatcgagtgggcttcatccctgggatgcaaggctggttcaacacacgcaaatcaataaatgtaatccagcatagaaacagaaccaaagacaaaaaccacatgattatctcaatagatgcagaaaaggcctttgacaaaattcaacagcccttcatgctaaaaaccctccataaattaggtattgatgggacgtatctcaaaataataagagctatttatgacaaacccacagccaacattatgctgaatgagcaaaaactggaagcattccctttgaaaactggcacaagacagggatgccctctctcaccactcctattcaacatagtgttggaagttctggccagggcaatcaggcaggagaagaaaataaaggggtcccttcagagggtcctgagcttcctgaccacccagagggggctccggcgatcactccaaccatccatcccatttagcttcatcatccttgttcgagcgatgttccttctgtcaggcctggtggctgttacgttgggctccccaagtgctgggaatcagtcaaccgtgctgtcctcttggagtcttgtggcccaacaagagaaagctgtcccgacattgcccctccaaagtgcaagacctccgcatgggagtgctgtgcaggcagctgtgtggcctgacactctctaccagtcctgctgtcccttggctgagaatcaaacccatttctggatgacggggaagtgtgtcctctgctggctgtgttctctgtggagctcaggggaggggaaaggccaagccatttctagggtgctgtttggaggggtgaaaaggccataccctttccaagggacacttttcctggaaagcccctggaacttagctggctcttgtcctgtgaagccggctctggccaccagggggcagggccacgaactcagcctgaagggagcctgccgggcagccggcactctggagggacagagagaacaggccaccagggctgaagcagtgcctactcgacagaaccggtcatcgtacaaagaaatgccacgtgactcaaaggcaaagccagagtgcagcttggagcaaagaaggaatctggaaagtgaattggaatggataggactattaggagatattacattccagacgaagaattgtgacggctgtgaccaaaacagtgcaagatcggatggtttttacaactggaggtttttctgcataagctctttgtctgctgccatccacgtaaaatgtgacttgctcctccttgccttccgccatgattgtgaggccttcccagccacgtggaactgctcccgccgctattcagctgtcgggctaatcagcagtcgaggtgtgcggctaggcgcgagctctgcgggagctcagcccccgggagagacccggcagcggcgcggcgaggacggcggcggaccggggcagccccgcgccctggccaggcgccgggttgaaggcacgccgcggacctgcccctcccggagacctgccccggaaggggcagggccccttctccaggccaggcactgcctggcaaggctgctggagggagatctggccgcagatggtgaaggagaacatcgaggcccccagtccccaagcagggctccatgggtcgggcggcgggcattgagatcacatgccctgcgtttcagcctggtccttagagaaacggagagagctctgggcctgggtggcggccctggctgtaccactcacaggctgtgtgtcctcaacccagtctcagttcctcacccttgccaggtggccgtgaggactaggaacatggagacacag

SEQ ID NO: 117620 - DNA, 1016 bp, Homo sapiens
  misc_feature (1)...(1016): n = a,t,c or g
tttcgtctggccgcagatggtgaaggagaacatcgaggcccccagtccccaagcagggctccatgggtcgggcggcgggcatcggtggagggagctgttcatcctctgggggctgctgggcaagaaacatttcttacctgataatgtgaagcgtcagaggtccctgttttatggctctactgagatgaagaaagaaaaagaatacctgctcagctccagagacacgtaaagggacagagattgggggacagaaggaagtgcattaatttctttcacgacaccctgaagagcagcgccgggtctgagcattctatctgcaggaagcaggccagcaggcaagccagctgccacctcgtcctgtgcaaagcacagccggccgtccccgagagagttccaaagatgactgtaaacccagccacggttctgatctccaggaaagcaattgctgtggtacaaaaggacgagggttaaaagagaacagtgggagctctcttttccatctaactcacgcagtgtgacgcagaggctttcagcacagcccagggtgcccgggactgaaaactccttcaccagccccctccacaggatatagaagacttagatcactacgagatgaaagcacagcccattagtgggaaaaagctggaggatgaaggaattgaaaaagaaaacttggcaatattagagaaaattaggaagactgaaagacaagagcatttaactgcaaactgttgtcgttgtcaactgggttgtcttcctgaagtattgaatccggtatgtattgtgtggaggagcattacgtactggaacttctcacaaaacagggctgaagcagtgcctactcgacagaaccggtcatcgtaccaagaaatgccacgtgactcaaaggcaaagccagagtgcagcttggagcaaagaagatgatgtctcaatctgtcaccccagattgagtgcnatggccgnttttcagccactgnaactctggctnccagggtgactggacgtttnattaaccc

SEQ ID NO: 117621 - DNA, 1436 bp, Homo sapiens
atggttctccgctgcgacgagcaggaggaaggaaagctgaacagaacatcttggtgcctaagccgctcttccttgggtaacatgaaaaagcctttacaagtcgatcctgaatgtcaaaatatgccatttaatgactggaatcaacaccctcatttttgtgcctcaacacccattcagggaagccctcactgtggaaagccagttctctgggagcattgcaccagatggaacacagggacgacaggctcctacaggaagaccacaggagggtttggagtaagacacaaagatcctggaggagcacattttccagcgggtggagctgggcaggcaagaacaccgggtgtcacaggacaggcccgggcacctccccaacgcgggcgcaggggaagcggtgactgcgaagggaggcctggggagcagcagggcccggcacgaggaggagggagatgtgcgcttcctgattatcaggactgagggcaatctgggtacgatccctgttccaggcacgacaggttccaaaaaaatgccgcatcaactgggcccgaacctggtcccagatatccctcctaaatgtacaatcaaggatttgcaccaaaagagaagagcagtacagaagcagtattccacacagtggtgttgaaagacacgaaagccctgacattgaagacttttccttcaaggaaccccaaaaaatgtgcatgattttgagtgtcaatggagagatgacacaggaaattcaagggagtgcttatggcccagaaagaaggaaatccaacaaccacttaatgaagaagaatgatcagaagttcaagacctgccacagatggccggtcatcccatccatcatcaggctcaggggcccccggagccaagaacccacaggagcagcagaggagacccatggggcagcgactctcccagcagagcaggaggaatccagggtgaaatgcaagaactgcggggctttgggcactcagccaggaacaagacctgccccattaagaggtggagtgggcccttcctctgcaggtcctgggctcacacaaggagaaggagaacctaaaccagcaaaggcccagctaccctttacgactccagggccctttacgagaatgacagagaaaaggagcgaagtccaaggttgtgattggctcccccatgtgaatgtggcctgggtacggtattggaatcgcctggtgaattggtacgctcgcacctgtgttcgggatgttggaaggtcttgggatgatccacggctttcgtccccgtactatgcctctggttatctgtatccctgtatgtctgttatgtcgggatgcagtgatggtgtggtggtgggaatgtggtggaggcaggatgaacatttgtctacatcagggataactatgctgatggacacatggatgtaccagattgcagagctgcagggctag

SEQ ID NO: 117622 - DNA, 421 bp, Homo sapiens
gggctgtgagtgcaccaaggccgtgaactttgccatgcatgaacttcagctcatccgggtggagaagcagtaccttcaccacaacctcgaccacctggtcgaggagctcttccttggtgacattcacactgatgccacccagaggatgttctaccggccctccagttaccagccccctctgcagaatgccaagaaccacgaccatgcctgcatcgcctgtcggatcatctatcggtcagacgagcaccaccctcccatcctgcccccaaaggcagacctgaccatcggcctgcacggggagtgggtgagccagcgctgtgaggtgcgcccccaagtcctcttcctcacccgccacttcatcttccatgacaacaacaacacctgggagggccactactaccactactcagacccggtgtgg

SEQ ID NO: 117623 - DNA, 690 bp, Homo sapiens
gtgttaacgagaagtaacctgcctaaggaggagcacttgagaagaaatgacatcaaagatgtacaaagttatcatcagaaaaacaatgaaggccaggacccccacaatcaaatagatgcagtaaaaaatgataaaggggatgtcaccaccgatcccacagaaatacaaactaccatcagagaatactacaaacacctctacgcagataaactagaaaatctagaagaaatggataaattcctcgacacatacactctcccaagactaaaccaggaagaagttgaatctctgaataggccaataacaggatctgaaattgtggcaataatcaatagcttaccaaccaaaaagagtccaggaccagatggattcacagccgaattctaccagaggtacaaggaggagctgaaccacgaccatgcctgcatcgcctgtcggatcatctatcggtcagacgagcaccacccttccatccttggccccaaggcagacctgaccatcggcctgcaccgggagtggaaaccacaagagcctgacagtcaagtcattctcacagggatgtgctgggctgccagcctccctgacgggccctttgtggtggcgctgctgagttaccctagcatgccaccacgggatcagactactgctgcagactgttatgacgatgtcacccggaggtggcagacctga

SEQ ID NO: 117624 - DNA, 798 bp, Homo sapiens
atggagaacgctggggagagagaggatcccacagtaggaaatgaaggagaggtgaggctagcaggcccagtcctccgaactcaggacgagctctcctgggaagaggatgaagcaaacccaacttcttatccaaaaggagcagattcttattgtcactcggattgccagaccataatggatttttccaacttcaatgcattttctaccccaaacacatttgctctcatgaacacatacagctgtccacagcaccctaactctaagcagtttcaattgccaacatttgtcaaaatgggagaggctgtgtctgttttcttcatagggctcccacatgcaacacccattgtggagcaccaaaatgatctcattgcaggcagtgtgagaatgcagaaccagccaaaaggaagcactctccagtgcattattctcatgccgcaaagacctcctgggcagacattagaagatatggactattattattcctgtttctcagatgagaaaaacctaggtacaaagaagctgagttccttcccatggtcacacagcaaagaagtgaaggccacattcaaaggcaggtatcctggctcccatgcccttaaccgccacaccacactacctggcactgcctggattctccttctaggtggggaacttgcattcctcacagtgaaggatggaagccctttggccttgccctcccgcccagctgatgggatgagaggcaggaacaaagcccgtgtattgtcttcattgaatctgacggcatcctgggggaaagagcaagatagatacagctga

SEQ ID NO: 117625 - DNA, 2289 bp, Homo sapiens
  misc_feature (1)...(2289): n = a,t,c or g
atggagaacgctggggagagagaggatcccacagtaggaaatgaaggagaggtgaggctagcaggcccagtcctccgaactcaggacgagctctcctgggaagaggatgaagcaaacccaacttcttatccaaaaggagcagattcttattgtcactcggattgccagaccataatggatttttccaacttcaatgcattttctaccccaaacacatttgctctcatgaacacatacagctgtccacagcaccctaactctaagcagtttcaattgccaacatttgtcaaaatgggagaggctgtgtctgttttcttcataggtgaatcagtcgttgtggttggcatcatggagcatgctacagcggaaaagaaggtctttaaggaagattacatctaccatgcaggaatgggtgggaatgaagtgggaatgggcataggggaagaagctcagtgctctgatttcgggcctgtgaccctttgtgggagaaggaaagccaattgtctaaaggctgttggactgatgggtgagcaggtggaggagcggaagagggggatgagatgtgtccttgtcaaagggtctcaggaaaagactgttatgcacagaactaaggtagaaagattcatactatgcgaaccgatcaagaaacccacgtacagtcctatacacgaaggatacaacagaggcctgctttcctgggagagacaagaacagatgaatacagaaaagagcgtgcagtgtcagtgcaaggcgaggactgagaaccgggcgatgcggctgcacagctggaaccacgaccatgcctgcatcgcctgtcggatcatctatcggtcagacgagcaccaccctcccatcctgcccccaaaggcagacctgaccatcggcctgcacggggagtgggtgagccagcgctgtgaggtgcgccccgaagtcctcttcctcacccgccacttcatcttccatgacaacaacaacacctgggagggccactactaccactactcagacccggtgtgcaagcaccccaccttctccatctacgcccggggccgctacagccgcgggcggtcctctcgtccagggtcatgggaggcaccgagttcgtgttcaaagtgaatcacatgaaggtcacccccatgggatgcggccacagcctcactgctcaacgtcttcaacgggaatgagtgcggggccgagggttcctgggcaggtgggcatccagcaggatgttgacccacaccaatgggntgcgtggccctgggggattcaaactaccttcacacggagtacttgatcttcaaaatggaacagggatgcccgggggcgctgtctgctgttcaacggtcagaggcccagcgacgggtccagcccagacaggccagagaagagagccacgtcctaccagatgcccttggtccagtgtgcctcctcttcgccgagggaagaaggaccttgcaagaagacaagtggaaagcaagcctgtatggccgggcccctgggaaggcacaccttggtccctgctgcttggctgcaatttgcctgccttgtccctctgctgcattggaacatccgcagatagaagttttagaaagttctattttttccaaaccagaattcccttactattgacagatgtgctttaaccaaaagaaaaagacatttattctttttgatgcacttgaatgccagagaactgtcctttcttgtttctcctctccgggcgcccccagccccctgagtcatgaaccagcaaggagtgtttgaagtttctgctttgaactccgtccaagcctgatccctgggcctgagcaacttcacaaccagtaattgcactttaagacagccctagagttcctggacgaaccgtgtttggtagccagggatgaaagcctagggcctcttatttttttcttctaaattattattatatttctgagttaaacttagaaggaaacaactattcaaggctaacaacttttccctgcccattttcccctgtgggttggcaggcctgtcttcctttggaaaattgttttactctcgtgagttttatatgcctggaatcccaatgcagagttggtttgggactgtgatcaagacacctatttattaataaagaagaaacacaggtgtagatatgtatatacaaaaagatgtacggtctggccaaaccaccttcccagcctttatgcaaaaaaaggggagaatcaaagctttcatttcagaaatgttgcgtggaaaagtatctgtaattaaagtttcgaagtaatttaacctaaaaaaaaaaaa

SEQ ID NO: 117626 - DNA, 936 bp, Homo sapiens
atgcctgagcctccccccgcccccatgggctcctgcgcggcccaagcctccccgacgagcgccgccccctgctccacggcgcccagttccatcaaccacccaagggctgaggagtgcaggcacacggcgcgggactggcaggcagctccacctgcggccctgagtagcccagagcctcatttcaacctgatagcctcagtgcagactgtgatgtgccccgttggagccccagctggcatgcagggcagtgggctcaaagccctctggctgccgcctggtgctgtggacgcctggttaataaaaggggagcatttggggtacagcagcgagtatgacgaggaggaggtggactatgaggagtcggacagcgatgagtcctggaccacagagagtgccatcagctccgaagccatcctcagctccatgtgcatgaatggaggggaagagaagccttttgcctgcccagttcctggatgtaaaaagagatacaaggtgacatgggtggcagttggtggtcctgatcccacgagggaagccagtctctgccagccaagtctcctgggcactgaccaggatctacagtcctcaccatttcattggcatttacggatcagacagaagatgaggtaccgaactcccagacctcatgcagagcagggaatgggagaaggatcccactgcttgatgtcagagcatcactttgagaaaactcaaagacagttttctccagactattatcccaatccttcctcccaactgaatgtgaatggcataaagtatcacgctaagaatggtcacagaacacagattcgtgtccgcaaaccattcaagtgtcgctgtgggaagagttacaagacagctcagggcctgcggcaccacacaatcaatttccatcccccggtgtcggctgagattatcaggaagatgcagcaataa

SEQ ID NO: 117627 - DNA, 477 bp, Homo sapiens
atgcctgagtctcccaacccctccgtggactcctgtgcggcccgagcctccccgacgagcgccaccccctgctctacggcgcccagtcccatcgaccacccaagggctgaagagtgcgggcgcacggcgcgggactggcaggcagctccacctgcagccccggactgtgttgcacaatgcttccacagtacacctggctgcaagggctaccaaatgaccatcagcccactctgtggtcagctcatcccctatgggagtcttattccttcatggattggactttcccaggatgaccaggtcgcaagggttgagatgacaaaatccccttatggatgggacttcttgtacagtcagggcttctgcatctatggattccaccaactgcagattgaaaattttcagaaaataaattctgcaaagttccaaaaccaaagtttgaatttgctgcgcattgagtactacattgaatctacgtga

SEQ ID NO: 117628 - DNA, 1726 bp, Homo sapiens
  misc_feature (1)...(1726): n = a,t,c or g
tgagcctcccacctcctccgtgggctcctgtgcggccccagcctcctctatgagtgccaccccctgctccacggtgcccagtcccatcgaccacccaagggctgaggagtgcgggcgcacggcacgggactggcaggcagctccacctgcagcccaggtgttcacactattaaaaaacatcaaaatgttgccttgcctggaaaaaccaggcaagtttggttctttagtcatcatgagggagttcaacaaccatatgtggcaagttgagctgaagatgcctgtgccgtcagacctgccaaagggtactgggaaaaccttgattctacctgagtgcattcaggcaccgtgtatgaaatctaacaatgcgctcatcgtcatcctcggcaccgtcaccctggatgctgtaggcataggcttggttatgccggtactgccgggcctcttgcgggatatcgtccattccgacagcatcgccagtcactatggcgtgctgctagcgctatatgcgttgggggattttgccgatttcggaaccaccatcaaacaggattttcgcctgctggggcaaaccagcgtggaccgcttgctgcaactctctcagggccaggcggtgaagggcaatcagctgttgcccgtctcactggtgaaaagaaaaaccaccctggcgcccaatacgcaaaccgcctctccccgcgcgttggccgattcattaatgcagctggcacgacaggtttcccgactggaaagcgggcaggacataagaaggagcccatccctcagtcatttattaccagagcggctcgccgcagccggtaaccgagcaaagcgagcgaactggggagaaagcaaagaagacctgttctgtcagatagctcttacgctcagcgcaagaagaaatatccgccgtgggaaaaactccagggttctgtcaggggggaaacaccggttatcaatcacaaagaacgtaaaaaatagcccgcgaatcgtccagtcaaacgacttccctgaggcggcatatagtctctcccgggatcaaaaacgtatgctgtatctgttcgttgcccagatcagaaaatctgatggcaccctacaggaacatgacggtatctgcgagatccatgttgctaaatatgctgaaatattcggattgacctctgcggaagccagtaaggatatacggcaggcattgaagagtttcgcggggaaggaagtggttttttatcgccctgaagaggatgccggcgatgaaaaaggctatgaatcttttccttggtttatcaaacgtgcgcacagtccatccagagggctttacagtgtacatatcaacccatatctcattcccttctttatcgggttacagaaccggtttacgcagtttcggcttagtgaaacaaaagaaatcaccaatccgtatgccatgcgtttatacgaatccctgtgtcagtatcgtaagccggatggctcaggcatcgtctctctgaaaatcgactggatcatagagcgttaccagctgcctcaaagttaccagcgtatgcctgacttccgccgccgcttcctgcaggtctgtgttaatgagatcaacagcagaactccaatgcgcctctcatacattgagaaaaagaaaggccgccagacgactcatatcgtattttccttccgcgatatcacttccatggggttctttctagagtccccaacgcaggggcttgcaagccctgagtngtag

SEQ ID NO: 117629 - DNA, 1029 bp, Homo sapiens
agtaagcacctgggaaacaccccagtaccgaagacctccctcgcccagctagaggggaagcagggagcaaccctgctctttttcatctcccagggatacacccggggaaaaccactggctgtcactgccgcagagggactaggctggcccgccagtgagacgagcgctgggggcttcatgaccccacgccacgcggcgtcccaaccgtggaggtgcctcctgacccgacctgcagccaaaccacacgcgaccctttcgcccgtttccttcgaagaacccgtgtttccgctttccagaacctctaagagcacccaccttggtcccggggccctgtaagcctcactcaccggccgcctccggccgagtacccccgacacaccccgggcggggcttggggaagtcggaaggattaaagagaaacccatgcgtcgaaccgctgctccaacgcccatcaggttccctaagatcacaggcactcttccactcagactgctgctgatcatgctctgctcggtatgcgggaccagtcattgtctgggcagtcgcctggacctaagtctcctgacgcggacgaccagttgcaaaacagagaccacactgagactgagcaacgtatcagcagcggtcgcagctctgcgcttgcgcctgagagccagctacagcagggctgtgctgggattcactttcgtggaaggttttgcaaagcccctcccctggtatgcgagaggctgagaggttggcgctagaggcaagaggaagggggtctgcgagagtgcggcccaagcctccccgatgagcgccgccccctgctccacggtgcccagtcccatcaaccacccaagggctgaagagtgtgggcgcacggcgcgggactggcaggcagctccacttgcagccctggtgcgggatccactggatgaagccagctgggcccctgagtctggtggggacgtggagaacctttatgtctagctcagggattgtaaatacaccaatgggcactctgtatctaactcaaggtttgtaaac

SEQ ID NO: 117630 - DNA, 444 bp, Homo sapiens
  misc_feature (1)...(444): n = a,t,c or g
atggcagcaaaaagaaattccattaacatagcagaatcttggaaagatctagaagttggaggaccagctaccaaggaaganctcaggagcccagctggcttcacccagtggatccgcaccggggctgcaggtggagctgcctgccagttccgtgccgtgcgcccagcactcctcagcccttgggtggtcgatgggactgggcgccgtggagcagggggcggcgcttatcggggaggctcgggccgcacaggagcccacggaacagggggaggctcaggcatggcgggctgcaggtcccgagccgtgcctcgcaggaaggcagctaagacccgaccttgtgaggtacagaagaggcaacataatgtgaactatctctttccagttgtggaaaccaaagcccagacagttaagtggtttgtccttgctgttaagacaataagctga

SEQ ID NO: 117631 - DNA, 2679 bp, Homo sapiens
atgaaagagctgcagccaggctgccacggcagaggctatgacctcacagcagctcaggcccttgaatggtctccatcaaatgtagacggggtcagctacctccttcaggagatctatggaattgaaaacaagtacaacacacaagattctaaggtggctgaagacgaagtgagtgataacagtgccgagtgtgtggtgtgtctctcggatgtccgggacaccttgattctgccctgtcgccacctctgcctctgtaacacctgtgcagacacgctgcgctaccaggccaacaactgccccatctgccgactgcgtaagccccagagcggcagggggactgccttccgggcactgcttcagatccgagccatgaggaaaaaattgggccccttgtccccaaccagctttaaccccatcatctcatcccagacatctgactctgaagagcatccatcctcagagaatattccaccaggctatgaagtagtatctcttctggaggccctcaacgggcccctcaccccgtccccagcagttcctccacttcacgtgcttggagatggccacctctcaggaatgctcccttcatatggcagtgatggccacctgccccccgtcaggacgatctcgcctcttgaccgcctgtctgacagcagcagtcagggactcaaactcaaaaagagtctctccaaatccacttcccaaaactcttccgtgctgcatgaagaggaagatgagcattcctgcagcgagtcggagacacagctctctcagagaccgtcggttcagcatctcggagaggaatgtggtgtgactccagaaagtgagaatctcaccctgtcgtcatctggagctattgaccagtcgtcttgcacagggacgcctctgtcatccactatttcctccccagaaggccctgccagcagcagcttggcccagtctgtcatgtccatggcatcctcccagatcagcactgacaccgtctcctccatgtctggctcctacatcgcccctggcactgaagaggagggagaggctctctcttccccccagcctgccagcagggccccctcagaagaaggagaggggctgccagcggagtctccagacagcaactttgctggcctcccagctggagagcaggatgcagaggctgcactcagctcacactaccagcctatatcccacgcctccaagggagactgcaagtcaggcatggagcagcaaggggtgtgtgagcgagagtggggtccggccactgtgcagtcagacacgccagctgccgctgtggggctggcagccccagggcggcaagctgtggaggggctgtctgtctgctccctgcgacccccctgcagcagccgttgtgatggcagcggctgctctggacagcccaccactgtcatcaatatttccttacgccgccccacctccccaagaacccgtgaagactctgagaagcctggtcaatatccgaaaggacacactgaggctcgtcaaatgccaggacaaaaggacaaggtggccaagagaagtagaaaggtgttgagaggagaaggagaatgggaaagggccaataagaagacaatgaaaacaagcagcgccaaggcagctgggccaggctggactcacacactccctgaaggctcgggtccaggaggcactggtggccagctggagttctgggtgggcgtgggcttggcgggctccgcaccaatggcagggctcattgccctgccggcccggggcaatgaggggcttagcacccgggccagcggctgcggagggtgtactgggtcccccagcagtgccagcccaccggctctgcgctcaatttctcgccgggccttagctgccttcccgcggggcagggctcgcgacctgcagcccgccatgcctgagcctcccaccccctccgtgggctcctgtgcagccccagcctccccgatgagcgccgccccctgctccacagcccccagtcccatcgaccacccaagggctgaggagtgcgggcacacggcgcgggactggcaggcagctccacctgcagccccagtgcgggatccactgggtgaagctagctgggctcctgagtctggtggggacgtggagaacctttatgtccagctcagggattgtaaatacaccaatcagcaccctgtgtctagctcagggtttgtgaatgcaccaatggacactctgtatctagctactctggtggggccttggagaacctttatgtctagttcagggattgtaaatacaccaattggcactctgtatctagctcaaggattgcagccactggactccagcaactcgaggaagaggcagccattgataccagacctagaattcactaaaggtcaatgccttcaggaattttcatctgatttgatgattgatgccctccccatcatgagccccaggaagtctcccatgccacgagcagagggtttaataggcaagagggaagggagaaaacagaaggaagaagctccccagtacagagacagagggtggggggctccaaagccacgaaaggaggtggcaagtgtggtggacaccagccagtggagctatatttacccgttttatcagatatcttttgatattgcaaggcagttgtttcaggtagaccagcttgcagacaggagagctgagagcaaaatgcagtga

SEQ ID NO: 117632 - DNA, 2211 bp, Homo sapiens
atgaagccgcggaccctcgcggtgagtgttacagctcttaaggtggcgcgtctggagtttgttctttctgatgttcagatgtgttcggagtttcttccttctgactcagaagcccagctggcttcacccagtggatcccgcaccggggctgcaggtggagctgcctgccagtcccgcgccgtgcgctcgcactcctcagcccttgggtggtcgatgggactgggcgccctggagcagggggcggcgctcatcggggaggctcgggctgcacaggaacctacggaggccgggggctcaggcatggcgggctgcaggtcctgggccctgccccgcgggaaggcagctaaggcccggcgagaaatcgagcgcagcgccggtgggctggcactgctgggggaccgagtacaccttcccgagcagccgctggcccgggtgctaagcccctcattgcccggggctggcagggccggccggctgctccgagtgcggggcctgccaagcctacgcccacctggaactctagctggcccgcaagtgccgcgcgcagccccggttcgtactcgcgcctctccctccatacctccctgcaagctgagggagccggctctggccttggccagcctagaaaggggctcctacacctataagatgtcccagctgagcctgtcctggctgggcctctggccagtggcagcatccccttggctgctcctcctgctggtcggggcctcctggctcctggcccatgtcctggcctggacctacgccttctatgacaactgccgccgccttcggtgtttcccacaacccccaagacggaactggttttggggacaccagggcatggtcaaccccacagaggagggcatgagagttctgactcagctggtggccacctacccccagggctttaaggtctggatgggacccatctcccccctcctcagtttgtgccaccccgacatcatccggtctgtcatcaacgcctcagctgccattgcaccaaaggacaagttcttctacagcttcctggagccctggctgggggatgggctcctgctgagtgctggtgacaagtggagccgccaccgtcggatgctgacgcctgccttccatttcaacatcctgaagccctatatgaagattttcaatgagagtgtgaacatcatgcacgccaagtggcagctcctggcctcagagggtagtgcctgtttggatatgtttgagcacatcagcctcatgaccttggacagtctacagaaatgtgtcttcagctttgacagccattgtcaggagaaacccagtgaatatattgccgccatcttggagctcagtgcccttgtatcaaaaagacaccatgagatcctcctgcatattgacttcctgtattatctcacccctgatgggcagcgtttccgcagggcctgccgcctggtgcacgacttcacagatgccgtcatccaggagcggcgccgcactctccctagccagggtgttgatgacttcctccaagccaaggccaaatccaagactttggacttcattgatgtactcctgctgagcaaggatgaagacgggaagaagttatctgatgaggacataagagcagaagctgacacctttatgtttgagggccatgacaccacggccagtggtctctcctgggtcctgtaccaccttgcaaagcacccagaataccaggagcgctgccggcaggaggtgcaagaacttctgaaggaccgtgagcctaaagagattgaatgggacgacctggcccatttgcccttcctgaccatgtgcatgaaggagagcctgcggctgcatcccccagtcccggtcatctcccgccatgtcacccaggacattgtgctcccagacggccgggtcatccccaaaggcattatctgcctcatcagtgttttcggaacccatcacaacccagctgtgtggccggaccctgaggtctacgacccctttcgctttgacccagagaacatcaaggagaggtcacctctggcttttattcccttctcggcagggcccaggaactgcatcgggcagacgttcgcgatggcggagatgaaggtggtcctggcgctcacgctgctgcgcttccgcgtcctgcctgaccacaccgagccccgcaggaagccggagctggtcctgcgcgcagagggcggactttggctgcgggtggagcccctgagctga

SEQ ID NO: 117633 - DNA, 1234 bp, Homo sapiens
atggtctttagcaacctgaagggccactggctccaaccaatcagattagactctggctcacgtaacacagccattggctgtgacaaccagtataagccaactggagtgaagctgcagaccttcgcggtgagtgttacagctcttaaggccgcgcgtctggggttgttcgttcctcccggtgggctcgtggtctccctgggctcaggagtgaagctgcagatcttcgcgagccaagtggtctgttttgacagggcgctgattggagcgtttacaatccctgagctagacacaaaggttctccacgtccccatcagattagttagatacagagtatggacacaaaggttctccaaggccccaccagactcaggagcccagctggcttcacccagtgaatcccacaccagggctgcaggtggagctgcctgccagtcccagtgccgtgcgcccgcactcctcagcccttgggtggtcgatgggactgggcgccgtggagcagggggcggcgctcatcggggaggctcgggctgcacaggaacccacggagtgggtgggagactcaggcatagcgggctgcaggtcccgagctctgccccacaggaaggcagctaaggcccggcgagaaatagagcgcagcgccgggacatggatggagctggaggtcattatccttagcaaactaatgcaggaacggaaaaccaaataccacatgttctcactttcttgtagaccaactatttccatcatcagagaacgttctaaaggacagccctattctagagatgatgttgtagtagtgaactctaagaacgcaggttctgcccacagcgttccccctcttcccctctgtgatttgagctgtcaatttgatggaattaagggatacatagatagctgtcaggcaccgtgtatgaaatctaacaatgcgctcatcgtcatcctcggcaccgtcaccctggatgctgtaggcataggcttggttatgccggtactgccgggcctcttgcgggatatcgtccattccgacagcatcgccagtcactatggcgtgctgctagcgctatatgcgttgatgcaatttctatgcgcacccgttctcggagcactgtccgaccgctttggccgccgcccagtcctgctcgcttcgctacttggagccactatcgactacgcgatcatggcgaccacacccgtcctgtggatctacccactagtcaattcaccatcttgttga

SEQ ID NO: 117634 - DNA, 1410 bp, Homo sapiens
cagtcgggaatttgtccctttcttcggctgtcattctgtcatttacttgactaagataccaggtatctccaaactcttgggctgcagctaaagccgcattcttttcattaaacgccagggtttgattgcttggtgattggcgaaggtcccatctgggtcgccaaaatgtgtctggaattggtgggttcttggtctcactgacttcaagaatgaagccgcggaccctcgcggtgagtgttacagttcttaaaggcggcgtgtctggagtttgttcctcctgatgttcggatgtgttcagagtttcttccttgtggagtgaagctgcagaccttcgcggtgagtgttacagctcttaaggcggcgcgtctggagttgttcgtttctcccggtgggctcgtggtctcgctggcttcaggagtgaagctgcagactttcccagtgagtgttacagctcataaaagcagtgtggacccaaggagtgagcagcagcaagatttattgcaaagagcgaaagaacaaaccttccacactgtggaaggggaccggagcgggtccccgccagactcaggagcccagctggcttcacccagtggatcccgcaccagggctgcaggtggagctgcctgccagtcccgcgccctgcgcccgcactcttcagcccttgggtggtctatgggactgggcgccgtggagcagggggcggtgctcatcagggaggctcgggccgcacatgagcccatggagcgggtgggaggctcaggcatggcgggctgcaggtcccgagccctgccccgcgagaaggcagctaaggcccggcgagaaaccgagggcagcgccgctgtatcaggctggctttctggaatagctcagtggccaaagattgatcacgaagggtttagagctgtgaaaatgccccaggctgcttggctcctgaaagctgttacctttatagatcttactacactttcaggtgatgatacatcttccaacattcaaaggctctgttataaagccaaatacccaatccgggaagatctcttaaaagctttaaatatgcatgataaagtggccgctggatttccagctggacagactcatttgaagacacgattagaagagatcagattggctgtggaagatggagctacagaaatcgacgtggtaattaacagaagcttggtgctgacaggccagtgggaagggcatactccccagttgtttattcagcattaccatgcaacatatgacacagcagactgttccttccttctggtaatgctttgttgttgtggctttggtgcctacattcctgaggtcttcctttctgtttctgattacccctgcgtctcatttgcaagctccttcacctcctctgtcatccctgaagtgtccatgtttctcagaatctga

SEQ ID NO: 117635 - DNA, 1524 bp, Homo sapiens
atgcctgagcctcccgtccccgccccgccccccccacccgtgggctcctgtgcagcccgagcctccccgacgagcgccaccccctgctccacggtgcccagtcccatcgaccacccaggggctgaggagcgtgggcgcacggcgcgggattggcaggcagctccacctgcagccccaaaggaagaaactccgaacgcatctgaatatcagaaggaacaaactccagacacgccgcctttaagaactgtaacactcaccgtgacggtccacggcttcattcttgaagtcagtgagaccaagaacccaccaattccagatacaggattacaagtcgttcccaagcctttacctcggcacaccaggggacgtgtggcatcatcttcaattcaccacatccgtttccctgtatccccaagtgccagggcaggtggccacctggccacaccccttgccagggaacctggcagattcagtctagcccagcccaaggaggaggggcacccaatctcgctgtacagcgccggctctgcgctagttagttcgctcgtgttagttcttcagtttgtggatccgtttgtacggagtcacagaacacagcgttatcgctcgtccgagcccagctcggccgggaacctgggaactcggacgcagaaggacgcgcccgagccaggacccgccgcggggtccctctggtgggccgtggccggggagaggacgcgggccctggcggtcgaagacggacgcagcgcccggaaaggcgagccaggtctccggctcctggcgcttcctgtgagctggctcggcggggtgcgtcgccggggagggagggactggccgtggggcgagcagccgggcggggagtggcttctgggggccttcgccagcggagggcccgcgaggccgccctcggagcgccgccaggaacgcatcgatcctcctcgccgtccgcgcaagtcccctcttcgggagcgagaacggagagtccctggtgaccctgacttctggccagcgcaggacgccccaggccccagccagggtatcatgcacaggagtggaggaagaggcctcgccggccagtgcgcacgcggcgccggttcccgaccaaggctccggcccgctctgctggctcgtttgaaacgtcgacattctcagcgcacgatccggggtctcgggggcacccatggggcccgaagcctctgcctgccggcggcgaccggacagctcccccgggcgcgcagggtagaggaagcgccctctaaagcccccgcacgcattcacgagccggccctgcgcgggcacagcggcagccgcggcgggacacccggcagggtcttcggcgctactttgtgccaaaaactgcgctcccggagacccgggcaccgccggcgtcggcagatagagcgggacacagctcccaccgcgtgctccactggagcccctttcggcccctcggagagtgcggcccgtggggagtgggcgtcggcgcgagaaagttccccggcccgggcgaccccgggcttttga

SEQ ID NO: 117636 - DNA, 3342 bp, Homo sapiens
atgagtgttcgcaaggatgtagagaagctggaaccctcagacattgtttgtgggaatgtacaatgctacagctgcatggaaaccaatctgacagtttctcaaaaagttaaacatgaagttaccgtaggacccagggagggagccactaaaccaaacaggatgaaagggaaagaggggaggtcaggaagccttcttggagaaggggatttcttcaaggatgagtcagtgatgtctagccaaggaagcagcaaggatggagagaagagaaggggcaaagcacagaggtggaaatggcccatgcagggcatctgccggcagctgggagttgctaagagcatggaaggttatcaaagcaggagggatcagggaggcaggggtgtcagtgacaaatggccacaggtgtgtgcgaagaagcctgaattttatcctacagctcaggtgtgggcaaacttctctgtaacaagctgtcaatctgtcacaattactcaactctgccacgggctgagaagactggaaatttctccagcaagatcaaatgcaatgcatctcaacccagacccaccagggcaaaagcagaatctgtccccgaaggtcaacgacatcatcactgacattgagtctagctcaggctctggagctggaaagtttcaggttattagcaaatcggatatcagtgaggtccttctccagcaaatggatgcaggacacagcagtaaggatgacccaaatgaatatggaggctggaaaagcccaaggccaaggtgccagcagattcagtgtctggtgagggcctgcttcctggttcatcgatgttccttcttgctgtgtcctcacgtggtagaagggggagtgcttaccatccgcgttgtccttaaacgggaatgggagggaatccctggaatccctggaatccctgagcctggagggattcacaaggggaagggcagggctcaggacctgcagcccgccatgcctgagcctccctgcccctccgtgggctcctgtgctgcccgagcctccccgaggagcgccgccccctgctccacggcgcccagtcccatcgaccacccaagggctgaggagtgcgggcgcacggcgcgggactggcaggcagctccacctgcggccccggtgcgggatccactgggtgaagccagctgggctcctgagtctgggtccgcaccagcaatcctcaaagtccgcataaaaaccattaagatgtcttctggggaaatcaagagaacagtgaccagggtattgccagaagtggatcttgactctgggaagaaatcttctgagcagacggcgtctgtgatggcctctgtgacattccttctgtcatctccagcatcagctgccatcctttcctctctcctcagggcgcctctccagtccacggtcatgaccaatgcagtttcacctgcagagctcacccctaaacagagcgccagcagcgccatcattaaagccgccaacgccatccagcagcaaactgtcgtggtgccggcacccagccgggccaacgccaaactcgtgccaaagactgtgcaccttgccaacattaaccttttgcctcaggctcagcaacaaataaagcaggcaataatcaatgcagcagcctcgcaaccccccaaaaaggtgtctcgagtccaggtggtgtcgtccttgcagagttctgtggtggaagctttcaacaaggtgctgagcagtgtcaatccagtccctgtttacattccaaacctgagtcctcccaccaatgcagggatcacgttaccaacgcgtgggtacaagtgcttggagtgtggggactcctttgcagttgaaaagagtctgacccagcactatgacagacagagcatgcgcatcgaagctgcagatacacgtggacaaaagacttgcactatctgccagatgctgcttcctaaccagtgcagttacgcatcacaccagagaatccatcagcacaaatctctctacacctgccctgagtgcggggccatctgcaggtcggtgcacttccagacccatgtcaccaagaactgtctgcactacatgaggagagttggttttcgatgtgtgcattgcaatgttgtatactctgatgtggctgccctgcagtctcacattcaaggttctcactgtgaagtcttctacaagtgtcctatttgtccaatggcatcaaatcagaacaaagaggacaccaaatccatgaatgggaaagagaaattggaaaagaaatctccatctcctgtgaaaaaatcagtggaaaccaagaaagtggccagtcctgggtggacgtgttgggagtgtgaccgcctgttcattcagagagatgtgtacatatcccacgtgaggaaggagcaagggaagcaaatgaagaaacatccctgccgccacctgtgccagcacaaccggatcaagcacaaaggcatcaggaaagtgtatgcctgctcgcactgcccagactccagacgtacctttaccaaacgattgatgctagagaagcacgtccagctgatgcacagcctcaaggaccctgacctgaaagaaatgacagatgccaccaatgaggaggaaacagaaataaaagaagacaccaagttccccagtcccaagcacctcttcattgtacacaagttaaaggaacctcagccagtgtccaagcaaaatggagctggggaagataaccaacaggagaacaaacccagccatgaggatgaatcccccaatggcaccgtgtcagacagaaagtgcaaagtagacactgatgaagctgcttttgagccagattataatgaaagtgacagtggaagttatgtatctgtaaaagatgaggaaacttcaggaaacacttctaaggtcctgaaagataagataatggagaaagcaggagaaagcaaaagaaagcctggacacagttggccaggagaccagcaccccacacgggcatttgttcagccctccagcagcccctcctgccagccaaccaccctcatccctcccgtggatttcggggttctgagtaaccaaagcaagcatgggaacattctcagagcatgtccaggggacacctccgggaatatgcattcatctcagaggggagctgagtgcttatttgacaagcacaatgtaaccaagccaagaatggggaagggtatgaaacaagagaggcggccctcttccttctcagggaagccggggctggcaggaagtggggctgcaagtccaacagctgacaccatcgtctatgttcctctgagctgtgtgcaaggaagagtacagtctggggctgcaggcatgacagacttcagagggaaacaaatcaggcataaaaactgctag

SEQ ID NO: 117637 - DNA, 886 bp, Homo sapiens
atgcctgagcctccccgccactccgtgggctcctgtgcggcccgagcctccccgatgagcgccgcctcctgctccacggcgcccagtcccatcgaccatccaagggctgaggagtgcaggcacacggcgcgggactggcaggcagctccacctgcagcccccgtgggggatccactgggtgaagccagctgggctcctgggtctgtctgcagcttcacccctgaagccagggagaccacgaacccatccggaggaacgaacaactccagacgcgcggctttaagtgctgtaacactcactgcgaaagtctgcagcttcactcctgagccagcgaaaccacaaacccaccagaaggaagaaactccgaacacatccgaacatcagaaggaacaaactgcgaacacgccgcctttaagaactgtaacactcaccgcgagggtccacggcttcattcttgaagtcagcaagaccaagaacccaccaattccggacacattagggtggtaggccaggcatgggggagatcctacattccaggtacccctagcccttcccctaagcaggctaaccttggggattccctggagatcaaccaacttccagtgagagggagtggacaaaagcctctggaccagccattccttctctctctccaagtcctttttcctctctagcatcaaaaccaagcctaagtattttgaggttacatgaacatctctccccttcttttctgtgggcagagtcccttaggcaaataggaggcactgggggcctgagtgggatagctctccaaggtacactcattgacacagggtattcaggtaggggcttgccccaggccaagggagtaaggcaaactgtcaaaacctgggccatatgggccctg

SEQ ID NO: 117638 - DNA, 826 bp, Homo sapiens
atgatcaagtgggtttcataccagggatgcagggacggtttaacatatgggtggtcctgcagtgtggaaactgtgaggtggttacccgaagtccacgcagcagacacctcatgtctcaaaatatcagcgtgtctcagtagtttctccagcagctacaaagccccatcagtagtagcacaagctgctcctccgagtagtcctcacaagacatcctctctatgtacaacatcagctcctctcgagaccctcaatgcgaacaacatcagctcctccctgagtcttcagctgcacgaccctcaatctagaacatcagctcctccctgagtcttcagctgcaacaatctaaaactagaacatgagctcctctccaggtctgcagctgcatgacactcaaactagaacatcagctcctccccgagtcctcaacagcgcgaccctcaaactacaacatcagctcctccccgagctagaacacctgtcccacctggatctccagctccacgaccctcacagaagaacagccacactggctccttcgttgtcttcagctccacaacctaagacatcagtgggagcaccggctcatcccatggacctccagctcaacgactctcatagacttaaaaggcagcacctgctcctccccaaggctccatctccaccaccctcagatttgaacagcggtagcaccacctcctctccaggtcttcagccccacgtccctccctgaacaatcccttctcatgaaattcagcagtcaagaaatctgcagcggaagtaaatgaataaatgttttgttttcaaatcgaaaaaaaaaaaaaaaaaa

SEQ ID NO: 117639 - DNA, 2239 bp, Homo sapiens
acgtgataccgaaagactaatgctatgtaggagctgacacagcacgggaggactatgaccacctaaggaacagtgagctgtgtcaggacagaaatgagcaagcttgagtctccgggcacatctcaggaaacagtaatgcaaggcgcacgtcagggctgtgactcactcctcagagcaggcttgggtccccagtgtaagaatgaacagacagccctcccacatcatgtagtgtggatggtggggctgcagggcatgtcgtgctcttgccggtgggctgccagagacatgtcagacccacttcttagtgagggcccattcatttcctctctgggttgcatttcatcataatcactcggtacccacgattcttcctgacagcctgaaacaagcaggctttgcatccttttcaggcctggggtctggtcctaccccaggggcttctgttttcacccacaacagattcgcctccatgccagagacaccaccataaagccacttctgctgccagagtccccagtctccaatcaccaagaaattctccaccaaggggcaagctccagccatctaacttgtaatcagtagcatcaacattgtcttcagatttgccgaagagatcggggtcgtgcctacacttgctggctcggcaggctttcaaatgcaggtatctctgagccatttgtgacaccagagcatcactggacaagcctgtgctggcccaggtactctgtgcacctggtaaggctgaacacatccgcaagagcgtgggacctggggaaatcgccagttgtttgctgtcctgccattgccgttctacacatccctggagactatgagcatgggttgtggtgccgtagtggctgggcagtatcagaaatgtccatttttcaccattcccagtgccaacttcccatggcagaaacaggaaggaatgtctggcaacccaccaagggtcagacgccacatcagcctgagcagaagctgcctgacactggctgttccaatgacaattagacgttcttgggaaggtgcgccctttgtgggagctcaggatgggtgtcgtcctcttcttccagggcggcgggcgcttctcctgcaccttggcctggcgcctcttctcggcctcctccgcctcccgtttctcctccttggccaccttgtaaggccacttgggtatccgcaggtggccgctgcctttatgctgcccttccgcgccggcccctcgccgcgccgccggaatttcctgcgccgccaggatttcctgcaccgccagccgcctcttcccccagcacaaggtgctctcggggcacatagtcatgtggtccagggcgccccggtcctctgggccccgcatggagcgcggcgtcagcgcggacagctcgcagtccctgagcctctgcaggcagttcttggagccctcgggcttttgcggcctctcggggagcggcggcagctcaagctggtactttttccccaacagctcccggcaggggcgctccaggagcctctgcatgaggcggacgtataagtggccactcctctggcgacatcccacggcgggggccctcgcgtggacacccgcccctgctagctcagggctccgatgcgatccgttcgaccctgcatggcggctttcaacccgaacgcgtccctccttcaagatcaagaccccctcgccgcaccagcgtccgcagcagccccatgcctcctggacgccctcctccgggacgctctccaagccctcgacgccgtgctcctcctcgtcctgtgcgcctaggagtggggacggcggtggcggggtcatgcagggctccccagccaacctgcggccgggtcccagccagcagcaccatgccagcggccggaggcgtgggctgggggccggggcaaccgtcccggaaaaccgggcgcgccccaaggtccctgcttctcgcttccgcgtccccagagaagccggtagctcccgcccccagcccggcagaaacctcctttctttacattattaagtttgttttcattttaattttattaggacattgatagaatcactttcggatttttgagattaaaaattaaataattttcatctttaccctttttaaatttttcacactttattttaatgattttattcttttgtaaattttaatatattgtaatttatatcttcaattattatggaagaattttagaaaagtcctttcacataataaagactaattaataaaatataaaaaaaaaa

SEQ ID NO: 117640 - DNA, 1911 bp, Homo sapiens
acaatttatgcagtgaatctttttcccatccttccccaaggagacctctgaccttttaccatggtaactatgcattggggagagggaaatggtcagatatttcggggactactggacactggctctgagctgatgttgattccaggggacccaaaatgtcattgtggtcctccagttaaagtaggggcttatgaaagtcaggtaattaatggagttttagctcaggtccaacttactgtggttccagagggtccccagactcatcctgtggtcatttccccagttctggaatgcataattggcatagacatacttggcagctggcagaacccccacgttggatccctgactggtaaggtgagggctactatggtggaaaaggccaaatggaagccattagagcagcctctacctagaaaaatagtaagtcaacaacaatatcgtatccgtggagagattgcagagattagtgccaagatcaaggacttgaaatatgcaggggtggtgattcctaccacatcccctttcaagtctcccatttggcctgtgcagaagacagacggatcgactaaaattccaggaacttctacctcagtaaaatttctaggggtccagtagtgtgggacctgtcaagatattccttccaaggtgaaggataagttgctgcatttggcccctcctacaatcaagaaagaggcacaacgcctagtgggcctatttggattttggagccaacacattcctcatttgggtgagttactcaggcccatttatcgagtgacccgaaaggctgccagttttgagtggggtccggaacacgagaaggctctgcaacaggtccaggctgccctgcaagctgctctaccacttgggccatatgatccagcagtcaagccactgtgcaacttaaactgcctgtcataaactgggtgcttttctgacccatctagccataaagtggtcatgcacaagttacgtgaggaagtgggtcaaatgaccatggtcttcactcctgccaccctgtcttctcttccccagcatgcaatgatggtgtcatggggagtttcctatgatcagttgacagaggaagagaagaccagggcctggctcacagatcgttctgcacgatatgcaggcaccacccgaaagtggtggacaccactcagtctctttccccagccacccctgtcatcaccaatgggccctggccatggtggcaggggtggaggttatgcatgggctcagcaacatgggcttgcactcatcaatgctgacctggctacagcctctgctgagtgcccaatttgccagcagcagagaccaaaaatgagcactcgatatggcaccattcctcggcaaagttctccagaaggctgtgtgtgatctgaatcagcatccaatatatggtactctttctccatagccaggattcacaggtccaggaatcaaggggtggaagtggaagtggcagcactcaccatcacccctagtgatccactagcaaaatttttgcttcctgttcccacaacattacgttctactggcctagaggtcttagttccagagggaggaaagctgccaccaggagacacaacaacaattccattaaaccgtaagtcaagattgccacctggacactttgggcccctcctacctttaagtcaacaagctaagaagggagtataccccccaaaaaagaaatcattataccaaaaacatgcactttcatatatgtctttgttcactgcagtaccattcacaatagcaaagacatggaatcaacctagattcccatcgatggtgaattggatagagaatatgtggtacatatacaccatggaacactacacagccataaaaatgagtgaaatcgagtcttttgcagcaatatggatgcagctggaggccatt

SEQ ID NO: 117641 - DNA, 367 bp, Homo sapiens; identical to SEQ ID NO: 117039

SEQ ID NO: 117642 - DNA, 464 bp, Homo sapiens
  misc_feature (1)...(464): n = a,t,c or g
ggaagggggnnngggcctgatgaccctgatatcgtctaggaattgcggnggaattccgcggctcctggcgcctgtgcagagaggggcagcctcccgcactgactaccctggattcaggatagacgggcgggtgacccgtggccccgtacccacgagtttcggtcctctgaggcatctctgcaggcctctgcctgtaagaagaaaaagagcaaagagaagaagagaaaaagagaagaagatgaagaaacccagtttgatatgttggggaaaatggctttgttggcctcaaatggctgctttattagatgcaatgaagcaggggacatagaagcaaaaagtaaaacagcaggagaagaagaaatgatcaagattagatcctgtgctgaaagagaaaccaagaaaaaagatgacattccagaagaagacaaaggaaatgtcaaacaatgtgaaatcaattatgtaaa

SEQ ID NO: 117643 - DNA, 542 bp, Homo sapiens
atcatttcttcttctcctgctgttttactttttgcttctatgtcccctgcttcattgcatctaataaagcagctatttgaggccaacaaagccattttcccattttgaaagactggttcccattgttctcttggtccaattgcatctgaatgcccaacaagttcatctgaatttataccaagatattttccatagccagatttcagggcgattcttctttgtgtggagctcccagggtaaaaagaccattgtcgagtgcatgtatataggttccctcatccatttcaatggctatggttcctgaaatttcaccaaagtttgttactgttcaccagattccaacgtatcaagctgggtttcttcatcttctctttttctcttcttatctttgctctttttcttcttacaggcagaggcctggagagatgcctcaggggacccaaactcgtgggtacggggccacgggtcacccgcccgtctatcctgtttccagggtcgtcagcacgggaggctgcccctctctgcacaggcgccactcgtgc

SEQ ID NO: 117644 - DNA, 704 bp, Homo sapiens
ccagaagcgtctcatgcaaaaatccatctttctgagcctttttaagaattttactgtcttctttacttattttaagtttgtgctcttggaagctctgaaatttctttacataattgatttcacattgtttgacatttcctatgtcttcttctggaatgtcatcttttttcttggtttctctttcagcacaggatctaatcttgatcatttcttcttctcctgctgttttactttttgcttctatgtcccctgcttcattgcatctaataaagcagccatttgaggccaacaaagccattttccccttctttgtgtggagctcccagggtaaaaagaccattgtcgagtgcatgtatataggttcccttatccatttcaatggctatggttcctgaaatttcaccaaagtttgttactgttccaccagattccaacaatatcaagctgggtttcttcatcttcttctctttttctcttcttctctttgctctttttcttcttactgccgtttattctggcatcttcatgaggccagactcctcgagagggttctcaagggcagtggcttcagctcactccttgatactttctttccatctcgcctcttcgtcttggttcccttgagcacaagcttggtagacttcgcataagattactcggccatggctccgaattccaccgcactggactaatggtctacgagg

SEQ ID NO: 117645 - DNA, 2448 bp, Homo sapiens
  misc_feature (1)...(2448): n = a,t,c or g
tcaatgtttgtcagtcacataggattccagaacactgctacgatagcctgaatgtttgttcttcataggggattccagaatactcctgttgtgatctgaatatttgtccctcacactggactccagaacactgctacgagggtctgaatgattgtccctcaagcaatattccagaacactgctgctggggtctgaatgattgttcctcacgcagcattccacagcactgcttctggggtctacatgtatgtccactacataggattccagaacactgcagctgggttctgagtgtttctccctcacagagaattctagaacactgtgacgagaacctgaatgtttgtctgtaacataggattccagaacactcccgctgttgtttgaatgtttgtccctcacataggattccagaacactgctgcttggatcagaaagtttgtcccttacacaggattccagaacactgctacgattgtgagggtctgaatgtttgtccgaaacatagaattccataattctcccgccgttgtttgaatgtttgtcccacacatagtattcgaaaacactacatctggggtccgaatgtttgtccctcacataggattccagaacatccctgttgtggtctgaatgttcgtcatatgattcgaaaacactactgctggggtctgagtatttgtccctcacatagggttccagaacactgctacgagggtctgaatgattgtccctcacgtaggattccggaacactaccgctggggtaaaaatgtttttctgtcacaaaggattccagaacactgctacgagggtctgcatgttcgtttctcacgaggtattccagaacactcctgctgtcgtctgaatgtttgtccctcacacaggattccagaatactactacgagtgtctgaatatttgtccctcaaagagaattccagaacantgctgcttggttccgagtgtttattcctcacataggattccagaacactgctactaggttctgaatgtttctccctcacagaggattccagaacactcctgtggtggtctgaatttttgtccgtcacattggattccagaacaccgctacgagggtctgaatgtttgtctctcacacagaattccagaacactgctacgagggtctgtatgattgtccctcacataggattccagaacactcctgctgtggtctgaaagtttgtccctcacatagcattcaagaatactgctgctgggttttgagtgtttgtccctcacataggattccagaacactgttaccattgtctgaatgtttgtccctcgcataggattccagaacactgagaggattccagaacactactgctgttgtctgaatgtccctcacaaaggatttcagaacactgctacgagggtctgaatgtttttccctcacacagaattccagaacactgctatgagggactgaatgattctcccacacacagaattccagaacactgttacgaatttctgaatgattgtcactcacataggattgcagaacactgcttctcgggtctgaatctttgtctctcacataggattctggaacacttccgctggggtctacatgtatgtccatcacatgggattctagaacactgctgctgggatctgagtgtttctcactcacatataactccagatcactgtgaagagtgtcggaatctttgtccataatataggatgtcagaacaatcccgcagttgtttgaatgtttttccctcacataggattgcagaacactgtccctggggtccgaatgtttggcccacacataggtttccagaacactgctaggattgtctgaatttttgtccctcaatcggattccagaacaatcctgctgtggtctgaatgtttgtccctcacacaggattccagaacactgctgcaggcgtctgaatgtttgtccctcactcataattccagaacaaaagaattccagaagactgcgacgaggatctgaatgtttgtccataacataggattccagaagactcccgctgttgtttgaatgtttgtccctcacgtaggattccagaagactcccgctgttgcttgaatgtttgtccctcacataggattccagaacactgctgcttgagtctgaaagttttttcttcacacaggattccagaacactgctatgattgtctgaatgtttgtcactccataggattccagaacacttgatcatttcttcttctcctgctgttttactttttgcttctatgtcccctgcttcattgcatctaataaagcagccatttgaggccaacaaagccattttcccctctttgaatgccttctctaaatcagtaccctctgaggcagtggggatcagctcttcaacataggaattgcggggctgtccacagacacgaccacctgctgaggggctgtccacagccat

SEQ ID NO: 117646 - DNA, 402 bp, Homo sapiens
  misc_feature (1)...(402): n = a,t,c or g
gtcatgtcctccgaggtgtccgcgcgccggatcgccaagaagctggtgcgctccccgagggcctgcgcatggtgcccgaacaccgcgccttcggaagcccgttcggcctggaggagccgcagtgggtcccggacaaggaggagccaccttcctcgtcacgtttggaaactcagagaaacctgaaactatgacttgtcgtctttccaataaccagagatacttgtttctggatggagacagccactatgaaatcgaaattgtacacatttccaccgtgcagatcctcacagaaggcttccctcctggagaaaaagncattcacgnttacaccagccttccggggngagccannctgcctctttaagggtggtaacgaanggngtcacaggtatgttnctgcag

SEQ ID NO: 117647 - DNA, 499 bp, Homo sapiens
gtggcctctattacggagaaggctgacagtaccagctccaagaagacaataacgcaggagatcagcaggcccaactcgccatctgaaggtgagggagagagttcagacagtcgcagcgtcaacgatgagggtagcagtgaccccaaagacatcgaccaggacaatcgcagcacgtccccgagcatccccagcccccaggacaatgagagtgactcggactcgtcagcccagcagcagatgctgcaggcccaggcccagcctgttcgcctctaatagccagtttacagcacttgccttagcctgtttcacagacttgtccacttaccttgtcactaatttggggcttttgggctgtgagtgatcctttgatacttcaccaaggggaacgtgggggctttgtgttttgtacttttcactcactatttcactttattaagatgactgtacagcaatttgtatataaagcttatgattaaaaactattttgaacataaaaaaa

SEQ ID NO: 117648 - DNA, 399 bp, Homo sapiens
aagcctctgctgttctaagcgattcagtcctggtgccaccacgtactccaagctcagccccacgtagaattactggtcccgagattcatagaggagcttggcagccttgtgcatggccactagccacgccaccgcctgcctcctgcccacagtcacgtcctccaccactgtcagcttcagctgggtcacaccctccgtccccggcactgtatactgcaggaacatgcctgtggcccgtgcgttgcctccttcagaggcaggctggctcccccggaggctggtgtaagcgtgaatgtctttttctccaggagggaagccttctgtgaggatctgcacggtggaaatgtgtacaatttcgatttcatagtggctgtctccatccagaaacaagtatctctg

SEQ ID NO: 117649 - DNA, 1639 bp, Homo sapiens
  misc_feature (1)...(1639): n = a,t,c or g
gatgttcnnnnaattgaacctttgagaccantcgccggnccgnanntnccggnnaaccatttcgtggctgaggcggcgtcatgtcctccgaggtgtccttttcgccttgacgccaagaagctggtgcgctccccgagcggcctgcgcatggtgcccgaacaccgcgccttcggaagcccgttcggcctggaggagccgcagtgggtcccggacaaggagtgtcggagatgtatgcagtgtgacgccaagtttgactttctcaccagaaagcaccactgtcgccgctgcgggaagtgcttctgcgataggtgctgcagccagaaggtgccgctgcggcgcatgtgctttgtgggaccccgtgcggcagtgcgcgggagtgcgccctgggtgttccctcaaggaggcggagtttttacggacaagcagctcaaagtgctcctgagcggagccaccttcctcgtcacgtttggaaactcagagaaacctgaaactatgacttgtcgtctttccaataaccagagatacttgtttctggatggagacagccactatgaaatcgaaattgtacacatttccaccgtgcagatcctcacagaaggctttccctcctggaggaggcaacgcacgggccacaggcatgttcctgcagtatacagtgccggggacggagggttgtgacccagctgaagctgacagtggtggaggacgtgactgtgggcaggaggcaggcggtggcgtggctagtggccatgcacaaaggctgccaagcttcctctatgaatcttcgggaccagtaattctacgtggggctgagcttggagtacgtgttggtcaccaggactgagtcgcttggaacagcagagcctgctccttgcgtaccacagggattaatcctgcttgtgctgggaaatgcaactcactcatgtatttggagaaacaaacaggagtgttcacttatctagtgcaatatgttcacagtttattaatgcttaaaacagctttccatgttttagaatttgtgtattgtcccatactttaaatgggggtgggagagactgaggctacactactgcctaaaactatttttaagccataatataatacccatttttaatgagatccgcaggtcctacctagaaggttctggccccatcaatattccatttcatttaattcttcccacagaaaccagtttggggcagtaggaactcaaggcttctgggtctgcagtggaaccctgttcgcctctaatagcccagtttacagcacttgccttagccctgtttcacaaaacttgtccacttaccttgtcactaatttggggcttctgggctgtgagtgatcctttgatacttcaccaaggggaacgtgggggctttgtgttttgtacttttcactcactatttcactttattaagatgactgtacagcaatttgtatataaaagcttatgattaaaaaactattttgaacatacggacaaggcctcgccttcctgtgtccagatcacctgaaccctcgtgccacagcgcagtctggggtccaggaaaggaaggacttcacagccgccgggggtgaggacggggttttatttgtggcacattttacacagcgttagaggcggtcttggggttggcag

SEQ ID NO: 117650 - DNA, 699 bp, Homo sapiens
atggggccctactgggctcctgatcccaaatccagagggaaatctcccagagtttatggtcaaagatgtacaccggagtgtacaagtttaggtcaaggttacctgaatcgcactgaacttttgggggaatgcttgataaggcttttggttaagtgtagatgggacagggcacctagactgacctgtcttctggattcgaaacctctaatcaatggccagcaggggcctgaggagggattgagagcacctaaaggaggcaattttggcacattccctcaggctaagagaggtggggaagctgctgaagaagagtctgaagctagcaggggttggctcgtgaggtttaagggaagacgctgtctccgtaacatagaagtgcaaggtgaaacagcaagtgctgctggagaagctgcagcaggtcatccaggagatctagctaagatcactggtgcaggtggctactacactcaacagattttcagtgtagatgaaaccaccttgcactggaagaagatgccatgcaggacattcacggctacagaggaaaaaatcagtgcctatttcaaagcttcaaaggacgggctgaatctgttattaggggttaatgctcctggtacctacgtcctcagaagtaatattagcgtttttctctcagaggaaatgagtagtgataagaggttaacagaaatgggctattaa

SEQ ID NO: 117651 - DNA, 2521 bp, Homo sapiens
atgtgggccccgcccccaaccattgtgtcggagagggaagtggacgagctcctcgagaggaatgcgcagctgaagagagaggtgggcagcaggcccggtcacctgccaggtgaccacatggccaggtgccgccaccactcgggttacctggccgatgacgaggccagccactccatgtgcagtgcacgggtgcagctgcccaagaagccactggtcccagaaatgcggccagcctgcaagccgggccgtgtgccacacccaccatccacatgtggcagctcagcactccagggccaacgccgaaacaagaggcaccctcagccctttggccactttctggatttcctaactgagagccaggtcctggacagcctggagacagtggtggagaaggcgactgagcgcatggctgccatgaagacggaggctggggtgccgcttgtggaggtgcaggacccagtggaggtgccaagtggtagacggcgggcacatgcccggcccagcctcagcaccgtacaccggcaccgtgtacggccgaccctctgcactggacaccccaacaactacccatccagctccagctccatgtccaactgccatagcagcctcatggccggctgtctgggctcccacagccgggacagtgacctaggtgcccaaggctcattgccacctgtgagggacaaactcctgctggagaagaacctcaagcggctgctacagctggagagggaagggaaaggcctcagtcagtcctgctcccagagggactccctgctgtgggattcgctgggtagccagaccagctttcagtggacacaggagcagcccttgtcctggttctcagggctgctgggctcaagctctggcgtgcctgaagcatcagagccgaggcctggagaacaggagccaatcttccgcaagcgagagttcaataaggagatcaagtcattactgagccagctggagtccctcgacctgcctggctactgtccgctccgtgagccccatcgcacgctgaacttcctggctgaccaccgcctcttccctgccctgcaaagcgtggtcagccaggctgtggataagctccgtggcgcccactgccgcgacggccgtcctctgttccccaccagcttggagcccacctcagatctgccgcctctgggctctgagccagctaaacccaccaatggcgggcagccctatgcttccccccgccccacagtctccagccccaagatgcttcagagaaaacgcaaggacagaggaggctccccctccatgtctagtgcccaggtggccaccagattcaaactcaaggtgacacccacggagaagcccaatgtccccagcccctcactccactccagggaggaggcacctgactcagatcccaaattacaaaacccacctgtttccctgagctccagccagagggcccagccctggcagggcctgcacctcaccctgcccacgccagggattgtggtggaggtggcctgcagccagggccacctcaggggccctgtcacacctccactttcctccccctacccccgctcttcctgctaccttctccctgagctctctccagttgcctcttcatctcccgcctcactgtgtccagagagcccctgcagcagcagcaggttcacgaagaagaagccgctgccctccatctcgtcgaagtccagcatgtctcacttctccaaccgcctttatgaggagctcgccgacttcctgacccagcaggcagcctccttggtcatccgcaagtacgagttcgaaaaggacctcagtaagcagctgggcttcttctccttccccatcacccacgtgctcagggacctttccctgggcttaaagaaggtaaaaggctcccgcatccacctgtcctcggagacccaccggagctgcctgctgcgtaaactggaggagtccaaaagggcccggcaggcctcccggctcagcacctcccactgcagcacagagacaccctctgtgcagcaggaaccagccacccacactgcccaggaccaggccacagagccctgccgctccctctacaccaacttgccagccagccggcagctcagccctttggagcccaagctctacatgtctgcctgcaccggcatgggttccagtccccccaagtccaaggacatggacaatgagggccgtgataaagccgagattgaagatgaagatgaggatgagttcaaggatgaagaccaggatgaggacaaggatgaggatggagtctagagcctcccagagcctggagaggaggcctcggtcagccactccgtggacgtgggccacggtgacccaccatgaagtccccactagccactcgattccctgctctgtcagagttgctgcacatcacaccagcccctgccaagagcaggagtcaccacaggctgaatgcccacgaggagctctgctgagactctcaagggagccagtgaaagaaatagaaataaagcctgtgctgctgggacacaaaaaaaaaaaa

SEQ ID NO: 117652 - DNA, 674 bp, Homo sapiens
atggctcagtgcagcctggacgccctggaccagcccctcctgcgcctgggccacggccgctgccttcagggcatcactgtgccctggccccacccacccgtgtcagcaccgcccaccgccctggcaccacccaccgagttctcgcccatgaggaagggggaccctgagtggaggtttcaaaccttaggggccgtccctgccgtgcagggctctacccccacctgccccatggcccccatttcatgtctgtggctcaccagcttttccccagacccagctccggagcccacaggcgtggccgatgcagaaacctcaggaagaaccttccagaacgtgccttccacgggacggaaacttccggaacatgccttccacagcatggaaacttctggaacgtggcttccatgggatggaaccttccggaacgtgccttccatgggacagaaccttctggaatgtgccttccacgggaccctctcatgcccttgcacaactgcaccattttcctgtgtcaccgaggaggacgtgggctccgagccgctgagtgacctgttgggggcagggctggcgctggccgtcccagcttaaggacttgccacagcttaagacccatggaaggaaggtacggggaggtgctgaagggatgaagggcagagctgggccttggggcaagg

SEQ ID NO: 117653 - DNA, 1257 bp, Homo sapiens
ctaccttttcaagtaggcatgcacattcccaaagccatgatatttggctaaatacacaaggaccccagtcgcacaccgtccatctcgctgccggcagaaactgcagttgcagattcctcgacaaggcgggcaatgccagttcggatccagcagagcatccctgacctcttcaccataacggtttcgaaggcaggggccacagaactggcctcgaacgccccagcagtctgggtttctgcagtttgttttggtatcaatagtcttctgacggcattgatgacaagtagagcccagtgaacggttatatatcttctctcgagaattgctgcagacgttctccaactcctcctctgtaatttcttccactgggcgaattatatgcggaagggtcacggatgatctggagcgacggcttctgggcaggtcatcttcattcatgtagccatccacggtcttcctctttctcaccaacatgtacttatcctcttcctcctcctcctccatgggtagagcgtcaagggacccgaggatccgggaccttgacctggtaagaggacgagctctccgttcagggtttctcctggaagcaacacccgggaatgtacgccttcgcggtctccttgattgcattccatcttgtatctcactctctgagaaaccgcaaaatgattcatcgtcagagtcggcatgaaaaataccggccagttcgttagtgacatctggccttggtttctgtaaaaatccacaatggtctaatacatcttgcacctcactttcatgtgatgccttccaccttggaatgactttgtcagatgccagtgccatgctcttggactttccagcctccagaaccatgagccaaataaacttctgttccttataaattacccagtctgtggtattctgtgtcccaacgcgggaaagacagcccgagccccgcccctccgggcccgggtcggcgcgcccagcctgccagccgcgctgctgctgctcctcctgctgtgggaccgctgaccgcgcggctgatccgctctccccgctccaagcgccgatctgggcaccccgccaccagcatggacgctccccgcgtgccggtgagggctgaggtggctgcatggggcactgagagtggttgtgatcctggaaggtggaagagcacagtagccacctagcagcttctgctcgataggaattacttatggtcacaaatgtgcatttgccttgtcctggtgagccttcatcctcactgagaaccat

SEQ ID NO: 117654 - DNA, 756 bp, Homo sapiens
ttaaaggttaactatactatagacgtcttcatcaagctgctgcggcttttcttctactttgaaaaccacaagtaaacaagtcggcttcctgtgcacagcttgcaggacctgtgtcccaacgcgggaaagacagcccgagccccgcccctccgggcccgggtcggcgcgcccagcctgccagccgcgctgctgctgctcctcctgctgtgggaccgctgaccgcgcggctgctccgctctccccgctccaagcgccgatctgggcacccgccaccagcatggacgctcgccgcgtgccggtgagggtttttgctctaacggaagccagaacgtagggtcgggctccctgggccttcccaggagatgtaaacccctctcttgctcccatcccctgaacatgctcatacacagagctcattcccccagtctccttttcttttcctccttctacctcagggaactctcctacagcctgcttagactcaggagtccagctggcttcacctagtggatctcgcacaggggccacaggtggagctgcccacagtccggcccgtgcacccgcactccacagcccttgggcagtcgatgggaccaggggctgaggtggctgcatggggcactgagagtggttgtgatcctggaaggtggaagagcacagtagccacctagcagcttctgctcgataggaattacttatggtcacaaatgtgcatttgccttgtcctggtgagccttcatcctcactgagaaccat

SEQ ID NO: 117655 - DNA, 515 bp, Homo sapiens
ccgctgaccgcgcggctgctccgctgctccccgctccaagcgccgatctgggcacccgccaccagcatggacggttcgccgcgtgccgcagaaagatctcagagtaaagaagaacttaaagaaattcagatatgtgaagttgatttccatggaaacctcgtcatcctctgatgacagttgtgacagctttgcttctgataattttgcaaacacgaggctgcagtcagttcggggaaggctgtagggacccgcagccagtgcaggcactctggacctctcagggtggcgatgaagtttccagcgcggagtaccaggggagcaaccaacaaaaaagcagagtcccgccagccctcagagaattctgtgactgattccaactccgattcagaagatgaaagtggaatgaattttttggagaaaagggctttaaatataaagcaaaacaaagcaatgcttgcaaaactcatgtctgaattagaaagcttccctggctcgttccgtggaagacatcccct

SEQ ID NO: 117656 - DNA, 507 bp, Homo sapiens
  misc_feature (1)...(507): n = a,t,c or g
ngatttagggggagccngnnnnnnnnnnaatcgatattcatgtgcgtgtggcggaattctatccagagtcaggtgtcactactcaatacacttggacccagcttccccaaaggttcaagaactcccccaccatctttggggaggcgttggctcgagacctccagaagtttcccaccagagacctaggctgcgtgttgctccagtacgttgatgaccttttgctgggacaccccacggcagtcgggtgcgccaagggaacagatgctctactccggcacctggaggactgtgggtataaggtgtccaagaaaaaaagctcagatctgccgatagcagggcacttcaactcagaaagctgaactcattgctttaattcgggccttagaactcagtgaagcataatgcgagacaaggtccagctgttccccctggcatacaagcttatggagcagccccctttgaagatctccaggtggacttcacagagatgccaaagtgtggagatct

SEQ ID NO: 117657 - DNA, 3192 bp, Homo sapiens
atggaggaaggatggattcggttaccagatgggagactagctgtgccacagctgctaggagctgcagttgtactggctgtgcaagaaaccacccatcgagatcaggagtcactggaaaagttgttaggctggtatttctacatctcacttctgtcagcccttgccaaaacgatttcgaccgccttacggatcggctcagacaacgggcctgtgtttttggctgccttggtacagaagacagcaaaggtgtccaagacacagagagccacggaatctcacaggtgtctgagaattcctcctcctgggactctcagaggatccagaactgcagccgtcctcgctttgctgtccctgtccctgtccatgtatctggtcacggtgctgaggaacctgctcagcatcctggctgtccgctctgactcccccctccacacccccatatacttcttcctctccaacctgtgctgggctgacatcggtttcacctcggccacagttcccaagatgattgtggacatgcagtcgcatagcagagtcatctctcatgcaggctgcctgacgcagatgtctttcttggtcctttttgcatgtatagaaggcatgctcctgactgtgatggcctatgactgctttgtagccatctgtcaccctctgcactacccagtcatcgtgaatcctcacctctgtgtcttcttcgttttggtgtcctttttccttagcctgttggattcccagctgcacagttggattgtgttacaattcaccatcatcaagaatgtggaaatctctaattttgtctgtgacccctctcaacttctcaaatttgcctgttctgacagcatcatcaatagcatattcatatatttccataaggatccagaactgcagccggtcgtcgctgggctgttcctgtccatgtgcctggtcacggtgctggggaacctgctcatcatcctggccgtcagccctgactcccacctccccacccccatgtacttcttcctctccaacctgtccttgcctgacatcggtttcacctccaccacggtccccaagatgagcgtggacatccagtctcacagcagagtcatctcctatgcaggctgcctgactcaaatgtctctctttgccatttttggaggcatggaaaaaagacatgctcctgagatattaagatccaaatggcaggggggcgaggcgccccccgcgattcggggagtaataccacccgcctctccccccgcatatattaagatccaaatggcagggaggcgaggcgccccccgcgatgcggggaattatattcggatcaatatcaccggctgtgtgtacacctactgcgatattgaacgtagtatcatgctctctccctccctggagattaggagcaatatcacagctcgtttacgacccaaaacggggacacaaatgcccctgagagtgcagcgttatactgggatagacgaggatggtcacgtggtggagaggcgtgtttttggtgaagaaaggcggagagtcctccaagcaggaactaagtggctagaggaacatgcactagctgattatcaaaacccccaagaatatggaaggacccagttgccaggaaccgacccccagttggacccacatgaaagagaggagatgcaaaggctaaaccgagacagggaagctctcttggaaggattaatgaggggagctcagaaggccacaaacgttaacaagctctctgaggtcattcagggaaaagaagaaagtccagcacaattctacgagagactgtgtgaggcctatcgtatgtatactccctttgatcccgatagccctgaaaatcagcacatgattcacatggctttagtccgtcaaagcgcagaagacatgagaagaaaactgcagaaacaggctgggcttgcagggatgaatccatcacaattactagaaatagctagccaggtgttcataaacagggatgcagtaagccctaaggaaaatggcaaagagaatggaggatggcccccctgtttgagggccttggcagcaactgccctgctagtacaagaagcaaataagctgactcttgggcaaaacctgaacataaaggcctcccgtgctgtggtgactttaatgaatactaaaggacatcattggctaacggatgccagactcaccaagtaccaaactttgctctgtgaaaatccccgtataaccactgaagtttgtaacaccctacaccctgccaccttgctcccggtatcagagagccctgtcgagcctgattgtgtagaagtgttggactcagttgactctagcagacctgacctccgggaccaggcttgggcatcagtagactgggaactatacgtggatgggagcagcttcttcaacccccaaggagagagaggtgcagggtatgcagtggtaaccctggacactgttgttgaagccagatcgttgccccaggccacttcagcccagaaagctgaactcgttgctttcattcgggccttagaactcagtgaggttgagactgtcaacatttacactgattctcgaggacaccagcgagcttccaccttgctgggtttggggaattcccgcgctgactcagaggctcgaaaagcagcatctgcccccttctgggcatcagtgctccctcaagcacctgatcttggacctacttcttctaaagaagaaaaggaccttctccagatttcgaccgccttacggatcggctcagacaacgggcctgtgtttttggctgccttggtacagaagacagcaaagatattaggaaaaaatgtcactggggatgtgaacagccctgcgatattgagagtagtatcatcccctccccccttgcatattgggaaacaacatcacagcaaaaaggaatgtagtaggagtcagggtgataataaggagaaggtcagcaacgaacatgtgagcaatagaatctatgtcatcatgaagttcacgggaaggttctatgactggacgtgtacgaaccttctgtcatggaaccagagattggagaccgtgggaacacatccaaatccacatctccgtgacaaggtggtgctgatttccagtggtcctccctggtgggggaatcacgtagctctgactctggagcgtgttgttgtgtttctctttcagtacgagcttgtctgtggccctgcagttcctcccttatga

SEQ ID NO: 117658 - DNA, 1821 bp, Homo sapiens
atgttgaaaaattttaagaagggatttaatggcgactatggggttactatgacaccagggaaacttagaactttgtgtgaaatagattggccaacattagaagtgggttggccatcagaaggaagcctggacaggtcccttgtttctaaggtatggcacaaggtaactggtaagtcaggacactcagaccagtttccatacatagacacttggttaccacagtgggtaagagggcaggcagcagcagtgctagtagcaaagggacagatagtcaaggaaggatcccgctccacccaccgagggaaatcaactcctgaagttctgttcgacccaacatcagacgatccattgcaggagatggcaaaagtcatcccagtggtgccctccccttaccagggagagaggctccccacttttgagtccacagtgcttgtgcctccgcaagacaaacatatccctaggccacccagagtagacaagagaggaggtgaagcctcaggagaaacccctcccttggcagctcgtttaagacccaaaacggggatacaaatgcccttgagagagcagcggtatactggaatagatgaggatgggcacatggcggagaggcgtgtttttgtgtgccagcccttcacctctgccgaccttctcaactggaaaaacaataccccgtcctgtactgaaaagccacaagctctaattgatttgctccaaactattatccagacccataaccccacttgggctgattgccaccagttgctcatgttcctctttaacacagatgaaaggcggagagtgctccaagcagcaactaagtggctaggggaacatgcaccggctgattaccaaaacccccaagagtatggaaaagaagaaagtccagcacaattctacgagagactgtgtgaggcctatcacatgtatactccctttgatcccgatagccctgaaaatcaacgcatgattaacatggctttagttagtcaaagcgcagaagacattagaagaaaactgcagaaacaggctgggtttgcagggatgaacacatcacaattattagaaatagctaaccaggtgtttgtaaacagggatgcagtaagccataccggtgctgaacattcggtagtaaccggcccagtcgcccccttatccaaaaagactattgacatcatcggagccatgggagtttcagcaaaacaagctttctgcttgccccggacttgtactcctgggaccaaggactacaggctggtacaggatttgcgcttggttaatcaggctacagtgactttacatccaacagtacctaacccgtacatattgctggggttgctgccagctgaggacagctggttcacctgcttggacctgaaagacgctttctttagcatcagattagcccctgagaggcagaagctgtttgcctttcagtgggaagatccggagtcaggtgtcactactcagtacacttggacctggcttccccaagggttcaagaactcccccaccatcttcggggaggcattggctcgagacctccagaagtttcccaccagagacctaggctgcgtgttgctccagtacgttgatgaccttttgctgggacaccccacggcagtcgggtgcgccaagagaacagatgctctactccggcacctggaggactgtgggtataaggtgtccaagaaaaaaagctcagatctgccaacagcaggtacgttacttgggatttactatccgtcggggagtgcagcctgggatcagaaagaaagcaggtcatttgtaatctaccggagcctaagaccagaaggcaggtga

SEQ ID NO: 117659 - DNA, 2466 bp, Homo sapiens
atggataaattcctcaacacatacaccctcccaagactaaaccaggaagaagttgaatctctgaatagaccaataacaggctctgaaattgtggcaataatcaatagcttacgaatcaaaaaaagtgcaggaccagatggattcacagccgaattctaccagaggtacaaggaggagctggtaccattccttctgaaactattccaatcaatagaaaaagagggaatcctccctaacgcattttatgaggccagcatcatcctgataccaaagcctggcagagacacaaccaaaaaagagaatttttggccaatatccttgatgaacattgatgcaaaaatcctcaataaaataccggcaaaccgaatccagcagcacatcaaaaagcttatccaccatgatcaattggacctatggcggcggcagctgtcactgggcctagcccaggatgtggacctggggactccccagaagggcaggagcgggaggctcacggagcgtcggcggaaggcacacaggatgctaaagctttacaaaggcctctcggaaggggaggcgttgggactccctgcggggcccgaccccctggaccccactgatctgaacggggcgcacttcgacccggaagtttacctggacaagctgcctagagagtgccctctggcccagctgatcgacagtgagacggacatggtgcagcagatccgggctctagacagcgacatgcaaaccctgacctcccagtgccaagtgtataagtgtgtccagaattggtgggttcttggtctcactgacttcaagaatgaagccgcggaccctcctggagtgaagctgcagaccttctcagtgagtgttacagctcataaaggcagtgtggacccaaacagtgagcagcaacaagatttattgcaaagagcaaaagaacaaagcttccacagtgtggaaggggaccccactgcagcaatcagagctgtccccccaaagaagcaagggaaggggggccctggaaaagaaactcagcttggctgtcagagtttgcagcataaccagtgtgcttattgtaaagaaataggacagtggaagaacaaatgccctcagctcaaaagaaaacaaggtgactcagagcaggaggccccggacaaggaggaaagggccctgctcatcctggtagaagggttgatgagcttttgctgggacaccccacggcagtcgggtgtgccaagggaacggattgccctacgccgacacctggaggactgtgggtataaggtgtccaagaagaaagctcagatctgccgacagcagttgactctagcagacctgacatccgggaccaagcttgggcatcagtacactgggaactatacgtgcatgggagcagcttcatcaacacctaaggagagagaggtgcagggtatgcgtgataacctggacactgttgttgaagccagatcgatgccccagggcacttcagcccagaaagctgaactcattgctttcattcgggccttagaactcagtgaggcccttgccaaaacggtgaggcagcgatgtgtcagctgccgacagcatcatgcgaggcaaggtccagccgttccacccggcatacaagcttatggagcagccccctttgaagatctccaggtagacttcacagagatgccaaagtgtggagatattaggaaaattgtcactggggatgtgaacacccctgcgatattgggagtagtatcatcctctcccccctcgcatattgggaacaatatcacagaggatccagaactgcagcccatcctggctggtctgtccctgtccatgtatctggtcacggtgctgaggaacctgctcatcatcctggctgtcagctctgacccccacctccacacccccatgtgcttcttcctctccaacctgtgctgggctgacatcggtttcaccttggccacggttcctaagatgattgtggacatgcagtctcataccagagtcatctcttatgagggctgcctgacacggatatctttcttggtcctttttgcatgtatagaagacatgctcctgactgtgatggcctatgactgctttgtagccatctgtcgccctctgcactacccagtcatcgtgaatcctcacctctgtgtcttcttccttttggtatactttttccttagcttgttggattcccagctgcacagttggattgtgttacaattcaccatcatcaagaatgtggaaatctctaattttgtctgtgacccctctcaacttctcaaacttgcctgttctgacagcgtcatcaatagcatattcatgtatttccatagtactatgtttggttttcttcccatttcagggatccttttgtcttactataaaatcgtcccctccattctaaggatttcatcatcagatgggaagtataaagccttctccacctgtggctctcacttggcagttgtttgctga

SEQ ID NO: 117660 - DNA, 1830 bp, Homo sapiens
atggtgttggagaaacttgatttccacatgcagaagaatgaaggtggaccctatgtcacaccaggcaaaaggtgtccaaactctacagacccacagaatgtaacggatgtctctcgattcctcctcctcaaactctcagaggatccagaactgcagccggtccttgctgggctgttcctgtccatgtgcctggtcacggtgctggggaacctgctcatcatcctggccgtcagccctgactcccacctccacacttccatgtacttcttcctctccaacctgtccttgcctgacatcggtttcccctcccccacggtccccaagatggttgtggacatccaatctcacagcaattatattctgatcaatatcaccggctgggtgtacacctactgcgatattgaacgtaatatcatgctctctccctccctggacattagaagcaataacacagctcgtttacgacccaaaacggggacacaaatgcccctgagagagcagcggtatactgggatagataaggatggtcacttggtggagaggcgtgcttttggctaccagcccatcacctgcgtcaaccttctcaactggaaaaacaatacacagaactataccgaaaagccacaagccctaattgattttctccaagctgttatccagacccacaaccccaccttggctgattggcaccagttgctcatgttcctctttaacagcgaagaaaggcggagagtcctccaagcagtaactaagtggctagaagaacatgcaccagctgattatcaaaacccccaagagtatggaaggacccaggaatcagtagactgggaactatacgtggatgggagtagcttcttcaacccccaaggagagagaggtgcagggtatgcagtgataaccctggacactgttgatgaagacagatcattgccccaggccacgtcagcccagaaagctgaactcattgctttcattcgggccttagaactcagtgagggtgagactgtcaacatttacactgattctcggggacaccagcaagcttccaccttggtgggcttggggaattcccgcgctgactcagaggctcgaaaagcagcatctgcccccttcggggcatcagtgctccctcaagcacctgatcttggacctacttcttctaaagaagaaaaggactttctccagatattaggaaaaaatgtccctggggatgtgaacagccctgcgatattgagagtagtatcatcctctccccttgcatactgggaaaaatatcacagattatatttggatcaatatcaccggtgggtgtacacgtactgcgatattgaacgtaatatcatgctctctctctccctggacattaggagcaatatcacagctcgtttgagacgcaaaacggggacacaaatgcccctgagagagcagcggtatactgggatagatgaggatggtcacgtggtggagaggcgtgcttttggctaccagcccttcacctgtgtcgaccttctcaactggaaaaacaatacaccgccctataccgaaaagccacaagccctaattgattttctccaagctgttatccagacccacagccccaccttggctgattggcaccagttgctcgtgttcctctttaacagcgaagaaaggcggagagtcctccaagcagcaactaagtggctagaggaacatgcaccagctgattatcaaaacccccaagagcatggaaggacccagttgccaggaacagacccccatttggacccacatgaaagagaggatatgcaaaggctaaatgagacagggaagctctcttggaaggattaa

SEQ ID NO: 117661 - DNA, 459 bp, Homo sapiens
atggaggaaggatggagagtagctgcgccacagctgctaggagctgcagttgtactggctgtgcaagaaaccacctatcgaggtcaggagtcactggaaaagttgttaggccggtatttctacatctcgcgtttctcagcccttgccaaaacggtgaggcagcggtgtgttacctgccgacagcataaagcgaggcaaggtccagccgttccacccggcatacaagcttatggagcagcccccttagaagatctccaggtagacttcacagagatgccaaagtgtggagaagacggcaaaggaattggggatcacacggaaattgcctgctgcctcccggcctcagagttccggaaaggtggaggggatgaatcggactatcaaaatagtattattgtcttccgcgatggatatgtaaaacaacaccacgaggggcgtcaaaccacctgctacatttga

SEQ ID NO: 117662 - DNA, 476 bp, Homo sapiens
ctcctttacggcccaaaacggggatacaaatgtccccgagagaacagcggtatactgggatagatgaggatggtcacgtggtggagaggcgtgtttttggctaccagcccttcacctccgtcgaccttctcaactggaaaagcaatacaccgccctataccgaaaagccacaagccctaattgatttgctccaaactgttatccagacccacaaccacacctgggctgattggcaccagttgctcatgttcctctttaacagcgaagaaaggcggagagtcctccaagcagcaactaagtggctggaggaacatgcaccagctgattaccaaaacccccaagagtatgttgatgaccttctgctgggacaccccacggcagtcgggtgcaccaagggaacagatgccctacaccggcacctggaggactgtgggtataaggtgtccaagaagaaagctcagatctgccgacagcag

SEQ ID NO: 117663 - DNA, 279 bp, Homo sapiens
ccttgggcatcagtagactgggaactatacgtggatgggaacagcttcttcaacccccaaggagagagaggtgcagggtgtgcagtggtaaccctggacactgttgttgaagccagatcgttgccccaggccactgcagcccagaaagctgaactcattgctttcattggggccttagaactcagtgaagatctgattcctagatttcgactgcccttacggatcggctcacataacgggcctgcgtttttggctgccatggtacagaagacggcaaag

SEQ ID NO: 117664 - DNA, 500 bp, Homo sapiens
acccacaaccccacctgggctgatcgccaccggttgctcatattcctctttaagagagatgaaaggtgaaaggcggagagggctccacgtagcaactaagtggttagaggaacatgcaccagctgattatcaaaacccccaagagtgtggaaggacccagtcaccaggaacccacttccagttggacccacatgaaagagaggatatgcaaaggctaaaccgagacagggaagctctcttggaaggattcaagaggggagctcggaaggccacaaacgttaacaaggtctctgaggtcattcagggaaaagaagaaagtccagcacaattctaccagagactgtgtgaggcttatgagagccctgtccaggctgattgtgtagaagtgttggactcaattgactctagcagacctgacctccaggaccagccttgggcatcagtagactgggaactatacgtggatgggagcagcttcttcaacgcccaaggaaagagag

SEQ ID NO: 117665 - DNA, 509 bp, Homo sapiens
cccaggtacacagtgaagatggccacagcctgccaccagtggtagatggtgaagatgaagtcctgtctctccttgtcttcgtacaagactcccaggagtgctgcaggcaggcagtacagggcaggcaggggagaggtgtcacctggggcctggggctgccgagctaccatctacgaactttactaagccctgtatgtgtcccagcccgggaccagagagcgcctagaaagtgctgtgaggcggtcctggcctgccccctggtggagaccctggtcaccacactgctcacacgctaagcagaagtaggagcaggtgcgccgggctgtgtggctgcaggtggtcccgctccgcaccacatgcgtggcctcaaaagaagaaagctctgtgcttagtcatgtcctgtccccaaccccaggtgtacagtgccaagcttgcaggcgctgtttctcctcctcagccgggactagagagatcgaactgtttgcagctgccaactctgcaaatcaaac

SEQ ID NO: 117666 - DNA, 780 bp, Homo sapiens
atggaggaaggatggattcggttaccagatgggagagtagctgcgccacagctgctgggagctgcagttgtactggctgtgcaagaaaccacccatcgaggtcaggagtcactggaaaagttgttaggccggtatttctacatctcacctttgtcagcccttgccaaaacggtgaggcagcgggattttgccgatttcggaaccaccatcaaacaggattttcgcctgctggggcaaaccagcgtggaccgcttgctgcaactctctcagggccaggcggtgaagggcaatcagctgttgcccgtctcactgacttcccagtgccaagtgtataagtgtgtctggaattggtgggttcttggtctcactgacttcaagaatgaagccacggaccctcctggagtgaagctgcagaccttcttggtgagtgttacaactcataaaggcagtgtggacccaaacagtgagaagcaacaagatttattgcaaagagcgaaagaacaaagcttccacagtgtggaaggggaccccagcagggattttgccgatttcggaaccaccatcaaacaggattttcgcctgctggggcaaaccagcgtggaccgcttgctgcaactctctcagggccaggcggtgaagggcaatcagctgttgcccgtctcactggtgaaaagaaaaaccaccctggcgcccaatacgcaaaccgcctctccccgcgcgttggccgattcattaatgcagctggcacgacaggtttcccgactggaaagcgggcagtga

SEQ ID NO: 117667 - DNA, 721 bp, Homo sapiens
atgaggggagctcagaaggccacaaacgttaacaagctctctgaggtcattcagggtaaagaagaaagtccagcacaattctaccagagactgtgtgaggtctatcgtatgtatactccctgtgatcccgatagccctgaaaatcagcacatgattcacatggctttagtccgtcaaagcccagaagacatgagaagaaaactgcagaaacaggctgggcttgcagggatgaatccatcccaattactagaaatagctagccaggtgtttgtaaacagggatgcagtaagccgtaaggaaaacggcaaagagaatggaggtcaggcccggcgatatgccgacctgtttagccctgtcgagcctgattgtgtagaagtgttggactcaattcactctagcagacctgacctccgggaccagccttggccatcaggagactgggaactatatgtggatgggagcagcttcttcaacccccaaggagagagaggtgcagggtatgcagtgataaccctggacactgttgttgaagccacatcgttgccccaggccacttcaggccagaaagctgaactcattgctttcattggggccttagaactcagtgagggtgagactgtcaacatttacactgattctcgccatggcactgaagagggacagcaaatcttgaagcagccggtgtcagagagactggactttgtgtgcagttttctgcaga

SEQ ID NO: 117668 - DNA, 1899 bp, Homo sapiens
atgcaagccatcagtgcattcggcgagggaagggtaaagagccacttttattgggaaaaagagatttacataagctgcttagaaacagagttcattggttcccgaggtcgaagccagagttgtcgtcagtgctttggtggagacgccagtgctgggcgaatgttcttccgagagcgccttatctgcgttgctgcagtcctgcagaatgtcgagtggatcatgggaacaatatccctgggggattatattctgatcaatatcaccggctgggtgtacacctactgcgatattgaacgtaatatcatgctctctccctccctggacattagaagcaataacacagctcgtttacgacccaaaacggggacacaaatgcccctgagagagcagcggtatactgggatagataaggatggtcacttggtggagaggcgtgcttttggctaccagcccatcacctgcgtcaaccttctcaactggaaaaacaatacacagaactataccgaaaagccacaagccctaattgattttctccaagctgttatccagacccacaaccccaccttggctgattggcaccagttgctcatgttcctctttaacagcgaagaaaggcggagagtcctccaagcagtaactaagtggctagaagaacatgcaccagctgattatcaaaacccccaagagtatggaaggacccaggaatcagtagactgggaactatacgtggatgggagtagcttcttcaacccccaaggagagagaggtgcagggtatgcagtgataaccctggacactgttgatgaagacagatcattgccccaggccacgtcagcccagaaagctgaactcattgctttcattcgggccttagaactcagtgagggtgagactgtcaacatttacactgattctcggggacaccagcaagcttccaccttggtgggcttggggaattcccgcgctgactcagaggctcgaaaagcagcatctgcccccttcggggcatcagtgctccctcaagcacctgatcttggacctacttcttctaaagaagaaaaggactttctccagcctcagaaggtccaggcgagaagctggcttctggctgcatctgccccagtgtcctctgaggcattcggatggggcgatgactataaaaaccacgtgaaatgcataagtgaagatcagaagtatggtggcaaaggctatgaaggtaaaacccacaaaggcgacatcaaacagcaggcgtggattcagaattggatgaagaacagtttaaaagttcataatgaatccattctggaccaggtgtggaatatcttttctgaagcttccaacagcccacttagttgctgcttggaggactctccgcctttcttcgctgttaaagaggaacacgagcaactggtgccaatcagccaaggcaaaaggtgtccaaactctacagacccacagaatgtaacggatgtctctcgattcctcctcctcaaactctcagaggatccagaactgcagccggtccttgctgggctgttcctgtccatgtgcctggtcacggtgctggggaacctgctcatcatcctggccgtcagccctgactcccacctccacacttccatgtacttcttcctctccaacctgtccttgcctgacatcggtttcccctcccccacggtccccaagatgggtgttatcgtcttccgcgcatttccccttgcgctggacctgtgcgctattggattcgaggttcctacggtcatacatgcggtggtaaatggtggagcctctcatgactccgaatctcagaattgcatcatcgtaaaaagccttcatggaatccggaaccttgccattattggaagttcactttgtgcctttgtaacttatctgttgtag

SEQ ID NO: 117669 - DNA, 1420 bp, Homo sapiens
tgaagaaaggcggagagtcctccaagcaggaactaagtggctagaggaacatgcactagctgattatcaaaacccccaagaatatggaaggacccagttgccaggaaccgacccccagttggacccacatgaaagagaggagatgcaaaggctaaaccgagacagggaagctctcttggaaggattaatgaggggagctcagaaggccacaaacgttaacaagctctctgaggtcattcagggaaaagaagaaagtccagcacaattctacgagagactgtgtgaggcctatcgtatgtatactccctttgatcccgatagccctgaaaatcagcacatgattcacatggctttagtccgtcaaagcgcagaagacatgagaagaaaactgcagaaacaggctgggcttgcagggatgaatccatcacaattactagaaatagctagccaggtgttcataaacagggatgcagtaagccctaaggaaaatggcaaagagaatggaggatggcccccctgtttgagggccttggcagcaactgccctgctagtacaagaagcaaataagctgactcttgggcaaaacctgaacataaaggcctcccgtgctgtggtgactttaatgaatactaaaggacatcattggctaacggatgccagactcaccaagtaccaaactttgctctgtgaaaatccccgtataaccactgaagtttgtaacaccctacaccctgccaccttgctcccggtatcagagagccctgtcgagcctgattgtgtagaagtgttggactcagttgactctagcagacctgacctccgggaccaggcttgggcatcagtagactgggaactatacgtggatgggagcagcttcttcaacccccaaggagagagaggttgcagtaaaaacaggggtaccataagcaaccacctctttcctcaacgatgtgatgaaagcaaaagccaagtatcttcatgtatccaacgtaaaaatataaaaagttacccccgtcggctgcagttggagctatggcggcggcagctgtcactgggcctagcccggggtgtggacctggggactccccagaagggcccgagggggaggctcacggagcgtcggcggaaggcacacaggatgttaaagctttacaacggcctctcggaaggggaggcggtgagactcctcgcggggaccgaccccctggaccccactgatctgaacggggcacacttcaacccggaagtttacctagacaagctgcctagagagtgccctctggcccagctgatggacagtgagacggacatggtgcagcagatccgggctctagacagcgacatgcaaaccctggtctatgagaactacgataagttcatccccgccacagaaattgacaaacagcataaaactgtatga

SEQ ID NO: 117670 - DNA, 720 bp, Homo sapiens
ctgcagcaatcagagctgtccccccaaagaagcaagggaaggggggccctggaaaagaaactcagcttggctgtcagagtttgcagcataaccagtgtgcttattgtaaagaaataggacagtggaagaacaaatgccctcagctcaaaagaaaacaaggtgactcagagcaggaggccccggacaaggaggaaagggccctgctcatcctggtagaagggttgatgagcttttgctgggacaccccacggcagtcgggtgtgccaagggaacggattgccctacgccgacacctggaggactgtgggtataaggtgtccaagaagaaagctcagatctgccgacagcagttgactctagcagacctgacatccgggaccaagcttgggcatcagtacactgggaactatacgtgcatgggagcagcttcatcaacacctaaggagagagaggtgcagggtatgcgtgataacctggacactgttgttgaagccagatcgatgccccagggcacttcagcccagaaagctgaactcattgctttcattcgggccttagaactcagtgaggcccttgccaaaacggtgaggcagcgatgtgtcagctgccgacagcatcatgcgaggcaaggtccagccgttccacccggcatacaagcttatggagcagccccctttgaagatctccaggtagacttcacagagatgccaaagtgtggag

SEQ ID NO: 117671 - DNA, 1032 bp, Homo sapiens
atgggctcctgcatggcccgagcctccccaatgggcgccaccccctgctttgcggcggtgggtcccatcgactgccaggctgaggagtgccggcacacagtgtgggactggtgggtagctttgcctaccgccgctgtgggggatccaatagggcagcccatccagtatgctcgctccacctgcgaggccggcgtgggtgagctccacatccaggatgccctgccggaggaccatggcacctacacctgcctggctgagaatgccttggggcaggtgtcctgtagcgcccgggtcaccgtccgtgagggcacgtcccctggcccaaaggggaagactggccactgtgggctgggcagtgtcagtcccttagggatgaaggaactggcactgatggagaatgtggccgagcctggctccgtgaagctctctgccaggactgtccaggtccagccctctcttgcccttagtgtggcaccaggccatggtggggagcatggatgtggagccagcggcctgggtgttgatgaccttctgctgggacaccccacggcagtcgggtgtgccacgggaacggatgccccacaccggcacctggaggactgtgggtataaggtgtccaaaaaaaaagctcagatctgccaacagcagcatgatgcgaggcaaggtccagccgttccgcccggcatacaagcttatggagcagccccctttgaagatctccaggtagacttcagagagatgccaaagtgtggaggtaacaagtatgtactagttcttgggcgtacctactctgggtgggtggaggcctatccaacacgaactgagaaaactcgtgaagtaacccctgtccttcttcgagatctgattcgtagatttcgaccgcccttatggatcggctcagacaacgggcctgcatttttggctgccttggtacagaagacggcaaagggtattcagaacaatattacaggaggggtgtacaccctctgcgatattgacagtcatatcatcctctttcgctctggatattag

SEQ ID NO: 117672 - DNA, 1761 bp, Homo sapiens
atgaagatccgcagaaggttcccctccagccttcagctcagtgctgatctgcaagtacctgtgaggaaagcaccgaggcagggagtgagccaggagaaaagaacaaaaccatccctggagctcatgatatcaggaacaatatcgcaggaggatataaggaacaatgtcacaagggggtgtacaccccctgcgatacagagggtaatatcttcctctcccctgctggctattaggaacaatgtcacggaaggggtgtacaccccctgcgatactggggggcgtgtacacctacctgtgatattgctcctaatatccagggatggagggcatgatattagttttaatatcgcagtagatgtacactcaccctgtgacactgatcctaatatccagggggtagagtatgacatgactcccaacatagcaatgaatgtacagccacccggaacaatatcacagaagaggtgtacactccctgcgatattgggattaatatcgtacgcttcttccgtgaatattaggagcaatatcaccgggtggctgtacattgatcgctatgttggcagtcatgtcatactctacccgctgggtattaggatgggtgtcacaggagagatgaaaggcgaaaggcggagagggctccacgcagcaactaagtggctagaggaacatgcaccagctgattatcaaaacccccaagagtatggaaggacccagttaccaggaacccagccccagttggacccacatgaaagagaggatatgcaaaggctaaaccgagacagggaagctctcttggaaggattcaagaggggagctcagaaggccacaaacgttaacaaggtctctgaggtcattcagggaaaagaagaaagtccagcacaattccaccagagactgtgtgaggcctgtgctaagcaggtgttggtaaacggggacgcagtaagccgcgaggaaaagcgcaaagagaatgaacgtcaggcccggcgaaacgccgacctgttggttagctgcagcaatcagagcggtccccccaaagaagcaagggaagagctatggaccaaggactacaggccgggacaggatttgcgcttgcttagtcaagctaccctgactttccatccaacagtacctagcccgtccacattgttggggttgctgccagctgaggacagctggttcacctgcttggacctgaaagacgctttctttcctatcagatcagcccctgagagccagaagctgtttgcctttcagtgggaagatccggagtcagcccttgccaaaacggtgaggcagcgttgtgtcagctgccgacagcatcatgcgaggcaaggtccagccgttccgcccggcatacaagcttatggagcagccgcctttgaagatctccaggtagacttcacagagatgccagagtgtggagggaataagtatttaccagttcttgggcgtacctactctgggtgggtggagacctatccaacaagagctgagaaagctcgtgaagtaacccgtgtgcttcttcgagatctgattcctagattggaactgcccttccggatcggctcagataacgggcctgcgtttgtggctgacttgctacagaagacggcaacggtattggggatcacacggaaactgcatgccgcctcccggcctcagagttccggaaagggtattcagaacaataggacaggaggggtgtacaccccctgtgatattgagagtcatgtcatcctctttcgctctggatattag

SEQ ID NO: 117673 - DNA, 831 bp, Homo sapiens
agggtatgcagtgataactctggacactgttgttgaaaccaggtcgttgccctaggccacttcagcccagaaagctgaactcaatgctttcatttgggccttagaactcagtgagggtgagactgtcaacacttacactgattctcggtatgtctttttaacccttcaagtgcatggagtgtgatagaaagaaaagggcctattgaattctggggggaaagacagaaaatatccacaagaaatcttgcaatgattagaagcagtacggaaaccccacaaggtggcagttaggcattgcagaggacaccagcgagcttccaccttgctgtgtttggggaattcccgcgctgagtcagaggctcgaaaagcagcaactgcccccttccgggcatcagtcacagcccccatgctccctcaagcacctgatcttgtacctacttattctaaagaagaaaaggactttctccaggcagagagaggacaagtgatggaggaaggatgaattcggtaaccggatgggagagtagctgtgccacagctgctaggagctgcagttgtactggctgtgcaagaaaccacccatcgagatcaggagtcactggaaaagttgttaggctggtatttctacatctcacttctgtcagcccttgccaaaacgatttcgaccgccttacggatcggctcagacaacgggcctgtgtttttggctgccttggtacagaagacagcaaagatattaggaaaaaatgtcactggggatgtgaacagccctgcgatattgagagtagtatcatcccctccccccttgcatattgggaaacaacatcacag

SEQ ID NO: 117674 - DNA, 2379 bp, Homo sapiens
atgaggggagctcagaaggccacaaacgttaacaagctctctgaggacattcagggtaaagaagaaagtccaacacaattctacgagagactgtgggaggcctatcgtatgtatactccctttgatcctgatagccctgaaaatcagcgcatgattcccatggctttagtccgtcaaagcgcagaagacatgagaagaaaactgcagaaacaggctgggcttgcagggatgaatccatcccaattactagaaatagctagccaggtgtttgtaaacagggatgcagtaagccgtaaggaaaacggcaaagagaatggaggtcaggcccggcgatatgccgacctgttttcacggaccaagaactaccagccggtacaggatttgcgcttgcttcatcaagctaaactgactttccatccaacagtacctaacccgtccacattgttggggttcccgccagctgaggacagctggttcacctgcttggacctgaaagatgctttctttcctatcagattagcccctgagaggcagaagctgtttgcctttcagtgggaagatccggagtcaggatggcccccctgttggagggccttggcagcaactgccctgctagtacaagaagcaaataagctgactcttgggcaaaaactgaacattaaggcctcccgtgctgtcgtgactttaatgaatactaaaggacatcattggctaacgaatgccacactcaccgactaccagactttgctctgtgaaaatccccgtataaccattgaagtttgtaacaccctccaccccgccaccttgctcccggtatcaaagagccctgtcaagcctggttgtgtagaagtgttggactcaattgactctagcagacctgacctctgggaccagccttgggcatcagtagactgggaactatacttggatgggagcagcttcttcaacccccaaggagaggtggagggtatgcaggggggacaccagcgagcttccaccttgctgggtttgcggaattcccgcgctgactcagaggctcgaaaagcagcatcttcccccttctgggcatcagggctccctcaagcacctgatctgggacctacttcttctaacgaagaaaaggactttctccagcatgatatgaggcaaggtctagctgttctgcccggcataagagcttctggagcagccccctttgaaggtctccaagtggacttcacagagatgtcaaaatgtggaggtaacaagtatgtagtagttcttgggcatacctactctgggtgggaggaggcctatcaaacacgaacagagaaatctcgtgaagtaacccctgtgcttcttcgtgatctgattcctagatttcgacggcctttagggatcggctcagacaacgggcctgcgtttttggttgccttggtacagaagacggcaaaggaagattttcacaggggtgtgttcaccccctgcgatattgggagtaagatcatcctctccacccaggaaatgactaacaaggtcatggggatgtgtactccgcctgcgattttgggagtaatgtcatcctccccaaacctggatgttagcaaccagatcacaaaggggttgtacacaccctgcgacattggatgtaatatgatcctctcccgacctggatacagagaaagataccacaccgcggaggatccagaactgcagccgctcctcgctttgctgtccctgtccctgtccatgcatctggtcatggtgctgaggaacctgctcaacatcctggctgtcagctctgactcccccctccacacccccacgtacttcttcctctccaacctgtgctgggctgacatcggtttcacctcggccacggttcccaatatgattgtggacatgcagtcgcatagcagagtcatctctcatgcggactgcctgacacagatttccttcttgctcctttttgcatgtatagaaggcatgctcctgactgtgatgacctatgactgctttgtagccatctgttgccctctgcactacccagtcatcgtgaatcctcacctctgtgtcttcttcgttttggtgtcctttttccttagcctgttggattcccagctgcacagttggattgtgttacaattcaccatcatcaagaatgtggaaatctctaattctgtctgtgacccctctcaacttctcaaacttgcttgttctgacagcgtcatcaatagcatattcatgcatttccataatactatgtttggttttcttcccatttcagggatccttgtgtcttactataaaatcgtcccctccattcttaggatttcatcgtcagatgggaagtataaagccttctccacctgtggctctcacctagcagttgtttgctga

SEQ ID NO: 117675 - DNA, 2692 bp, Homo sapiens
atggtgtcagacatccggaaagaagacgggatgaatgttttacctctgaagtacatcccaaatgtgggagttaacttcagctttgctggggtctatttggccagtgaaactctgcctggttccttcgcacatccggaagccacttcacggggggccgtcgcaactggaaccacacacttggcatcggcggttgagccaaatggggactcgtggtgcaagcaacgctccccacgtgttagcgtgcattatattcggatcaatatcaccggctgggtgtgcacctgctgcgatattgaacgtaatatcatgctctctccctccctgaacattaggaacaatatcacagctcgtttacgacccaaaacggggacacaaatgcccctgagagagcagcggtatactgggatagatgaaaatgctcatgtagtggagagacgtgtttttgggtaccagcccttcacctgcgtcgaccttctcaactggaaaaacaatacatcgccctataccgaaaagccacaagccctaattgatttgctccaaactgttatccagacccacaaccacacctggaccgattggcaccagttgctcattttcctctttaacagtgaagaaaggcagagagtcctccaagcagcaactaagtggctagaggaacatgcaccagctgattatcaaaaccccgaacagtatggaaggacccagttgccaggaaccgacccccagttggacccacatgaaagagaggagatgcaaaggctaaaccgagacagggaagctctcttggaaggattaatgaggggagctcagaaggccacaaacgttaacaagctctctgaggtcattcagggaaaagaagaaagtccagcacaattctacgagagactgtatgaggcctatcatatgtatactccctttgatcccgatagccctgaaaatcagcgcatgattcacatggctttagtccatcaaagtgcagaagacatgagaagaaaactgcagaaacagactgggcttgcagggaagaatccatcccaattactagaaatagctagccaggtgtttgtaaacaggtatgcagtaagccgtaaggaaaacggcaaagagaatggaggtcaggcccggccacacgccgacctgtttgtcagctgcagcaatcagaggggcccccgcaaagaggcaagggaaagggggccctgggaaagaaactcagcttggctgtcagagtttgcagcgttgatgaccttctgctgggacaccccacggcagtcgggtgtgccaagggaacagttgtcctacactggcacctggaggactgtgggtatcagttgtccaagaagaaagctcagatctgccgacagcagactgggtctctaaaggatggcccccctgttggagggccttggcagcaactgccctgccagtacaagaagcaaataagctgactcttgggcgaaacctgaacataaaggcctcccgtgctgtggtgatgaatactaaaggacgtcattggctaacgaatgccaggctcaccaagtaccaaactttggtctgtgaaaatccccgtataaccattgaagtttgtaacaccctacaccccgccaccttgctgccggtatcagggagccctgtcgagcctgattgtgtagaagtgttggactcaattgactctagcagacctgagctccgggaccagacttgggcatcagtagactgggagccacacgtggatgggagcagcttcttcaacccccaaggagagagaggtgcagggtatgcagtgataactctggacactgttgttgaaaccaggtcgttgccccaggccacttcagcccagaaagctgaacttaatgctttcatttgggccttagaactcagtgaggaggatccagaactgcagccggccctcgctttgctgtccctgtccctgtccatgtatctggtcacggtgctgaggaacctgttcagcatcctggctgtcagctctgactgccccctccacacccccatgtacttcttcctctccaacctgtgctggcctgacatcggtttcacctcggccatggttcccaagatgattgtggacacgcagtcgcatagcagagtcatctctcatgcgggctgcctgacacagatgtctttcctgctccttgttgcatgtatagaaggcatgctcctgactgtgatggcctatgactgctttgtagccatctgtcgccctctgcactacccagtcatcgtgaatcctcacctctgtgtcttcttcgttttggtgtcctttttccttagcctgttggattcccagctgcacagttggattgtgttacaattaaccatcatcaagaatgtggaaatctctaatttggtctgtgacccctctcaacttctcaaacttgcctgttctgacagtgtcatcaataacatattcatatatttcgatagtactatgtttggttttcttcccatttcagggatctttttgtcttactataaaattgtcccctccattctaaggatttcatcgtcagatgggaagtataaagccttctccacctgtggctgtcatctagcagttgtttgctggttttatggaacaggcattggcatgtacctgacttcagctgtgtcaccaccccccaggaatggtgtggtggcatcagtgatgtacgctgtggtcaccccatgctga

SEQ ID NO: 117676 - DNA, 1390 bp, Homo sapiens
atgacagttgggggtaaagacattgattttcttgtagataccagtgctgaacattcggtagtaactgcctcagtcgcccccttatccaaaaagactattgacatcatcggagccatgggagtttcagcaaaacaagctttctgcttgccccagacttgtactataggaggacataaagtgattcatcagtttttgtacatgcctgattgtcccttgcccttgttgggaagagacttgcttagcaaactgagagccactatctcttttacagagcacggctctttgctgctaaagttacccggaacaggagtcattatgacccttatgctcccccgagaggaggaatggagacttttcttaacagagccgggccaagagataagaccagctctggctaagcggtggccaagagtgtgggcggaagacaaccctccagggttggcagtcaaccaagcccccgtgcttatagaagttaagcctggggtccagccggttaggcaaaaacagtacccggtcctcagagaagctcttgaaggtatccaggtccatctcaagtgcctaagaacctttagaattatagttccttgtcagtctccatggaacactcccctcctgcctgttcccaagcctgggaccaaggactacaggccggtacaggatttgcgcttggttaatcaggctacagtgactttacatccaacagtacctaacctgtacacattgctggggttgctgccagctgaggacagctggttcacctgcttggacctgaaagatgctttctttagcatcagattagcccctgagagacagaagctgtttgcctttcagtgggaagatccagagtcaggtgtcactactcaatacacttggacccagcttccccaaaggttcaagaactcccccaccatctttggggaggcgttggctcgagacctccagaagtttcccaccagagacctaggctgcgtgttgctccagtacgttgatgaccttttgctgggacaccccacggcagtcgggtgcgccaagggaacagatgctctactccggcacctggaggactgtgggtataaggtgtccaagaaaaaaagctcagatctgccgacagcaggtatgttacttgggatttactatccaacaggggctcgagacgcagcccaggatcagaaagaaagcaggtcatttgccatctagcagatcctaagagctgaagacagttgagagaattcttaggagctgtggggttttgtagactgtggatcccaaactttgcagtattagccaagactttgtatgcggtcaccaagggggcggggaccgcgaacctttggaatgcagatcccaacaacagcaagtctttcatgagttaaaggaaaaacttctggca

SEQ ID NO: 117677 - DNA, 1863 bp, Homo sapiens
atgggccagggcgtgaaacgagggtggcagtacagaaagaatccaaggaaaaatcggggagcaatatcactccccacgacccgccttagatatgacgaagcacatcgcagggggcccttcacctgcgtcgaccttctcaactggaaaaacaatacaccgccctataccgaaaagccacaatccctaattgatttgctccaagctgttatccagacccacaaccacacctgggctgattggcaccagttgctcatgttcctctttaactgcgaagaaaggcggagagtcctccaagcagcaactaagtggctagaggaacatgcaccaactgagtatcaaaacccccaagactatggaaggacccagttgccaggaaccgacccccagttggacccacatggaagagaggatatgccaaggctaaaccgagacagggaagctctcttggaaggattaatgaggggagctcagaaggccacaaatgttaacaagctctctgaggtcattcagggagaagaagaaagtccagcacaattctacgagagactgtgggaggcctatcgtatgtatactccctttgatcccgatagccctgaaaatcagcgcatgattcccatggctttagtccgtcaaaccccggaagaaatcacaggaaaactgcagaaacaggctgggcttgcagggatgaatccatccccaattactacaaatagctggccagaagcttatggagcagccccctttgaaggtctccaggtggacttcacagagatgccaaagtgtggaggtaacaagtgtgtactagttcttgggcgtacctactctgggtgggtggaggcctatccaacacgaactgagaaagctcgtgaagtaacccctgtgcttcttcgagatgtgattcctagatttcaaccgcccttacagatcggctcagaaaatgggcctgcgtttttggctgccttggtacagaagacggcaaagatattaggaaaaaatgtcactggggatgtgaacagccctgcgatattgagagtagtatcatcctctccccccttgcatattgggaacaacatcacagaggatccagaactgcagtcggtcctcgctttgctgtccctgtccctgtccctgaatctggtcacggtgctgaggaacctgctcagcatcctggctgtcagctctgactcccccctccacacccccatgtacttcttcctctccaacctgtgctgggctgacatcggtctcacctcggccacggttcccaaggtgattctggatatgcagtcgcatagcagagtcatctctcatgtgggctgcctgacacagatgtctttcttggtcctttttgcatgtatagaaggcatgctcctgactgtgatggcctatggctgctttgtagccatctgtcgccctctgcactacccagtcatagtgaatcctcacctctgtgtcttcttcgttttggtgtcctttttccttaacctgttggattcccagctgcacagttggattgtgttacaattcaccatcatcaagaatgtggaaatctctaattttttctgtgacccctctcagcttctcaaccttgcctgttctgacagcgtcatcaatagcatattcatatatttcgatagtactatgtttggttttcttcccatttcagggatccttttgtcttactataaaattgtcccctccattctaaggatgtcatcgtcagatgggaagtataaagccttctccacctatggctctcacctaggagttgtttgctggttttatggaacagtcattggcatgtacctggcttcagccgtgtcaccaccccccaggaatggtgtggtggcatcagtgatgtag

SEQ ID NO: 117678 - DNA, 2057 bp, Homo sapiens
ccagagaagcccttcaaggtatccaggtccgtctcaagcacctaagaacttttggaattattgttccttgtcagtctccatgcaacactctcctcctgccttttcccaagccacggaccaaggactacagtcaggtacaggatttgcgcttgcttcatcaagctacactgactttccatccaacagtacctaacccgaccacattgttgggtttgctgccagctaaggacagcgggttcacctgcttggacccgaaagacgctttctttcctatcagattagccccagagaggcagaagctgtttgcctttcagtgggaagatccggagtcaggtgtcactactcagtacacttggaccgggcttccacaagggttcaagaactcccccaccatcttcggggaggcgtgggctcgagacctccagaagtttcccagcagagacctaggctgcgtgttgctccagtaggttgatgaccttctgctgggacaccccacggcagtcgggtgtgccaagggaacagatgccctacaccggcacctggaggactgtgggtgtaaggtgtccaagaagaaagctcagatctgccgacagcaggccttggcagcaactgccctgcgagtacaagaagcaaataagctgactcttgagcaaaacctgaacataaaggcctcccgtgctgtggtgactttaatgaatactaaaggacatcattggctaacgaatgccagactcacccagtaccagacttggctctgtgaaaatccccgtataaccattgaagtttgtaacagcctacaccccgccaccttgctcccggtatcagagagccccgtcgagcctcgttgtgtagaagtgttggacacaattgactctagcagacctgacctccggggccagccttgggcatcagtagactgggaactatacgtggatgggagtagcttcttcaacccccaaggagagagaggtgcagggtgtgcagtgataaccctggacactgttgttgaagccagatcgttgtcccaggccacatcagcccagaaagctgaactcattgctttcattcgggccttagaactcagtgaggaagaaaaggactttctccaggtagagggaaggacaagtgatggaggaaggatggattcggttaccggatgggagagtactgtgccacagctgctaggagctgcagttgtactggctgtgcaagaaaccacccatcgacatcaggagtcactggaaaagttgttaggccggtatttctacatctcgcctttgtcagctcttgccaaaacggtgaggcagcggtgtgttacctgccgacagcatgatgcgaggcaaggtccagccgttctgcctggcataggagcttatggagcagccccctttgaaggtctccaggtggacttcacagagatgccaaagtgtggaggtaacaagtatgtactagttcttgtgtgtacctactctgggtgggtggaggcttatccaacgctaactgagaaagctcgtgaagtaacccgtgtgcttcttcgagacctgattcctagatttcgaccgcccttacggatcggctcagacaaggggcctgcgtttttggctgccttgttacagaagacggcaaagatgggcacacgcagtgacacacagctagcacacataggcacagtcctgcgggacatccatgtcagtgtctgttctgatgggccgaatctaagaacaggtttgaacgtcatccttgggggtgtggagtggcagagcactcctgggaatcttgtaagaagacaaggagagacaggacttcatcttcacatctaccactggtggcaggctgtggccatcttccccgtgtacctgggctcgagcctgcacatgaaggttggtggacggtcctttgaacaggaagaagacacggagcacattcctgttagctacgacagagaggggcaggaatgtgacacagaactcaagggacaggaaggagatgagttggaggctgggtcagtggtccctgccagtgatgctggtgactcacatgacgatgttgatgtgtag

SEQ ID NO: 117679 - DNA, 1876 bp, Homo sapiens
tcactgctcctccggcccgtctcccccctgcgcctgttcgtacgggcagggccggcggccgagtccagcgggctcggggccaggcctgggccctgcgggcggcgcctcctcctccgcgccgtccccatgctcgccctccgcgtcgctctcgtccgagttgtcctcctccaagtagcggtaaccgcgcaccttgtgctggggccgcgggatgcggggctggcgcggggccacgccccggcgcagcttctgctccatccgcaggtaggagaccgcggccgccaccagcgtcaccagcagcaccgccagcttagccttcatgtgcaggctcgagcccaggtacacggtgaagatggccacagcctgccaccagtggtagatggtgaagatgaagtcctgtctctccttgtcttcgtacaagattcccaggagtgtgctgagtccagtcttgttcagggcactgcccacaccccaaagggcagctgccacatagaggatccagctgtgttgcaggacccgaggcacaggggcccagaaaaagaggatgaaggtgagcagcaggtgcacccctgctccggccaccaggggcaccggggcgtggcagccacaggcccagcaggccccaggagtgagggcgactgaggcgcccaggctgtaagcccacgatgaggtaagccagcccgctccagccccaccgagcacacgccatagcccaaggcgataaccagtggcaggcaaagagcacctcgaagccgctgtagataaagaaaggcacgaggtggcgcaggcggtagtcacgcacgtgcttgaagggcagctggaagatgttgccccagcccacgctgcgcagatcgatctcctccgtgggccggtaagcggctccgcacaaacccagcacccaggccatgccatccgatccagaccctttctcgcagactcggtccccagaaccacactctgcttcactgactgtccagcagcatggccaggaagccactgccatgagcacgctctccaccacaatgaggtttccgctccgcgggagcgtccgcagaaccgtcttgttgaagccgctgaggatcccgtggctgttggtgccgcagctctgcacattgtacagcgtgtggttcaggtcatacaggtagtggttcaggaaataaatcatgggcagctgggcgcaggcgaagctcagatggaagaagctgtagaagatggcttggaagaccaggagatagggcgcgtgggagccccgcggaggccgctgcttcatcccctgcccatcctgctccttgtagtgggagtactcatggtacttctgcgccatcctggtgatgtagttgcccatggaagcccaaagaggcacgatggccatgcccagggccacagccgagggcacaagcgtgtagtagcgctcccagtagttggtggagacaaagagggcgtagatgcccacagcgaggaacatcatccacttcgttccaaaaaacctgatgagcacaggtgtgtagagcagggcggcgatgggagtcacgttgatgcccatcagcattttgctgtcgatgtcgggcagccccatgttgccatacttcacctcgcggtaggtctcgtcgtagtgcaggatcagctgcatctgcaggaggcccaggtagacgccgtaggtgagcatgcccccggcgctggcagccagcacgttcttgagcacgcccaggcgcttgcggcggtagtagcggcgctcctcctcctcctcgttgtagttggggtacgcgcccaccagctcgtccagcggggcctcgggcccgtccgggaccccgagcaggtcctcgtcgccctgcggccccgcagcccccgccatcgggtagagcggcggctccgcctccat

SEQ ID NO: 117680 - DNA, 351 bp, Homo sapiens
tcaaagttcttctcttgaaggctttttcctgtggcactggcagatggctgtgctatcttctggctgaggaacaagttccattccatcacgtacttcgggtttgctggactggcgctcggcatatttctgaaacgtgggtttaaagggaactgcgggagagcgagtgaggttctggccctccgagttgaccgcctgcaggtagaaatagcggaccggcaggacgacggccgcctgcagcccgggcccccacaccaggctccgcggcgcgctgaccagcacctccggggcccccgcggccaccagcagggcgaggcgcagctgcagcagcagggcccgcgggaggcggcgcat

SEQ ID NO: 117681 - DNA, 453 bp, Homo sapiens
atggcgaatgggaagcgccgccactgctgcgccacactcggccgggacctgcgccgcgccaccagctcccagcggcgccagctgcgctccctgcgggggccaaacctgcaggccccgccccctgcggcaggccccgccctcaccaatcaccaccggccacgcccgaatatggctcggtcagccccgccctcggagctcttcggccacacccccgaaagagctgccgtaggggccgacagaaacctcatacaggagagctctgggtggcatctggcagctgcccctctgggacgaagcttccagaggaaggatcaggcagcaatacttacttttctgcagtctctgctggagatactcagtcaaacattatctggaatggacctccagcaaactccaacagacctgcagctgaggggcccgactgttagaacaaaaactaacaaacaggaatag

SEQ ID NO: 117682 - DNA, 477 bp, Homo sapiens
ctatttagcaagtgctgctattttcagaaatatgtcttcggtggtttgcttggtttgtttcttttttacatcacagatttgcctgcaaacagataatgcaccatatacagtcctctctattaatgaaaacctttcagtgttgggctctatgttttcaaactttttaaggagctttctgaggtctacaaaagcttctgccaaacccttcattgttactcttcttaggagttcttttttctctgtttcctcttctcttgcctcttcttcagctatgcattcctgttccagttccaacagctcctcattcttcaattcctcaagaaccacctcaaagagctcctctacatcatcctcattcacacctagttggagtcgtttgctcttgagtgtcttcgtccagattccattcatacacgccttggtgaccatgccaaagttcttgatgcagtcatagtaagggaggagaccacccttcat

SEQ ID NO: 117683 - DNA, 594 bp, Homo sapiens
gtacatttctccttttccatgctgcactgcaccctggaattggcctgtatgcgctgcatcgagatgctcttgccctctgactgccagctgggtttggtccatgtggagcctggaatcaaaaccagagggagaagcgaccgcaaagcccgggagctgagtccgcggcgtgaagcggcggaggtcagcagcgagggggcagggccggcgctggcggccacggagcttgcgcgtcgctgggctcggaacccagggacgcgagccagcgctgggagctggcggagagacggctctgccatccggctcaggcagtgggcgcccgccccgcccccagcgcccacgcgactccggccccgaggctctcccgagcgcagcgttctggaagcgccgccgctaagcgtctgcgtctgcgcctgcgctgaccccagtcccggactcggtccgaggcgcgcagcccggagggggcggggccgagcccgaagggaaggcagtgcgcatgcgcggggcgagccggccggcactgtcacagctgagcggccgcgagatcggtccctgtccgcagggtcgggtagtggccccctcggggacagcgtgtga

SEQ ID NO: 117684 - DNA, 778 bp, Homo sapiens
tcatctccaacatttttcatgtctaatccaccgaggagatctcctgaaggctttgaagtctctgggcgcgtgaataaagatgtcaccctggcactcgccgtgcttcttaatgagcatgggtttgatgtggaagccgcagcccctccctatgccagcaaaacgctctccgtaggagctcattctccctcgaatctcagggatggccttgcattctgatgggcgcacatggtgatttagggaaagggaaagtccacagtccacactgtgggctccttgctccccgaggcatgggcctgctgtgggttggtacctgtgacccatggtatggtcctgcgcctcggcagctcggcttccagagcccggaaacggcgcgctgcttcgcacctcctctccgcgatgcagcccgttccttccgctgcttgactcacacggctgcctcctactcactggggatccgtctgcagctccttctccagggcagcggccggcagggctggcgggagcagggggcgcagagaggtcaggggcagttgaagtggggcctcgtgagccaggccgtgacggggctgggtcttgatcctggattgggggcctcccggaaggctcgaagcagggagtgctgtgtgttaagaagccctgtagctggctggagacctggaacctgtgctggtcgtcctgtaaggcaggggacctgggtccctccgctcctccccaggctccccatccaccccctccctcttggtccccgctgtctccattggcttctcctcccacgaaa

SEQ ID NO: 117685 - DNA, 1068 bp, Homo sapiens
atgcattcaggaacctttaacccacaagatttcgcctggcaaggcttaacgctgacacccgcagcggggatacacatccgtgagctggtggcaaagcagccgggtatggtcggcgtgcgcttaggcgttaaccaaacggggttgcgcgggctttggctatgtgcccgcagtgttaacgagccgggcaaagagattcggcatgcctgcaggtcaaaagttgttgctaatgaccccacagcggtgagaaaactcgaatactactggagccgtgatatatttagcgatcgagaagccagctacatgtcgcatgaaaaccacttcggctacgcggcctggccgccttttgcgcgaacaaggactggcagccattccgcgcctcgcgataaccaccagcccgccctggttatccaatcatcgaagacaaaaagctgcctgcacagcaaaaagcacgcgatgaatactggcgtacgctgttacaacgctgatgggatcgcagccacaactggcagcagaagtgatgccgtggttaagtacttaaccccagtcagtgctgaagagttatttttcgggcacggccaaaccggtaatgatggcacggaaaggaagccaaaagggaaaggcagggaaaaggtgagattcttggacttggagagaggaaaagagggaaaagtcgtggacttgccagagagggaaaggggagccgaaactgaagggcgaagtccgggcggtgcagagagtcggggtatagagcaggcaggtgttaatggcatgggaaggaagagtaagaagtggggcaagaaggtgtcgcggtacgaggggaaggtgagactcaagaaggtgccggctaagaagctggtgccggcgtggaaggagaaggtgtggggcgaggaaacaacgaagggcgaggaaagatcccgaggcgaagagacagttttcatcgagaaggggcagggcgaggaggaggggcgttaccagagggcgggacggggcgacgggcccgcgcgggaagaaccaatcgccgagaacccggggaaggaacgggtccataaagaccaagtggaggagtag

SEQ ID NO: 117686 - DNA, 735 bp, Homo sapiens
ttagctctgactgcgagaagctcccacccgcaaagggctactgtgccaaaagcgagcgtagtggccgccgcttcccccacaaaattccgtcactcgggagctgcgttgcagtggagaaacctgggtcccgtccgggcccaagggaggaggctcagcacggccgctcccgcagccccgtccaggcgcctcttccctccccctcctttccgcggcggtcgcggcggcggctggagcgggagccgggggcggcgaggggcggagccggggcggagccacggcgctggcggccccggcgacgacggcaggtgtggatggggcgaaggtgcgggaacgtccactcccgcgcgcccctctcggggaccagggcggcctcccaggaggagcttggtgagcagctgcgacctgtgcataacttggggcgccgccaggggctcgcaggttccacgtccggcgcggcagtgggcacacggcagtcgacacccgggtccgaggaccgccggcgcccgttggcgcccaaacgaggatgcgccgcggggtccggcgcatcccggagcgccggccgcccttggctcttcgcggaaccgccgcctcctcttgtccaaatctcaggtcgtcatcctggcccgaagtcacaggttcgctctctgtccctaaacctcgaggaaggagttgtgtgtgtccatgagcgtgttggcggagagcgctttcatacagcgatgtttgagttgagctcat

SEQ ID NO: 117687 - DNA, 792 bp, Homo sapiens
tcaaagctttgttgaccatctccaggatacgatggccagctgccttggagagccagtcactccaggtgacacggtttggtactggacgtccgcggtcccctctcccacgccgccccatactgggccccgtatccagccgccaccgctgctgcagcaagaaccgccccactgcctccgcgcagtgccattgtttaaagggacctcagcctgacttccaggagctacgcaagacttggccaagtcaatgcgcatggcaaggagagagccgcttctccccatcacagcgattcccagggttgtcgtagaaaccactccctgaggcttcgcaaagcaggagccctccgtagcagggcttcggtgtcggggctccgaggctccggcctgacttctccacggggtacacaggaacgtctccggacgccaggacctgaaatgggccgaccaggatgaggaaaccacaggcagaggccggggaagcagcgcggcatcccatcctcaggcctgcccggacggtgttcgggatcaagaggaccacactccagcccaggacaaaagccccacggtagcacattgtccggcaggagaggagcagacccacgtccaagaagaagggtgtacctttccacgcctcttctctgcgaaaagaagccacaccatgacacaatcttgaagaggaagccgggaatgggagacggcaacaatccctgtccctggaacgctggcctctatggacaagccacccgcttcgcacccctccccttatgcccgaggcggaggcacggcgccgtatcc

SEQ ID NO: 117688 - DNA, 342 bp, Homo sapiens
atggccctgcggctggaccggacgcggcggctgcaggcagagcaggaagagagcgcaggctgggcagcggcgtacgcttcggcgacgtcagcttccggggccgtggacgggggcgcgcccgagcctcctggaaacctccccaccaaggacctggggaacccaagagcgggacccggaacagaccgccgtgagagaggaggggcgccggccgggattcgcggcccggagctcgggaccgggaatatgaagaaattgcttctctctctaccaatttactaccatcttgctggagagaaagggcaggtggctaagattgttcgcattccttcagcagatgtgtag

SEQ ID NO: 117689 - DNA, 438 bp, Homo sapiens
tttcgtggcggaagcggagtgagtgactagatggtgactgatgtcgtaactagggggggcgagttggggcagcgacacgttcccccaggggaaagctcagggctcttttgcgggcagtgtggggaaagagagactcgagacccgtcctatcgtggaggagccgtcggttccgcttcagggccctcaagaatggggcccactggagtccccgtctggctgtgtttggagacctgggggctgacaacccgaaggccgtcccccggctgcgcagggacacccagcagggcatgtatgacgccgttctccatgtggcaacttctctaactacaaggctcgcttcagcatgccgggggataatgagggcctgtggtacagctgggatctgggtcccgcccacatcatctccttctccaccgaggtccatttctttctccatta

SEQ ID NO: 117690 - DNA, 422 bp, Homo sapiens
ctgcgcagggacacccagcagggcatgtatgacgccgttctccatgtgggagactttgcctacaacctggatcaggacaacgcccgtgttggggataggttcatgcggctcattgaacccgtggctgccagcctgccgtacatgacatgccctgggaatcatgaagaacgctacaacttctctaactacaaggctcgcttcagcatgccgggggataatgagggcctgtggtacagctgggatatgggtcccgcccacatcatctccttctccaccgaggtctatttctttctccattatggccgccacttggtgcagaggcagtttcgctggctggagagcgacctccagaaagccaataagaaccgggcagcccggccgtggatcatcactatggggcaccggcccatgtactgacgaaa

SEQ ID NO: 117691 - DNA, 783 bp, Homo sapiens
atgctgtgcagcactgctgtccccaaggcagagctgcttccaggtggcaacctcggtggtgccggggagcgggagaaggtgccggccaaccccgaggcgctcctgctcatggccagctcccagcgtgacatggaggactgggtgcaggccatccgccgagtcatctgggccccgctgggcggagcgctcaaggcttctcccctgccagagccccaggagcctgagaacttggatccccaaggcagaggaaatggcctccagccacagccaccctcccccacccctgctgatgggacagccacagagctgtttaccagaacaaaggcccgagcagctgccttatctagggagagcctgggctgctcagagctggcaggtccctgggccgtgggaatgccaggctctgttgggaccgggcctggggcggcgctggccggggcgggcgggcggcgggcaagacgctacctgcgcgcgtgccgggcattccagccgccgccgcgccgccgcgataggcgcgccatgggcctgatgccggccgcgcgggcctactccgggatgcagcgactgcccgcagacgtcctgccgactgctcgcctgctgctcagcccaccgccccacacgccggccatgcttccgtcggcgtctgccgccatccctgcctccgctgatagcgccccaacactagatactcatcgggcgcccatcgtcgacgcagattatatctatttatcagtcatctacacgcaaattgaagagggcgttaagctgctcttcggaacataa

SEQ ID NO: 117692 - DNA, 1396 bp, Homo sapiens
gcatcccctggtcgatcgatttcgcgccccgccctggtccagtgattgatcagcagtgattactgaggctttatttttccgcttggatgggaattaattctgggatggataaataatgcatcgaggtttatgtagtccaaggcgagccgtccgtccggagccaggagaggtagccgagggagcctgacgggtgacgccagcggccacggggccccgaacgagcaggacatgaggggcgactaggcgcgaggacgagcaaatgcaagtggatgacagcatgaacggccctgcggggctggccggacggctgcaagaacatgctgagcccaaagatcaggcaggccaggagggcccgctccaaaagcctagtgatgggggagcagagccggagccctgggcggatgccgtgccctcacaggctgggccccgtgctgaaggcgggctggctgaagaagcagaggagcatcatgaagaactggcagcagcgctggttttgtgctgcgtggggatcagcttttttactacaaggacaaagatgagatcaagccccaggtcagaagcctgacacaggtttcactgggcttaaatcaaggtgtcagtaggcctgaattccgttatggaggtcaggcaccgtgtatgaaatctaacaatgcgctcatcgtcatcctcggcaccgtcaccctggatgctgtaggcataggcttggttatgccggtactgccgggcctcttgcgggatatcgtccattccgacagcatcgccagtcactatggcgtgctgctagcgctatatgcgttgatgcaatttctatgcgcacccgttctcggagcactgtccgaccgctttggccgccgcccactccacaggctcaaccccctatttctatacagctgtcctctcattggcaacaccaaggccagcttggaagataccaccctgtgcccatcatcctggggcaacccagtgccctcgtctggcagagacctccccctcaagactgagcagagtgtggagggagcccatgtcaataatagagccgccagggggttctcgcgcccagcagccgcacgtgatgggagtgacgcgcaggacggaaacagaggtggtgctggggagcgggagaaggtgccgggcaaccccgaggcgctcctgctcatggccagctcccaccgtgacatggaggactggcccctaaagctcttactctcagggctgcacagctcaggccctgagcctgtggaagtccagctgggagccatgaatgagcccagggcctggggcctgagacctggggtagacttgcagcttaagctggaaaccctggtggagccctcaaggatcttcaggtctcagagctcatggcctcttccaaaccccagggagtgcccttttcagg

SEQ ID NO: 117693 - DNA, 786 bp, Homo sapiens
atgaacggccctgcggggctggccggacggctgcaagaacatgctgagcccaaagatcaggcaggccaggagggggatgccagcaatacaaagctgtcagatcctgtccaaccctcacaagcacctgtctccatggcaggaaggggggcagcttttgggaatctcagtgcatcatgttcccaggacccagaaacaggactgccatatagcaaggacatgtttcactctttcgtctcagcctctaactcctgtaagcagggaccctgcctagcccagggtgtcacacctgaacataatgttgcatcagccatggcaggctccccagaccacctctctggtttccgcaccacaccacttcctctcaagatgccatcaaatgggcctgagggcagtcgagcctgggcaggtggcctgtgcccgaatccatctctgagccccagccctcgggcccagttcatttcattccctttggtgcggcttatggcaggtggtgccggggagcgggagaaggtgccggccaaccccgaggcgctcctgctcatggccagctcccagcgtgacatggaggactgggtgcaggccatccgccgagtcatctgggccccgctgggcggaggtcggtgtccatatgaagtggtcatgaaaagatctttcataatgggatcaccatggcattggggccagggccaccgactccctgctgaatgtggagactgggagtctgaaagctggctgggctctgaccacacaagctatggacgtcctctttctccctatggtgtttga

SEQ ID NO: 117694 - DNA, 418 bp, Homo sapiens
tttcgtcgggagccaccccgcggcgcggctgcggctgcggctttgcctcggcgcaacagggaaaataaaagaagcaaaaacaggccctgctgtgagggaccacgaggcagtgccaggatgaaagagttggagtaacctagaccattgcaggtactgtgccttctgcctgaaatgtgctcacctcgcctcgctgactcctactcgccagttagtgttcggcccatttctgcccccgtgagatttcttcacagatgttgccctcccccatttgctgagtttcctgcatgccggctccttcagcactcaagggtacctctttgattctgcttctcacagggctgaggccccagcttgtggccaccacaacgtatcaagctatctccagggttgggctcaggactcaaagctgacgcagctg

SEQ ID NO: 117695 - DNA, 448 bp, Homo sapiens
tttcgtccgggagccaccccgcggcgcggctgcggctgcggctttgcctcggcgcgacagggaaaataaaagaagcaaaaacaggccctgctgtgagggaccacgaggcagtgccaggatgaaagagttggagtaacctaggtgattctgagtgaatcagtcaggaggccttcctggaggggaccattgcaggtactgtgccttctgcctgaaatgtgctcacctcgcctcgctgactcctactcgccagttagtgttcggcccatttctgcccccgtgagatttcttcacagatgttgccctcccccatttgctgagtttcctgcatgccggctccttcagcactcaagggtacctctttgattctgcttctcacagggctgaggccccagcttgtgggcaccacaacgtatcaagctatctccagggttgggctcaagactcagag

SEQ ID NO: 117696 - DNA, 3393 bp, Homo sapiens
gtcctaccgagggaggagctacaggccaccgcgaccagcagagagcgaaggcaggagggaccagcctggcccagccccttcattttactgtcgggggtagtgaggaggaagaggaagaggcgaaggctggcggaggaggaggacaattatatagagtctgttgtgaaatttagatctatgttcaacaagaacaacagcaacaaactcagaagcactcctcgctaccgccggggagacccaggatacctaaactttactgagttggggccactcaagcctgaacagaaggatcagtggagccaacatagaccagatgaagaagctgtggtggatcagggtgggaccagtacaattctcaacattcactatgaaaaagaagagctggaaggtcacagaactctgtatgtgggagttcggatgccgcttggccggcagagccatcggcatcaccgcactcatggccagaagcaccggagacgagggcggggcaaaggagccagccagggggaggaaggcctggaagccctggcccacgacacaccatctcagcgtgttcagttcattcttggcaccgaggaagatgaagagcatgtgcctcatgagctgtttacagagctggatgagatctgtatgaaagagggagaagatgctgagtggaaggaaacagccaggtggctgaagtttgaagaagatgttgaagatgggggagaacgctggagcaagccttatgtggcaaccctttcattgcacagcctgtttgagctaaggagctgccttattaatggaacagtcctcctggatatgcatgcaaatagcatagaagaaatttcagacctgatcctggatcagcaagaactgtccagtgacctgaatgacagcatgagggttaaagtgcgggaagcccttctcaaaaagcatcatcatcagaatgaaaagaagagaaacaacctcattcccattgttcgctcctttgctgaggttggcaagaagcagtctgatcctcatttgatggataaacatggtcaaaccgtgtctcctcagtctgttccaactacaaatcttgaagtaaaaaatggagtgaattgtgaacatagtcctgtggatttaagcaaggtagaccttcatttcatgaaaaaaattcctactggggccgaggcctccaatgtcctggttggagaggtggatattttggaccgtcccattgttgcctttgtgaggctgtctccagctgttcttctctcaggcctaacagaagtgccaatcccaacaagatttttgtttatcttattgggtccagtagggaaaggtcagcagtaccatgagattggcagatccatggccaccatcatgacagatgagatttttcatgacgtagcatataaggcaaaagagcgagatgatctcctggcggggattgatgagttcctagaccaggtgacggtgctccctccaggagagtgggatccctccattagaattgagccacccaaaaatgtcccttcccaggagaaaaggaaaatgcctggagttccaaatggaaatgtttgccacatagaacaggaaccacatgggggtcacagtgggccagaacttcagcgcactgggcggctatttgggggcttggtgctggacatcaagcggaaggccccctggtactggagcgactaccgagatgcactcagcttacagtgtttggcttcctttctgttcctgtactgtgcctgcatgtcacctgtcatcacctttgggggactgcttggagaagccactgagggacgcataagtgcaattgaatccttgtttggagcttccatgactgggattgcttattccttgtttgcgggacaggctctcaccatcctgggaagtactggaccagtgcttgtgtttgaaaagattttgttcaaattctgcaaagactatgctctttcatacctctccctgcgagcttgtattggactgtggaccgctttcctgtgtattgtccttgtggcaactgatgccagttcccttgtctgctacattacccgtttcactgaagaagcatttgcctccctaatttgcattattttcatctatgaagcaatagaaaaactgattcacctggcagagacctaccccatccacatgcacagccagctggaccaccttagcctctattactgcaggtgtactctgccagagaatccaaacaatcacactctccagtactggaaggaccacaacatcgtgacagcagaagtccactgggctaacctgactgtcagtgaatgccaggagatgcatggagagttcatgggatctgcgtgcggccatcatggaccctacactcctgatgtcctcttttggtcctgtattctctttttcaccaccttcatcctctcaagcaccttaaagacgtttaagacgagccgttatttcccaaccagagtacgctccatggtgagtgactttgctgttttcctcactatcttcacaatggtgattattgattttttgattggagtcccatcaccaaagcttcaagttcccagtgtgttcaagccaacaagggatgatcgcggatggattattaatcccattggccccaatccctggtggactgtgatagctgcaattatcccagctcttctctgtactatcttgatattcatggatcagcagatcacagccgtcattattaacaggaaggaacataagctcaagaaaggctgtggctaccacctggacctactgatggtggccatcatgctgggtgtctgctccatcatgggcctgccctggtttgtagctgcaactgtcttgtccatcacacatgtgaacagcctcaagctagaatctgaatgctctgctcctggagaacagcccaagttcctgggcatccgagaacagagagtgacaggccttatgatctttgtgctgatgggctgctcagtcttcatgacggctatcttaaagtttattccaatgccagtactctacggagttttcctttacatgggagtttcttcactacagggaattcagttctttgatcgtctaaagctctttgggatgcccgcaaagcaccagccagatttcatctacctgcggcatgtgccgctgcgcaaagtgcacctcttcaccctcatccagttgacctgtctcgtcctgctctgggtcatcaaggcatctccagctgccattgttttcccaatgatggttttggccttggtctttgtcaggaaagtcatggatctctgtttctctaagcgagagctgagctggctagatgatctcatgcctgaaagcaaaaagaagaagttggatgatgccaaaaagaaggccaaggaggaagaggtcatagtccttgcaccaactgtatacctgggggcctcaaattacagaacatag

SEQ ID NO: 117697 - DNA, 766 bp, Homo sapiens
tcacgggggcagaaatgggccgaacactaactggcgagtaggagtcagcgaggcgaggtgagcacatttcaggcagaaggcacagtacctgcaatggttgtcctttctgctttcaaaaccttcatttgaaattgggcctttatcaactagcatctggaggatcagcaggagctgcctgccagcctcctttgcctcgggcccctctctctctttcacaatcaggacagccgtattcatattccttgagcactgtttgacgagggaggagctacaggccaccgcgaccagcagagagcgaaggcaggagggaccagcctggcccagccccttcattttactgtcgggggtagtgaggaggaagaggaagaggcgaaggctggcggaggaggaggtgagaacgaggactcggcagaagcgagatcccccgaaaggaagtcgagcacttcatgcagctgggctctgctgtggcagggccctgactgctgcctcctggttgggcctgcaggtgagtgcttccacggctggctggagcccctcctggctcgaatcgctgaggacaagacagtggtggtgagcccagacatcgtcaccatcgaccttaatacttttgagttcgccaagcccgtccagaggggcagagtccatagccgaggcaactttgactggagcctgaccttcggctgggaaacacttcctccacatgagaagcagaggcgcaaggatgaaacctaccccatcaagcagcctgttggtgttattggagact

SEQ ID NO: 117698 - DNA, 789 bp, Homo sapiens
atgaagataagcactgtgcagacaacagaaaaggacaagacagcaggtgactgggataggatagaagaggacaggaatggcctccctgaagatgtgccacttgagtgggacctgagcattgtgctggggcagccaggtgggtcacatcgccaccccgatcctggccagacgctggtcaaagtgttaattagccagatctcccctagagggagaagcatccagagggtgctaaaagcttcaggggcaaggagcaaagacagctggcaatgcagtggtctggaagcctttgtccaaacacagggaagctctgccctcagcggcggccactgggaccgactgcccgcccccgacccaggcaagatgcccaactgcgaccgcgcgccccccaagatcgcctcccgagtctcgccacaggcgtgcttcccgcgcccatccccgccggtcccctccgccggccccctccgcgcctctacaccggccgaccaggcccggcggcccgctcgggctgcccggccgccggatgcgctcagcaaacgcggcccctgtcggatttctgctaaattgcacagcggcggcggcggcggcggcggctgccgggagaaggcgcaggaggaaccggagggccgtaccgcgcgctcgctcactccgcccctcccgctcgcccctcgccccggccccgccggccgccggctcccacccgcgcacacgacccagcccccaggacgcaccgggtgcccgagccccgcaggccgggacacctcgcagctgccgtattttctgctaaagtga

SEQ ID NO: 117699 - DNA, 549 bp, Homo sapiens
ctttagactcatagttccttaattccccagtgaagatctgagaaaggctgccattctaacacccttcaggccacgtagtggagatgttacttgctgtatccttgggatggcagacctggcacagtctttataggatgaaacccaagactctcagggtgcgcacatacacaggaggatcccttgaagccaaatgggctgactgggtcacacagggctgagcaggaggccagaggttactgccgggagggcatttatggtccacagcacagagaagggaaacctgggcggagcccagtggactctctaagttgaagaaataaggttgggagtcgggggagggcgaagcagctaaagttctcagggcaaagtactagagttcacaggtcagagagtagggaggaggaggaggagaaggaggaagacgaggaggaagaggaggaggaggaagaggaatacgagaaggaggaggagaaggaagaggaggaggaggaggaggaaagagatctggagtttagtaaaggacccttcttgtcttcagttgagtcatga

SEQ ID NO: 117700 - DNA, 1366 bp, Homo sapiens
ggcccctgggtcctcgccgccagcagtctgagtgcggtgccccgacactgacatggcctccaggcagcaacggccttcccgggcagcagggcgcctctccgttaagtgcgagccccggcgcaggggccggatctggccgggggccggcggcggtgtgggagcggcgcgtcatgtacaccatcaccaaggggcccagcaagctggtcgcgcagcgccgcacaggtcccacgcagcagcaggtggagggccggctcggcgagctcctgaaatgccggcagcccgcgccgccgacctcgcagcccccgcgggcgcagccctttgcgcagccgccgggaccctggcccctgtcgagaaaggtgtggaggttccagcggggcgggggctctctggggctccatcctagtgaggtaagtgccctctaccagaggcgccttctggcgggagtgcccctctcagctgaggaggaaccgagagcggcgctggggcacctgagcccaggaaggcaacaggccggccgggaccgcgagtgcctggcggagcaggcgcagcccaggactcccggctcccacctccggctgtgcggccccattccctccacggccctgtcccgggctttgtgtgctcagggctcggccagctggggccgctcatccctgccctgggcccggctggccgggacgggcccaggggcccaccagacgttgcgtgcggcactgcgggagccatctcctttggcatcgccccttgtctcgggccgtccagggccaaggcttgtgttcaatcgtgtgaatggccggcgggccccctccacgtccccatccttcgaggggacccaggagacctacacagtggcccacgaggagaatgtccgctttgtgtccgaagcctggcagcaggtgcaacagcagctggatggtggcccagccggtgagggcaggccaaggcctgtttataccatggagaggaccgccaatccccggctgcagaactttgtgccccattgacctagacgagtggtgggcgcaagcagttcctggcgagaatcaccagctgttcctagtggctgctgggaggggggcgctgctacacggccgacctgtcgccaggagaaaggcatggcggccctgcccacccactgcgcctggctgggtgccggccacacctgaaagtgccagcatttggacttttgcaccttttttttccctgggcccggctgtggcgacggaaggtgccatgtccaagggccgaacccgtctgacctcagccctgctcactgtgcccagggaccagcgaccagcccctggggctggcagggaggagctccaggctaataaagtggagaaactgtcaaaaaaaaaaaaaaaaa

SEQ ID NO: 117701 - DNA, 1782 bp, Homo sapiens
tcagtgtcttaaagggtccagaagccgagacccagtgtccccgaggaaagtcctgttgctccccgaggagtccccagcttggtagcctgtgcagttactgagggcactgtggtggtgggacacagtgctcctggcctgctccttggtgccagaaccttcttcctccctcagcttccccaactctctccacacaaaggcagctgtggcatgcatggccaggtgctcacaggaatcctgtgtgacaggtgccttctctagactcttgagcacgtgcacagctctcagtgccagctcaaggctctctcccgttgtgtcctccctgactgccagtccatggtgctcttgttcttccttggcagtgctcttgtttgggaaatgacctttttgtgtgaacttgttttgacgtgccagcttgatgaagagctcctccagggccagggtcctcccgtccctgcggcctgtgaggtggccagcggtggggctgtggctggcagggtatggaacgtgggcagggagcgtggccgtggttgtgtggggctgtctgctccagggcctagagcgtgcacatgaccacactgccaagtggccctgctctttgtggaatccagagacgactgcagagcagcactcagaggagacctgagtctctgcatcctctccagctcggctgggaagctgcccaggcgggggagggactgccccatccagctgttgtccacctcccagcctccccacggctgcagctgtcccagctccatcagtcacgtccaaggctgcctccagggtagggagatggggtctttgtttcttccggcttactggtttgatgatggtcaggccctgtgtgtaggggctggacttggggagtgtgagctgtaaggatgggtgtattttgtcctccaagtgtggcaggaaggagggagatgcccatcctggcattaccattttctgcagccagatacatgccttgccttcttctctcttttttacctgaaattcagcagagtccttgaagtctctaacaaccttgcattcttcagaagctatgttgctagtttctggctgccagtttgcatttcttaggcggattttctgattccaggctcgggagggctcccctgcactgacgggtgggggccccaggacggcatctgtgctcagtgcgaacgctgagcttccttttatggtgcgtgcacgcctgctgtcattaatgtagaggctggatttccctctccaattgattaggcagctctctctgttctctcctctttgcagggaggaggccactccttcaccccagttcctgatcttcaatgctctgtcttcctccttagtctgcagaacgcacccaactctgtttcgggtgggtgtgggcaggttgacctcagggctgggggaaggtttgattggctttggcattctcatgcgagtgagtttggaagacttatcaaggaggcagttttgaatgacatttgaaggcaggaagaagatcgtatcaggtgtcagggtgggcagggtggcttcctggagcgaggcccactcctggccaagagccactcctggtacaagtgaggactgagatgggcgatggggtgggcggtgcgatgggccagttcgttgaccagctcttgtactagatccatcagcaatgtcgcttagcgaggctttcttcagctttggaggcatgctggcttcgtaatcagcgtcaccctgtaggtgttgattgagcccgctgggcgtagcacaggtactcccatgggacacctcctcatctatgcccat

SEQ ID NO: 117702 - DNA, 1401 bp, Homo sapiens
atgcacggggatgaactacacatctccttcagggaaccgttagacaatcgaaaactgattttatccagctcgcctaggagtcgattccagacttccccgtgggtgagtaataaacaaactgttcgtgtctgcgggaccgtccactcgactcctcgcatgtgccgtgggtcgaagaggcacaatctgcccataataacaaagaaatcgtaccccaaaaagggccctggtcctctaaacacaaccaagcaagaggcccaccaagatctgaaagcaacaccaacaaagcggtcaactgcgctgggcgatcaacgaaaacacaaacaccgcgcggcaccagcggaaccacgaggggaatacttgagtgcacacaagacacacaaaaatgtccaccacgaatacaaacacaagctcactggacgcgcctcccacaacacagcagatgagaagtacacgagagagagggacatctcactgcgccaccttcgtcggcactcaagaacacatacaccctcccactacctactagcagacaacgacaccacaatataccaactgactgtggtgcctggccctgggccccgcactggggaacttccccgctgccacgcgcgcgttaccccgagagtcagcggcgaggaagctctcccgccaccccctcggagcccggaaaattcaaacacgcacctgcgcacccccagccagacacgcacccctacgcgcgctcggcctccgctttcccgagacgagtccgcaacagccgtggccagatccacgggtgggcttctttctcaggagttccccagtctgggcaccatcctctcagcaatatccatggtggagtccatcactttcaacaaatatgacaatccccccagaatccagcttcttttgcccacattagcttattacacatctttgaccagtcaccatggccagaggatgccggctctgctgaccatgcctgagctcagtccacacctagtgcccaccgtcaccgaccacaatacgttcaatggaccaccgacccaccttcgactcacggaacattcgaggagtcgagtggacggtccctcagacacacacagtggctgtgaaaaagaaaacaatcgggacaccggcccgcgactcccactcattcccaacgactcccaccacccgtatggtaaagtccctcaaaacttcgacggggacatctaccgacctctcgtcttcaagatctatactaaagtcacctacgtcctccattttcacctctcttacgattttctctatttggagagacccagacagtatggatttgtgcgtctaagaaagagagtggagttccaccgctgtttcatctcagaagtcctgacggacgagatgtattacagaatcgtcgtatgtccgctcctgcggtga

SEQ ID NO: 117703 - DNA, 1830 bp, Homo sapiens
ctaatgtagccggaaatccggcgcgatcgatggctgagacccagagcagagcagggaccgctggccccggtccgcgaacaaagcaaactccggggacttggggttccggccaggccggagcccctgcccaccctccctgctatatccaggaaagcagaagcggtttttcggccccaggccgcgcgagaaacgcactctggagccgccaatcctctctgcatggcacctggaggcgcggaaggttccggtgtaattcagcgggaggtggaaggcaggccccgatcccacagcgcgcctatgctcagcctttggtccgagcggccgccctcctgcgtgtgcctcggtccagacggcgctgccgattttccaaggagaggccgtggcccgcgtccgccgctgcaggactccccagcttcgccctccgctccgcgctgcagccctgcgcggtgctctcggttgccactctagccgaggcctcgagacaaagacgcgccgggcactggtggacgacccgggcgcctgggacactccctgactcgcgcctggagtgctcagcatcccggccctgtggcgaaggttgtgagaccttggtccaattccccgaccgtcgtggtcccggctgcggtcctctccagggtccagggagaggaaacccggcgcgcccacagccccggctgactcgagcagctcccgcgcccgacagcgccggcagctctggtctcctccggaggggctgctgtgcccccgcgaaggacgagatgacccctgctggccggagctgtggaggttgcctcgccgagacccggatctgtccagtcgctcgtccctgagcaccctgggccgttcaaagagctcaggaatattgtcttgtctaattccccggaggcttcgtattctgcccctgcaaactgacgacctcctccagcagaaatcaggcggagggaatggcaggagctgcgtgggggagttcttggcggaggacttgtcttctccttcccaccccacagctgcgtaggctcgactggcgcgtgggggctcccgacttggaggggtgtgggcagtggtattcagggctttttctccgtcccgccctgggaagggagacttccagaggtgggcggactgcgactgctccttggagcagtacacctgactgtcccagccattggagagagcccagtgctggtagccttcgacggggatgagggcgtcgtgacgcggctccgggtgcccgctgatcccgggcaccaccgacacgtccaggtagccgggcatcgcctggtaggagctggcgaagctggggtagaaggcgaactccttggccctagaggacaggtcgtcaccgggcagggcgcccgacggctccgggtatttatcgcccgggtggtaggcgcaaggcttctgctgcaggttcacgttgtgcgacaggcggcagccgtagtagctgcccccgaaggggtagccgtagcccagggtggcgctggacgaggtggggggtgcccggcggcggggcacactggcgcgccccgctccggggccgggatgtccgtatagacggcgccctgggggggcgcccaggggagccggcgggcggcccagcacggggtgcggaagcaggtcgcggcagtggctggccgggcagctgctgcccagaccatccatgctcggggctttgccggggctcgctccgctgcagccaccccccgctccgcccgtgccgccgcctcctcctccgccgccgccgccgatgccgctctccgccgcgctgtcctcatagacgtacataaggctctccggccagcgtggatgcaggagcagcgaagtcgtcat

SEQ ID NO: 117704 - DNA, 1311 bp, Homo sapiens
ctaatgtagccggaaatccggcgcgatcgatggctgagacccagagcagagcagggaccgctggccccggtccgcgaacaaagcaaactccggggacttggggttccggccaggccggagcccctgcccaccctccctgctatatccaggaaagcagaagcggtttttcggccccaggccgcgcgagaaacgcactctggagccgccaatcctctctgcatggcacctggaggcgcggaaggttccggtgtaattcagcgggaggtggaaggcaggccccgatcccacagcgcgcctatgctcagcctttggtccgagcggccgccctcctgcgtgtgcctcggtccagacggcgctgccgattttccaaggagaggccgtggcccgcgtccgccgctgcaggactccccagcttcgccctccgctccgcgctgcagccctgcgcggtgctctcggttgccactctagccgaggcctcgagacaaagacgcgccgggcactggtggacgacccgggcgcctgggacactccctgactcgcgcctggagtgctcagcatcccggccctgtggcgaaggttgtgagaccttggtccaattccccgaccgtcgtggtcccggctgcggtcctctccagggtccagggagaggaaacccggcgcgcccacagccccggctgactcgagcagctcccgcgcccgacagcgccggcagctctggtctcctccggagggctgctgtgcccccgcgaaggacgagatgacccctgctggccggagctgtggaggttgcctcgccgagacccggatctgtccagtcgctcgtccctgagcaccccttgaaaaaagtttcccaaatgtggttaatcctgggaagaagaaagcccaaccaaccctctccccgtcaaacatgactgctccttgatccttgatgacttgatccttcaggatgtctatttctgagttcagcctgggccgttcaaagagctcaggaatattgtcttgtctaattccccggaggcttcgtattctgcccctgcaaactgacgacctcctccagcagaaatcaggcggagggaatggcaggagctgcgtgggggagttcttggcggaggacttgtcttctccttcccaccccacagctgcgtaggctcgactggcgcgtgggggctcccgacttggaggggtgtgggcagtggtattcagggctttttctccgtcccgccctgcagggatctggagtccagtgcctccaggaaaccttccctgctctccccccttggagcgaatcctttcagcaaatttcagctgcat

SEQ ID NO: 117705 - DNA, 549 bp, Homo sapiens
ttacctggcgctgggcaccggcgtgttctggacgctggagggccgcgcggcgcaggactccagccgcagcttccagcgcgacaagtgggagctgttgcagaacttcacgtgtctggaccgcccggcgctggactcgctgatccgggtcaggggcgagcggcgtcggcctgggcgcggcgggatggggtagcgggccgcggggtgtacgggccgagggcgagggggcctattcaggccctggtcaggtgtttcctgttcagggaaacgtcgggaacgcagacgcgggcacaacgggggtgggcgttcctgcaggttggtggcctcctctgcccaccagacttcaaactctttctgtagcttcaccttggctttgtccatgagcagctgcaagtgctcgatctccaccttcagggctttcaggcgagtgaacattgttttataccttctcttttcttcctccagttgtgatcgcagcttctcctcctgctggtctggcatcagaggcacggccatgttttccgagattccactcttatccttaagccccat

SEQ ID NO: 117706 - DNA, 3066 bp, Homo sapiens
atgtctctggaggtggacaggtctgtagaaaccatgtgctccggggatgagatactcttgcccgacttgcccaaggcagacgttgctgatccactgtggggtcctttcccagtgcagaactgtcttagtctggccagaagtgacagcagggagcagggcttggttttggtgatggaaagcaggaaccgagaggtggtcccacctggtgtcagttacagtaaagatggagcgaagtccttgaaaggagatgtgcctgcctctgaggtgacttcgaaagactcgacgttcagccagtttagtccgatctctagtgctgaagagtgtggtgacgacgagaagatcaaggtggatgaccccctgacaaggaggacgtgcaatcaagcttcagggtcggctccccagcaggactatgataagctgaaggcatttggaggggaaaactccagtaaaactggactctctccatcaggcaatatggagaaaaacaaagttgttaagagagaagcagaagccaattctataaacctgagtgtttatgaaccttttaaagtcagaaaagcagaggataaattgaaggaaaactctgacaatgtgctggaaaacagagtcctggatgggaagctgagctccgagaagaatgacacctgcctccccggcactgcgccatcaaagacaaagtcatcctccaagctctcatcctgcagctctgccatcatggctctcagcgctaaaaaggcggcttcagactcctgcaaagaaccagtggccaattcgagggaatcctccccattaccaaaagaagtaaatgacagccaggcgcgggcgcctctccagtccacggtcatgaccaatgcagtttcacctgcagagctcacccctaaacaggtcacaatcaagcctgtggctactgctttcctcccagtgtctgctgtgaacgaaatgaagacggcaggatcccgagtcattaatttgaagctcgctaacaacaccacagtgaaagccacagtcatatctgctgcctctgtccagagcgccagcagcgccatcattaaagccgccaacgccatccagcagcaaactgtcgtggtgccggcacccagccgggccaacgccaaactcgtgccaaagactgtgcaccttgccaacattaaccttttgcctcagggtgcccaggccacctctgaactccgccaagtgctaaccaaagctcagcaacaaataaagcaggcaataatcaatgcagcagcctcgcaaccccccaaaaaggtgtctcgagtccaggtggtgtcgtccttgcagagttctgtggtggaagctttcaacaaggtgctgagcagtgtcaatccagtccctgtttacattccaaacctgagtcctcccaccaatgcagggatcacgttaccaacgcgtgggtacaagtgcttggagtgtggggactcctttgcagttgaaaagagtctgacccagcactatgacagacagagcatgcgcatcgaagtaacatgcaaccatggtacaaagaacctcattttttacaacaaatgcagcctcctttcccatgcccgtgggcataaggagaaaggggtggctgcagatacacgtggacaaaagacttgcactatctgccagatgctgcttcctaaccagtgcagttacgcatcacaccagagaatccatcagcacaaatctctctacacctgccctgagtgcggggccatctgcaggtcggtgcacttccagacccatgtcaccaagaactgtctgcactacatgaggagagttggttttcgatgtgtgcattgcaatgttgtatactctgatgtggctgccctgcagtctcacattcaaggttctcactgtgaagtcttctacaagtgtcctatttgtccaatggcatgtaagtccgccccaagcacacattcccacacctacacacagcatcctggcatcaagataggagaaccagaaataatatataagtgttccatgtgcgacactgtgttcaccctgcaaaccttgctgtatcgccactttgaccaacacattgaaaaccagaagttgtctgttttcaagtgtccagactgttatcttttatatgcacagaagcaacttatgatggaccatatcaagtctatgcatggaacattgaaaagtattgaagggcctccaaacttgggtataaacttgcctttgagcattaagcctgcaactcaaaattcagcaaatcagaacaaagaggacaccaaatccatgaatgggaaagagaaattggaaaagaaatctccatctcctgtgaaaaaatcagtggaaaccaagaaagtggccagtcctgggtggacgtgttgggagtgtgaccgcctgttcattcagagagatgtgtacatatcccacgtgaggaaggagcaagggaagcaaatgaagaaacatccctgccgccacctgtgccagcacaaccggatcaagcacaaaggcatcaggaaagtgtatgcctgctcgcactgcccagactccagacgtacctttaccaaacgattgatgctagagaagcacgtccagctgatgcacagcctcaaggaccctgacctgaaagaaatgacagatgccaccaatgaggaggaaacagaaataaaagaagacaccaagttccccagtcccaagtggaagttggaagaaccagttctcaagagtgccatgtgtggcttcaccaccgaaaacctgcttcagttccacgaacacatccctcagcacaaatctgatagttcttcctaccagtgccaggagtgtggcctctggtacacgtctcacgtctctctgtccaggcacctcttcattgtacacaagttaaaggaacctcagccagtgtccaagcaaaatggagctggggaagataaccaacaggagaacaaacccagccatgaggatgaatcccccaatggcaccgtgtcagacagaaagtgcaaagtgtgcgtgaaaacttttgaaactgaagctgccttaaatactcacatgcggatacatggcatggccttcatcaaatccaaaaggatgagctcagccaagaaatag

SEQ ID NO: 117707 - DNA, 848 bp, Homo sapiens
atggaaaataagaaagtggccagtcctgggtggacgtgttgggagtgtgaccgcctgttcatgcagagagatgtgtacatatcccacatgaggaatgagcacgggaagcaaatgaagaaacacccctgccgccagtgtgacaagtcttttagtttgtcccacagcctgtgctggcacaaccggatcaagcacaaaggcatcaggcaaggcccagactccagacgtacctttaccaaacgattgatgctggagaagcacgttcagctgatgcatggtatcaaggaccctgacctgaaagaaatgacagatgccacccatgaggaggaaacagaaataaaagaagacaaccaaggtccccagtcccaagcagaagttggaagaaccagttctggagttcaggcctccccaaggagcaatcactcaaccactgaaaaagctgaaaatcaatgtttttaaggttcacaagtgcgctcgtgcgtggcttcaccaccgaaaacctgctgcaatttcacgaacacatccctcagcacaaatcggatggttcttcctaccagtgccgggagtgtggcctctgctacacgtctcacgtctctctgtacatgcacctcttcatcgtacacaagttaaaggaacctcagacagtgttcaagcaaaatggggctggggaagataaccaacaggagaacaaacccagccacgaggatgactcccctgatggcaccgtgtcagacagaaagtgcaaagtgtgcgcaaaaacttttgaaactgaagctgcctcaaatactcacatgcggatacacggcatggccttcatcaaatccaaaaggatgagctcagccgagaaatag

SEQ ID NO: 117708 - DNA, 3012 bp, Homo sapiens
gctgtaaggaggcaaaagttgcttgaacagagcatccagtctgcccaggagactgaaaaatccttacacttaatccaggagtccctcacattcattgacaagcagttggcagcttatattgcagacaaggtggacgcagctcaaatgcctcaggaagcccaggcaaaaaaagagaattttagaccaatatccctgatgaacatcgatgcaaaaatcctcaataaaatactggcaaaccgaatccagcagcacatcaaaaagcttatgcaccatgaccaagtgggcttcatccctgggatgcaaggctggttcaatatatgcaaatcaataaacgtaatccagcatataaacagaaccaatcacaaataccacatgattatctcaatagatccagaaaaggcctttgacaatattcaactacccctcatgctaaaaattctcaataaattaggtattgatgggacaaatctcaaaataataagagctatctatgatgaacccacagccaatatcatactgaatgggcaaaaactggaagcattccctttgaaaactggcacaagacaggggtgccctctctcactgctcctattcaacatactgttggaagttctggccagggcaattaggcaggagaaggaaataaagggtattcaatcaggaaaagaggaagtcaaattgttcctgtttgcagatgacatgattgtatatctagaaaaccccattgtctcagcccaaaatctccttaagctgataagcaacttcagcaaagtctcagcatgcaaaatcaatgtgcaaaaatcacaagcattcttatacaccaataacagacaaacagagagccaaatcatgagtgaactcccattcgcaattgcttcaaagagaataaaatacctaggaatccaacttacaagggatgtgaaggacctcttcaaggagaactacaaaccactgctcaatgaaataaaagaggatacaaacaaatggaagaacattccatgctcatgggtaggaagtgtcaatatcgtgaaaatggccatactgcccaagaaaatccaatctgatttgacaagtcatgagatcagtttagaagaaatgaagaaacataatcaggggaaggaggctgcccaaagagtcctgtctcagattgatgttgcacagaaaaaattacaagatgtctccatgaagtttcgattattccagaaaccagccaattttgagcagcgtctacaagaaagtaagatgattttagatgaagtgaagatgcacttgcctgcattggaaacaaagagtgtggaacaggaagtagtacagtcacagctaaatcattgtgtgaacttgtataaaagtctgagtgaagtgaagtctgaagtggaaatggtgataaagactggacgtcagattgtacagaaaaagcagacggaaaatcccaaagaacttgatgaaagagtaacagctttgaaattgcattataatgagctgggagcaaaggtaacagaaagaaagcaacagttggagaaatgcttgaaattgtcccgtaagatgcgaaaggaaatgaatgtcttgacagaatggctggcagctacagatatggaattgacaaagagatcagcagttgaaggaatgcctagtaatttggattctgaagttgcctggggaaaggctactcaaaaagagattgagaaacagaaggtgcacctgaagagtatcacagaggtaggagaggccttgaaaacagttttgggcaagaaggagacgttggtggaagataaactcagtcttctgaatagtaactggatagctgtcacctcccgagcagaagagtggttaaatcttttgttggaataccagaaacacatggaaacttttgaccagaatgtggaccacatcacaaagtggatcattcaggctgacacacttttggatgaatcagagaaaaagaaaccccagcaaaaagaagacgtgcttaagcgtttaaaggcagaactgaatgacatacgcccaaaggtggactctacacgtgaccaagcagcaaacttgatggcaaaccgcggtgaccactgcaggaaattagtagagccccaaatctcagagctcaaccatcgatttgcagccatttcacacagaattaagactggaaagaagccaagttggagaaggggagtcagcaatttgggagagatgctagttgaggtatatctaaaagcactaatgagtgaagacttgagaaaagggattaatcaggatgaattctcaccaaccatatattattttccgataacagtgtttggtagtgagggggatctattgctaggtaaaatacgatggattcaaggagcttactgtttgatgatagggcaagatgtgttcatggatactagattgagagtgagtgcatgctttttaaaaaccaaaatgaagactgtacttgttgtttttgatcagaatgaagacaatgagggtactgtaaaagaattgttgcaaagaggagacaacttacaacaaagaatcacagatgagagaaagcgagaggaaataaagataaaacagcagctgttacagacaaaacataatgctctcaaggatttgaggtctcaaagaagaaaaaaggctctagaaatttctcatcagtggtatcagtacaagaggcaggctgatgatctcctgaaatgcttggatgacattgaaaaaaaattagccagcctacctgagcccagagatgaaaggaaaataaaggaaattgatcgggaattgcagaagaagaaagaggagctgaatgcagtgcgtaggcaagctgagggcttgtctgaggatggggccgcaatggcagtggagccaactcagatccagctcagcaagcgctggcgggaaattgagagcaaatttgctcagtttcgaagactcaactttgcacaaattgtatatgaaattgttgtgcatatttcaaagaagaatagaatgcagggtaactctcaaacttgttatttggaattaggtcagataattttgtaa

SEQ ID NO: 117709 - DNA, 1010 bp, Homo sapiens
atgccccgctacgtcccccttctgctgctcctgcttctcctgaggtgttcacaacggggtggaggagttaattttggtgagaaggatgcaaaagtccccgggacctggagagatggagtcagggtccctggagaaggagcctcttgggactcagacagggccagtcccgagcgaaggtacggaataggactaagccaaagcatttccactaagcacccagagaccagccctaaagactcaagaataagagaaaatgatgtaactgcagatggaaggaccactgaggaccacatcactgcagacccagggaccaccgaggactctgtcactgcagacccagggaccactgaggacaatgtgactgtggacccagggaccaccgagggctctgtcactgcagacccagcgaccaccaaggactatgtgtctgcagacccagggaccaccaaggattctgtcactgcagacccagggaccactgagaactttgtcactgcagacccagggaccaccaaggactccatcactgcagacccaaggaccactgagaactttgtcactgcagacccagggaccaccaaacactccatcactgtagacccagggaccactgaggactctgtcactgcagacccagggaccaccaaacactccatcactgcagacccagggaccaccgaggactccgtcactgcagacccagggaccacagaagatgaaaccactaaacatggtgacactcaccttctgtgaactacttcagtcacagcagtgaaacccaccaggctcctgacacccatgggaattatcctcatatccctggctgcaaccacagtcactgttgtgctctttgttggattgggcttcattgtgaaagagtgtttcctgcctccattaaatccatccaccagggttatttatcatccccatgtcatggactacagtacaccataaagaggaccccagcagtgactacagttggttctagaaaaaggagacccctcatccgg

SEQ ID NO: 117710 - DNA, 542 bp, Homo sapiens
  misc_feature (1)...(542): n = a,t,c or g
acttttcttttntgctcaaggagacagatggagcgagtgttttctttttcatggtcaaggatccggctggcttttttggtgtctgatgttttcacatcttcctccatggccaaggaaaacacgtgttgatgagacatttttttaccacagtcacgttttaagtcctctgactgaaatgtgaaggtcatttcccgcttaatgctccccaccttcaacgcgccccgggccgggcccctggggactgcgtggccgggtccgaggggcacgaaacgctcctcgccgtcctcgtcgtcttcgtcgccgtccaccacctcgacgaccacctcctcgtcctcctcttcctcgtcgtcatcctcctcctccgcgccccctcggggcttctcctccacacgcccgagccccctccgccgcctgctcccgccctcctcgtcctcgccgtcctcgtcgtcttcgtcgccgtccaccacctcgacgaccacctcctcgtcctcctcttcctcctctgcctccgccggtggccgcagggccgggactcgcggccg

SEQ ID NO: 117711 - DNA, 853 bp, Homo sapiens
caactgctagcaaaatgcatgttggaaaccaagggcttggattttgctgtactgggtttaccgggttctctcacaagcgcctgtgatggaaactcatcggacaattgttcttggttggaagaaggggctgagagattgacaagaaacaccgctttctggtttcaataagcttgaatagcccttcaaaataaggagaaggggacactccttcccgtccccaccgggcacgaaccggcgcctccgtggtcccatcacccaagttccccacctcactggggagaagcgccctttcccggcacccacaccaaacaacaaacccgacacggcctttgaggaaagcgggagccgccgccttcaacgcgccccgggccgggcccctggggactgcgtggccgggtccgaggggcacgaaacgctcctcgccgtcctcgtcgtcttcgtcgccgtccaccacctcgacgaccacctcctcgtcctcctcttcctcgtcgtcatcctcctcctccgcgccccctcggggcttctcctccacacgcccgagccccctccgccgcctgctcccgccctcctcgtcctcgtcttcctcccctagaagcagcagcaccggcgacgaggcggcggcggcggccccggtggcccgaggggggccggtcccggcgctgcgcggcggcggcggcagcggcggcctccagctctccggggcgggcgccggggccgggcccgggacagggggcgggagcccgggtagggcggcttccttggcgggcgcgggcgccggcccggcaggctgcagcgcggcgcccccccggcggctgcccaggctggagcgcttggctagacgccgcgcctgcat

SEQ ID NO: 117712 - DNA, 373 bp, Homo sapiens
cccatatgagcccccagttataaaataatacaaggtttcttgtccttaaaggggttctccgaggcagggactccgaccagcagggggtcgttccgggcatgttgctcacagtagctcatgaggtcagacgccgctttggagaccttgatgcgctcaatcccggcttctatgcgtagctgttccaccagcttccgggcctgggctatgttgttagtggctgacattgtctgccatcagctctgggccccgttgttcagagagcttttttagttttcccaggaatcacagcttgctgtacaccctgtgcaggaggtctcgccgtctgcagcaccgagatcccgaaaccaagctcctctccctgcgctcgggcccc

SEQ ID NO: 117713 - DNA, 513 bp, Homo sapiens
tcatccctgctgccctgagctgctgctgtcctgagtggcaggccctggtgtagcagatcctgcaagattccagctgctgccagagcccaagggtgccagggcattcctgtggcaagggcaccactctatgtgttttttccagggagtggagcttggtttcgggatctcggtgctgcagacggcgagacctcctgcacaggtcggtgctgtaatgcatttctttgttatgatttgaggttcagttggctgttttgcaccctggatgtaagacgtggggttgccgtcaaggcgggcgtcttggccttgacctgggtctgtcggctgtttgtatccaccaagtatgggtaatggggagcaggtgtgggtaacagctgctagctcctggcagagtttcccgcccacgaggcagggaacgtggcactcactggtcctgctggtgccggagcccctggatggggtcagggtgggaagcccacagcggtgctgcatgcctttccggtgtcttcgtgccat

SEQ ID NO: 117714 - DNA, 518 bp, Homo sapiens
ccctcgtctgccggagcccgcgcgcccagccgcccgacttcgccgccgcctggagccggctggccgcgacctcagccgcccgccgcccgccggggagtcctgtgtatggaaactcacatgagtcagctcagtctagaagggtagtaatttctcataatatggataaagctctgaaagaagtgttcgactacagttatagagattacattctgtcctggtatggaaacctcagcagagatgagggacaactttaccatctgctcttggaagacttttgggaaattgccagacagctgcaccacagactgagtcacgtggatgtggttaaagttgtctgcaatgatgttgtgaggactttactcactcatttctgtgacctgaaagctgccaatgccagacatgaagaacagccaagaccttttgtgttgcacgcatgcttgaggaactcagatgatgaatcttgaagccggtagtggagttactgagtaatccagattacattaaccaaatgctgcttg

SEQ ID NO: 117715 - DNA, 1023 bp, Homo sapiens
atgggggcagatttgaccacactggctctgggctgtcaagacagccaatctgggctgctgtctctggctgctgttatggcttcattcccggggccactccacttaatacagggacagtacttcagggtaaatgaggcatgcaggcgcctgcaccctccgggcaaggacaaggcgtgtgagagtctctgggtctgccccagcgacgccgtcgggcctctgggcggtgcagcctggtccggcatcatcctggacgcgcgggtaatcagggctgagggagcccaagcaacttcagatgctggagttatgaagaaaaatgagtcagctcagtttagaagggtagtgaagttctcataatatggataaaggctctgaaagaagtgttcagactacagttatagagattacattctgtcctggtatggaaacctcagcagagatgagggacgaactttaccatctgctcttggaagacttttgggagattgccagacagctgcacgacagactgagtcacgtggatgtggttagaagttgtctgcaagggtgttgtgaggacctttactcactcatttctgtgacctgaaagctgccaatgccagacatgaagaacagccaagaccttttgtgttgcacgcatgcttgaggaactcagatgatgaagtaagatttctacaaacgtgttctcgggttctggtgttttgtctcctcccctcaaaggatgtgcagtctctcagcttacgtataatgcttgcagaaattctcacaacaaaagtcttgaagccggtagtggagttactgagtaatccagattacattaaccaaatgctgcttgcccagctggcgtacagagagcaaatgaatgaacatcacaagagagcctacacctatggcccctcttatgaggacttcatcaagctcattaacagcaactctgatgtggagttcttgaagcaactaaggtctgttgaaggaacggtagagaagagtggtagaagatgtgtgctggtcgttttcaacaactga

SEQ ID NO: 117716 - DNA, 4317 bp, Homo sapiens
atgcagtccatgactaagatgtactgtggacccctggaccagcctgctagcccatgctccaatgttgatgacatcgaagtaaaactggaaataatgttattaacagaaagggatgatgggaaagaggtgttggatgttggagaggagagaagatatgaaatagaagaatatgacagcaaatggactagaaaatataattgcctagctgtcttaagggtccattcagggtcccaaatcacaaccatgaagttgatcttatggtacttggttgtggcactttggtgcttcttcaaagatggtaaaatagcagcaagcagatcaggtggcttctcttatggtagttcatcctctggtgacttggacagaaaaaagccactctttagcttggaatttggttctccaggagagactgaagacaagtccagacaacgtcaggatgctgggagtccaaagtcagaagacaccccagcaggtggcttttttaacagtagttcatcctccggtgactcagacaggacaaagccattctttagcttaggacttggtgctccaggaaaggctgaagacaagtccggagacagtcaggatgctggaggttcaaagtcagaagacaccccaccaggtggctttttttatggtagttcatcctctggtgactcagacaaaaaaaagccactctttagctttgaatttggtgctacaggagaggatgaagacaagtccagagaacgctgggatgctgggaattcaaggtcagaagacagcccagcagatagcaccaacacaagatatggtgctggctttagtagcagtggtgcctctctggatgtgggatttggttgggggatatctgatgaaaagggattggaagtcagtaaagctgatgggagagaaactagaggcagtggatctgctgggggtgaaaccatagtctttggacctgatgcagttggaactggttcttctggtttgaaacttggagcagggaaaggtgatgctgcatttggttttgaagtttctgattcgaattcatttggtgacactggcattagtagcaaaacagttgaaggaaatcaaacgagtagttctggaggatctgtttccattgatctaggtgataccagtttcagaagtgagaatcaatttgttggtggtggctctctaaattcgatatccaatttatgggattctggtcaagagggatttggaatcaatgaaattggagggaatggaatgagtggcagtgtatctgctgaggctggattcaaaggttttggatctgattcaagtagctcagtgggaatgcttgagtctcttgaatttggacttggaggaaaaaaagttggagctggatttgattttaagtattctggttcaaggaaatttggtggtaatgagcttagtgaaaatggaataaaagttactagagaatctagttctagtgatttaggtgattcaagtgcaagaaatgggtttgaaaattctagtggcatctctgaagattcaggagtcatattggggtcatctgatcaacatgaagttgaactcagtagaactggtgggaatagaaagagaagcagtgaccctgatgaggctggaaacttgagtcctggatctgatgtcagtgactcaggaggaaacacttggtcttctgattctggaagtggtggaggaggtaagagtgcagatgaacttggtgttggtgcttctggactaaatgaatttggtgaaactggccttagtggttcagggcaagatattaatgagcacattgccaatagtaaaattcctggtgattgtcccaatgctgttggtaaaagctatgaagtttgtgaagatggaatacagcactgtaacaaaattattggaacctactttgagaaatgtggaaaggttgctgctctatccaatgactacaaaatgatctgcattgatgaatactgccaaactagagacaaaacatctacatgtgacacttattcagaactgtcccgcctctgtgcctcagatggtcctggcacctttgaatcctggcgaagcgactccgatgtggtttgtggaacacaaagatgtccagaacaacatatctacaaagaatgtggaccctccaaccctgcaacttgttctaatgtggctccttttcaagacagtgaatgtgtgagcggctgcacctgcccagaaggttatctgttggatgacattggagagaaaggaaaatgtgtattaaaagctgaatgtccctgtgaatccagtggaacagtgtatcagccaggagaagtccgagaaggtccttgtggttctcagtgcacatgccaagatgcaaagtggtcttgcaccgaagcattatgccctggaagatgtaaggtggaaggaagttcccttaccacctttgatggtgttaagtacaactttcctggaaactgccacttcctggccgttcactctgttccagttgacaaatacgtattcaacagtgatggaacagtcacaaatgacaagattagaaatcaaggttattactattcagataaaatacagatattcaatgcatcttcctcataccttcaagtagaaacatactttcatgtgaaactacaaatacaaattgttcctgtgatgcaattgtatgtttctatgccacccaaccaattcacagacactgtgggactctgtggttcctacaacaacaaagcagaggatgatttcatgtcaagtcagaatatattggagaagacatctcaggcatttgctaactcttgggaaatgatgtcctgtcctaaaggaaacccctcttcatgtattagtatagaaaaagaaaaatttgctgaaaggcactgtggaattcttcttgattcaagtgggcctttggcttcctgccacccaattgtgaaccctaaaccctatcatgaggaatgcaaaaaatatacttgcacttgtgaaaacagtcaggactgcctatgtacaattttaggcaactatgtgaaagcgtgtgctgagaaggaaacatacatagtgggatggagaactggcctatgtgaacattcttgcccaagtggcctagtgttcaagtacaatgtaaaagcctgtaatagttcttgccgatccttgtcagaaagagataggagctgtgatgtagaagatgttccagttgatggatgcacctgccctgatgcaatgtaccagaataatgaaggaaactgtgtactgaaatctcagtgtgactgttacataaacgacgaggtcatgcaaccaggcaaactcatccatattgatgacaataaatgtacctgcattaaagggtcttggagttgtacccaaaatgaatgtcaaaccatctgccacatctatggggaaggtcatgttagaacttttgatgggaagagttacagttttgacggtctctgccagtattcatttcttgagggcaaagtgtgtggtctttgtggaaataacaatggtgatctcaaggatgatttcacaacaagatactcttcagtagcttctggagcactggaatttgggaatagttggaaaacaagccaagaatgttcagatacagtggctcagactttcccatgtgattcaaacccatactgtaaagcctgggctgtgcggaaatgtgagatcctcagagacagcaccttcagagactgccacaacaaggttgaccccagtgcttaccatgatgtgtgcattgaagaagcctgtgcatgtgacatggaggggaagtacctgggattctgcactgccgtggctatgtacgcagaggcgtgtagtgcagttggagtctgtgtctcatggagaaaaccaaatctgtgtcctgtctactgtgattactacaatgcgcctggggaatgcagatggcattatgaaccttgtggcacagtgactgcaaaaacatgcaaagatcagctcgttggccagaaattttcttcacttttagaagtttccactacaacagctaccaccatattaagcaccggagcagcaattacactggttaccggtggcccaagcacaggaacaactctaggtcctctcaccgaaccttttactacaggcattactgaaacttcagttcccatcatctcaacatctggaaatgcaggcatgacaggagtagtgagccccaccgtcactggtgcttcaggcatggcagatgttaaacattttcaacctagcctccaccttgctcaccttcctccaaacacaatggtgtttaaagtgtggtttctggaccagcagcatcagcatcttctgggaattccctatcacattatggctatcctttacgtcggagacaaatttctgatctga

SEQ ID NO: 117717 - DNA, 987 bp, Homo sapiens
catatcagctggagtaacagggacaagtggactatcagctgaagcaacagggatacctggactatcggctggggtgacagggaaaactggactatctgctggagtgacagagacaattggactatcagctggactatcagctagggtgacagagagtactggactatcagctggggtgacagggacaattgaataatcagctgtggtgacagagacaactagactttcatctggagtcacagggacaattggaccatcagctgaagagacaggggcaactggactatcagcagaagtgacagggacaactggatcattagctgaagtgacagggacaactgggctatcagctggggtgacagggacaattggatcatcagctgctgggctgtcttctgaccttgaattcccagcatcccagcgttctctggacttgtcttcatcctctcctgtagcaccaaattcaaagctaaagagtggcttttttttgtctgagtcaccagaggatgaactaccataaaaaaagccaccggtgtgggaagttctagatatagcagttgtcccagagaattcttttgtagtaactgtttcactttcagatgctgaactgtctggtgtgacagaggtgcctgggttcttttgggcctgggattgagctcctctgccctgaagggggcttcccaggccccagttgaagattatcaggttagggactttcctcattgaggagcatgcacactcctccaaaaattgtcctgctgtgttaccagggccagtgtccccagtacctgatgttccagctgtgtttccactgcctgcgctggtggtggcttccacagacccttctgttgaacgtgagcatgttgccatctcagcaacatcaattataaggaaaggcctataaatatgttcttctgtgcatatggtaaaaatagtgatgatcagcgcactaccacctacgatgtgcaactgtgttcttgaatccat

SEQ ID NO: 117718 - DNA, 975 bp, Homo sapiens
gctgggttgtcactgatgggcagcatttgagcctgccacactggcctggaaagttcccttccagtctggattttgtctgctccttcctttccccctcaccccgttacctcttcacctcccatctcatttcacttgtgtagctcagtctctcccacgcacataattggggacagtgggggctctcttaccagcctcctcagcaacgcacgtccatcaggcctggcctcagtggccagccacattgatgtcacactggaattgttaccccagagagggcgaagagataggctatctccccacctcccaccctactccccactatattcccgttttgaccacctcagcccctcagctgccccctctcactttggccaatcccaggcaccaatcagacttcctcctccacctggagcccctagcatttccttgtcccctcttccccaaaacctctgtaaagggtacgagagggaccccctgccgagccgcccgccactcagggcagtccgatctaagaagcagaagctgggttggaggctggctgggcctctgtccaagtccccagatgggataaacttgccttttctcacatcccctcttgggtgccttgatctttctttgcccccggggccaggacccactgtgctgttttctgtcagtctgtggcacagcaccaagctctgccagcaccagtccctgacagggctaggaggacagcctggtcagcagggctccagttcccccagtgccgtgtttcgggggtcaagggatgtaagtggagtcattgcacagagacagaccagtcaggagaaggagctggaatctggcctcttgtcctaacctcaggagccccctccccatcctctccccaccctccctatcggggtacttcactgtttcttttctacttgtgtatactcgagaaagggaagatggttaataaaagggatttgtgctgctgaaaaaaaaaaaaaaaaa

SEQ ID NO: 117719 - DNA, 2182 bp, Homo sapiens
atgccctcagagcctcatcgctgtggagcaaaggaagccgcctcccacagggagccaggtcctgctgcagcccagagcggcccagggaacgccacttcccacagccacgccacacggaacctccggggacgcccaaaaacacctactgcaaacgtggtgaaacacctggccatgaaagaagccagggccaagcccgacagacgcaggacacaggacacagaccaaacgacagcacagcacccagagggggcaaaagtacaaggtcacgaccagtttccaggaggctctgtccactttgggtgccgccccgcaccctcgccccccagaagacagggacgctcgcctggcatggggcaggcgctgatggatttccgcacgaagccctttccccagcagcctaactcgcaggtgtacggccacaccctcagtcctgaagaccagcccctacaggaagcccctgctacacagctgtccgagcaactgaatgtatccctaaccgacacgccccccgccaagtccaacttcccctacgcagctttccttgaggactcaaatgtggccacgtgccctcctctgtggcccctgcctttaaggagacacttgtcccagtgggtccctccaaactgggaacctggggctgcctcaggttcctcacgggagcatggggggattcgctgcaatgccacagccacagtgctcagcaccctcctatcacccacagaagcctgtctgcagagcgctgatggtgaccaggcactttctaagcactcagcggatacgaatgcttcacagccccaaacccaggggttcctggtgtccccccgtcacagatgaagatgctgaatcagacaggggatctgggcagcagcagagccagcgcaccccggcagaggttcttgggaagccccaggtcttggagaggttcctgttgcccacacaaaccaaacaggaaggcagccacgacgaggagacccggcatgttcacaactgcagagagggcagcaccgaaaagcaaggaaggcaccccctgccggccaggccttctccggccagcagcaaacgccttctccaccagggccttctccgccagcagccaaacgcctcctccgccagggccttctccggccagcagcaacgccttgctctgcttcaggcggctaccttggaactaggcagcgagcccttggggctggggccctggggggctgcgagccgacaccggccacaggagaggaaagcaggccatgtcatctcagatgacccctctccccatctgacagcagctctctctgccctctcggttttgccaagcacaccaagccagaaacgcaggactacttggcgccagcactggcatgaaagcgacaaagtgggctggtgcatgccgccagcggacagcgaaaacagaggcatgggcctcaagttggcaaagggtttcagacacaaaaccagaagcactcgccagaaaaacaaagactctggctcacaccctcagtaccaggctttcgacctcagactgacaattacagcaggtttctctgctgcggaggcgtctgagcttgaggggagctgtgctgccgcaacccagatctccagcttgcaggtggcctgtcacgggacttctcggccccacaatcacgtcgtggatgacatcatgaattcaactgcaggacccccaagtggtgtctgtggagaactggagaatgtaatgtctgggaaacccacacagttggtgtcagaaatgttgcaggttcggctcttctcccagcggggcctcattccaacaaagcctcagaatgacctaggtttctgtgaactggaccccgccgaggccttgcatctgaaatcggccaagctgcaccggctgaaacgtcaccggctcctaggacggccgcacgccaaatgcctctcctcaaggcccttcggccagagggtttgtggaaaagtggaatggcagccacgcagcccggcaccccaggtacaaaccggggactcagtaaccaagcggggcggcatccacaggctcccagggacacctccttccccagcgttgcctccatgccgggccagctcacttgtgggaaagcagccggccatggacaagccacaagccaggaaatgcaccgctggccctgtggtgacacctgggaggaggagcaggggcaggctcgagttgttttaa

SEQ ID NO: 117720 - DNA, 426 bp, Homo sapiens
tggactcttgttccaaactggaacaacactcaaccctatctcgggctattcttttgatttataagggattttgccgatttcggaaccaccatcaaacaggattttcgcctgctggggcaaaccagcgtggaccgcttgctgcaactctctcagggccaggcggtgaagggcaatcagctgttgcccgtctcactggtgaaaagaaaaaccaccctggcgcccaatacgcaaaccgcctctccccgcgcgttggccgattcattaatgcagctggcacgacaggtttcccgactggaaagcgggcaaagacagatggatcttggagaatgacagtggattatcgtaagcttaaccaagtggtgagtccagttgcagctgctgtaccagatgtggttgtactgcttgagcaaattaacacatctcctg

SEQ ID NO: 117721 - DNA, 266 bp, Homo sapiens
ctgctgtaccagatatggtttcattgcttgagcaaatgaactcatctcctggtacctggtatgcagccattgacttggcaaatgcctttttctccattcctgtccataagccccaccagaagcaatttgccttcagctgccactcctgtcatcgcccaatgggccctgaacaaagtggccacggtggcagggatggaggttacacatgggctcagcaacatggacttgcattcaccaatactgatctggctacggtcaatgccaag

SEQ ID NO: 117722 - DNA, 2286 bp, Homo sapiens
atgtcactgtggtcctccagtaaagtagaggcttacggaagtcaggtacttaaaggagttttagctcaggtccaacttacagtgggtccagtgggtcctcggactcatcctgtggtcattttcccagtgccagaatgcataattggcatagatatgcttagtagcaggcagaacccccacactggctccctgactggtagggtgtggactattatggtgagaaaggccaaatggaagccattagagctgcctctacctagaaaaatagtaaatcaaaaacagtatcacatccctgaagggattgtggagattagtgccaccatcaaggacttgaaggatgcaggggtggtgattcccaccacatccccattcaactctcccatctggcctgtgcagaagacagacggatcttggagaatgacagtgggttactgtaagcttaaccaagtggtgactccaattgcagctgctgtaccagatgtggtttcattgcttgagcaaattaacacacctcctggtacctggtatgcagccattgacttggcaaatgactttttccccattcctgtccataaggcccaccagaagcaatttgccttccgctggcaaggccggcaatacacctttactgtcctacctcaggggagatgggaaataaatatgactaaaattcagggaccttctacctcagtaaaatttctaggggtccagtggtgtggggcttgtcaagatattccttctaaggtgaaggataagttgctgcatttagtccctcctacaaccaagaaagagcacaatgcctatctggatttcggagggaacacattcctcatttggcccatttatcgagtgagccgaaaggctgccaattttgagtggagtccagaacaggagaaggctctgcaacaggtccaggctgctgtgcaagctgcttggccacttgggccatacgacccagcagatccaatggtgcttgaggtgtcagtggcagatagggatgctgattggagctgttggcaggcctccatagccataaagtgggtcatgcacagcagcattccatcatcaaatggaagtggtatatacgtgattgggctcgagcagatcctgaaggcacaacaaagggacaaggacagcggagatggtggcaattggcagagaggcaagacagcagagacagagaggcagcaattggtgagagacaagagacagcagttggcaagacagcaagagacggtgaagcagtctgtgattgaggatgtggtgaaactgagtggacagccaagtgtccatagtacagctgcctcgtgtgggacccactgctctaacgagccagcccccgacacagaagctgagcacccccaagctggggaacctagagagacctgcacccgggtcccacgtggaagactggctggtgccattttgtcttctgtggatggatccaggactaaacctgtttcttatgagtcacaggcacaaaggaagggcactacaaccacaaccaatatcagtaaagctttggaagacctctgctacctatttaaaataatcaacactcagccagaagagattaccacagttccagagacaatgctggcacaaggcttccagcccatcctgtccactgacacggagaatgaaatcgtcctgcctctgggctccttagatcaggaagtagttacggaaaacagatctccgcccttctgcagcccccttaagattaaggaggagtatctaatctctgaagggggaatgaggcccttctgcaaggtattcctgctctttccaggaaccatcggcagctggtttggggaaagaagcaacgactccaagtgtgacctgacgttgcaaggatacaatgaggtgagccacgcacagggcttcacgtgccctttgagtgtccaacactccatcagcaagaaatcaaggccgcgcctcttccccgggaaactcgagtcccgaatttcctcggaaagcgccccagcggccacggccaacggatgtgacgaggctcatctgataccggggggaaagtttcgagaacccttaaaggggcagcgagggcctgaactagggccccggccccgcgcgcttgggggtccgcgggggtctattcgcccggcagtggcgggagcttccgggggtgactcggaggtcagatgctactggaacccgctgcctcccctggcacccagccctcaggccacctaccagctctctgcggactgtctaattaatactcgtttagccatagacgccaagacgcagaaatgcgttgagtaa

SEQ ID NO: 117723 - DNA, 1219 bp, Homo sapiens
gagacctctggccttttaccagggtaactgtgcattgggaaaggcaaatgatcagacatttcagggactactggacactggctctgagctgacattgattccagggtacccaaaacgtcattgctgtcccccagttaaagtacgggtttatggaggtcagacagatggatcttggagaatgacagtgggttatcataagcttaaccaagtggtgactccaattgcagctgctgtaccagatgtggtttcattgcttgagcaaattaacacgactcctgccataaagtgggttgtgcacagcagcattccatcatcaaatggaagtggtgtatatgtgatcaggcttgagcaggtcctgaaggcacaaccactgctgagtgcccaatttcagcagcagagaccaatactgagccttcggtatggcaccatttcttggggcatcagtcagctacctggtggcaggttgattatattagaactcttctgtcatggaaatggcagagtgcttctgccaagactaccatccatggactcacgaaatgccttatccatcatgatattccacacagcattgcctctgactaaggaacttgctttatggctaaagaagtgtggcagtggtactgtttttcccatagccaggattcacgggtccaggaatcaaggggtggaattggaagttgcaccactcaccatcacccctgctccttccccaactaaccacgaccctcgcaacactcacctcacttcccccttaaatgttggccctactaagcaggaggcagttcctcgcgcagaaagatacaacttcctcttcaagggagatcagttggagacccaagtgtgtgttttggaagtgagaggaaggtgcctgcggagggagaggctaaagggagaagaaaggaggatgtgggtggaaaaaagattagaaggaggtgagaagacccagaaccattgcacctgtcactatgactacatgactacgattactcccatttcacaggggaagagagctgaattatcttggagcttctcctttgatatagcagttgtacagctgacccctggaagagcagaaatccttggctcgggttctggagtggatgggagacagtttactgataaacttattaaaaattttgaagagggttgtggtaggattgagaaggcaattattcttgatgatgatgatgatgacgatgatgatgatgaaatgtga

SEQ ID NO: 117724 - DNA, 1221 bp, Homo sapiens
ctgtctctgagccttggtttcttcatcaggaatagagatacttattctgcagggccaatgattggcatctaagagatgataaacatactgaatagtgagctcattcttgatactttgtgattcatcaacttgcagaagtatttctgccttatctttcactccttctacacagacacggcaaccatccgatttctcaatcttttccccacctttcccccttttctgctcatctctttgtctccactcttgccaattttcttctcgtgaatccttctgtactgggtttgacaatggaagatcatgttgagcgttacaaacagcatgggaggatttctggggaattttcttaaaagcaagattcctgagctgtggaaatacacatttccccaaagccaactcactttcatttcccacaatgatccaggattccaatagctcagtgagtaaaacagacccggtctctgcttttaaggggctcacaaagtaaagaggaatataatgactcgtaaaaatatagagggtactgtggtcgtgtgggtggagtgtatctagcttttgggggttctgtatgttagctcccctggtttttggtattctggttcctgcactaattcgtttacgataattggcctccagctgcatccatgttgactctgatggtgctagttgccgccgaattgcttcccctaccagttccttaagtttcttcttatgatcccggctggttttcttatagaaataaagatctttttccaactgctggattttatcttcatatgttttgaaagtttccataatgccttctccatcttgttcaaggctgacctggctacggccactgctgagtgcccaatttgccagcagcagagaccaacactgagccctcaatatggcaccattcctcagggtcatcagcgagctacctggtggcaggttgattatattggacctcatcacccctagtgatccattagcaacatttttgcttcctgttcccgcaatattatgttctgctggcctagaggtctttgtttcagaggaagaaacactgccaccaggagacacaacaatgattccattaaactgaaagttaagattgccacctggacactttgggctccacctggcaggctccacttcacattctagttctcttgctatttccactacttctacagtcccctcctccatagaagtcttgaacccctcaaaggcatccat

SEQ ID NO: 117725 - DNA, 1374 bp, Homo sapiens
atgtgccctgctgtcacatgcattgaaaggttttgtaaatgtattgctctcagaacacctcagggacttcctgtggacccactcactggtctacaggatgcggggcttgacgtcacacagaatgctaccatgagggctctttctgagctggctataaagaaattctctgacctactttgtttgaaagtagatcataagaccctcattccagaggtcctgccctacacccaggggaaaggaatgccacacagagaggccaagaagaatctgaaagacagtgagcagagggggagagccactgagaagaaagagtcaagggagaaaagtctggatgtggatgggagggatgagggcacccacactgctcatgggaaactgccttccaaatcctcagtgctagttccttattgggagtggagttggcggtcccctgctgctgttgctgtctcctggcctcaccaggtgtctactgttagaatgagggcattgattggaaaagaatgggaccctgcaacttggaatggggacatgtgggaggaccctgatgaagctggggacactgagttaataaactctgatgaacatttttggccagaagtaacagcttccccatccccagtagtggcaacgtcctctcccccacccatgctgctatcagcctttccacctttgtctgaagagataaaccctgcgctgcctgaggcagttgccaggcaaaataatgttgattctcctcagaagccacccccaacacctctgtttgcttctaggcctataactagactaaaggcttggtgggcccctagagtgtcagaatgcataattggtatagacatatttagcagctggcagaacccctgcattggctccctgactggtagggtgagggctactgttgtgggaaaggccaaatggaagccattggagctgccatcacctagaaaaattgcaaatcaaaaagaataccacatccctggagggattgtggagattactgccaccatcaaggacttaaaagatgcaggggtggcgattcccaccacatcctcattcagctctcccatttggcctgtgcagaagacagatggagcttggagaatgacagtggattattgtaagcttaaccaagtggtgactccaattacagctgctgtaccagatgtggtttcattgcttgattttgagtggggtccagaacagcagaaggctctgcaacaggtccaggctgctgtgcaagctgctctgccacttgggccatatgacccatcagatccagtggtgcttgaggtgttagcctttgggaagctccataggcgaatcacagtggaagcctctaggattttggatcaaggccctgtcatctcctgcagatag

SEQ ID NO: 117726 - DNA, 945 bp, Homo sapiens
atggtgggaaaggccaaatggaagccattagagctgcctttacctagaaaaatagtaaatcaaaaacaacaccacattcctgaagggattgcagagattgctgccaccatcaaggacttgaaagatgcaggggtggtgattcccaccacatccccattcaactctcccatttgtcctgtgcagaagacagatggatcttggagaatgacagtggattattgtaaacttaaccaagtggtgactccaattgcagctgctgtaccagatgtggtttcatttcttgaggaaattaacacatctcttggtacctggtatgcagccattgacttggcaaatgcctttttctccattcctgtccataaggtccatcagaagccatttgccttcagctggcaaggccacaatatacctttactgtactacctcaggactatatcaactctctggctttgtgacataatcttatttggagggaccttgactacttttttgcttctgcaagatatcacactagtccattacattgatgacattatgctgattggatccaatgaccataaagtgggtggtgcacagcagcattccatcatcaaatggaagttgtatatacatgatcaggctcaaacaggtcctgaaggcacaaccacctctgtcattgcccaatgggcccatgaacaaagtggccctggtagcagggatggaggttacgcatgggctcagcaacatggacttccactcaccaaggctgacctggcgacaaccactgccgagtgcccagtttgccagcagcagagaccaactctgagccctcgatatggcaccattccttcattgcctctgaccaaggcactcactttacagctaaagaagtgtagcagtggacccatgcttatggaattcactggtcttgccatgttccccatcatcctgaagcagctggattga

SEQ ID NO: 117727 - DNA, 1270 bp, Homo sapiens
atgggggatccttctagacgtcgaacatgcagggctatgcaagccaagtatccattggtttttaaagggtgtggtgtatgttggggttctctagatccaagatgcagggttgcaagccaagtatggccaataccaaaacgcctctcccgcggttggccgtttcataatgcagttggcagacaggtttccgactggaaaagcgggcaggattttgccgatttcggaaccacccatcaaacaggattttcgcctgctggggcaaaccagcgtggaccgcttgctgcaactctctcagggccaggcggtgaagggcaatcagctgttgcccgtctcactggtgaaaagaaaaaccaccctggcgcccaatacgcaaaccgcctctccccgcgcgttggccgattcattaatgcagctggcacgacaggtttcccgactggaaagcgggcagtgagcgcaacgcaattaatgatactttgccttttaccagggtatctgtgcaatggaaaaagaaaattatcagccattcagggactattggacaatggctctgagctgagtttattcccagagaacccaaaacgtcattgtggtctcccagttaaagtaggggcttatggaggtcagaagacagacagatcttggagaaagacagtggattattgtaagcttaaccaagtggtggctccaattgtcgctgctgtaccagatgtggggtttcattgcttgagcaaattaacacatctcctggtacctggtatgcagccattgacttgacaaatgcctttttctccattcctgtccataaggcccatcagaagcaatttgccttcagctggcaaggccagcaatatacttttactgtcctacctcaggggagatgggaaataaatatgactaaaattcagggaccttctacctcagtaaaatttctaggggtccagtggtgtggggcttgtcaagatattccttctaaggtgaaggataagttgctgcatttagtccctcctacaaccaagaaagaggcacaacacctaacgggcctatttggatttcggaggaaatacattccttatttgggtgtgttactctgtcccatttatcaagtgacccgaaaggctgccagttttcagtggcgtccagaacaggagaaggctctgcaacaggtccaggctgctatgcaagctgctctgccacttgggccatatgacccagcaggtccaatggtgcttgagatagcagtggcagatacagaggctgtttggggccattg

SEQ ID NO: 117728 - DNA, 1979 bp, Homo sapiens
ctgacaatttatgcagtaaatctgtctctcatccttccccaaggtgacctctggccttttaccagggtaactgtgcattagggaaaaggaaatgatcagacatttcaggaactactggacactgggtctgagctgacattgattccagggtacccaaaacgtcattgctgtcccccagttaaagtacgggtttatggaggtcaggtaattaatggagttttagctcaggtctgacttacagtgggtccagtgggtccccggactcatcctgtggtcatttccccagtgccagaatgcataatacatacttagcagctggcagaacccccacattggcttcctgactggtagggcgagggctattatggtgggaaaggccaaatggaagccattagagctgactctacctagaaaaatagtaaataaaaaacaatatcacatccttggagggactgtggaaattagtgccaccattaaggacttgaaagacacagaggcggtgactcccaccacatccccattcaactctcccatttggcctgtgcagaagacagatggatcttggagaatgacagtggattattgtaaacttaaccaagtggtgactccaattgcagctgctgtaccagatgtggtttcattgctggagcaaatcaacacatctcctggtacctggtttgagtggagtccaaaagaaggctctgcagcaggttcaggctgctgtgcaagctgctctgccatttgggccatatgacccagcagatccaatggtgcttgaggtgtcagtggcagatagggatgctatttggagcctttggaacgccgccattggtgaatcacagcggaggcctctaggattttggagcaaggctctcctgtcttctgcagataactactctccttttgagaggcagctcttggcctcttactgggctttggtggaaactgaacgtttgacggtgggtcatcaagtcaccctgcgacctgaactgcctatcatgaattgggtgctttctgacccatctagccataaagttagtggtgcacagcagcgttccatcatcaaattgaagtggtatatacatgattgggttcgagcaggtcctgaaggcacaagtaagttacatgaggaagtggctcaaatgcccatggtctccactcctgccaccctgccttctctttcccagcctgcactgatggcctcagggggagttccctattatcaattgacagaggaagagaaaactagggcctggttcacagatggttctgcacgatatgcaggcaccacccaaaagtggacagctgcagcactacagcccttttctaggacacccctgaaggacagctgtgaaggaaaatctccccaccaccccgtcatcgcccaatgggcccatgaacaaagtggccatggtggcagggatggaggttacttgtgggctcagcaacatggatttccactcaccaaggctgacctggctatggccactgctgagtgcccaatttgccagcagcagagaccaacactgagccctcgatatggcaccattcctcagggtgatcagccagctacctggtggcaggttgattatatgggacctcttccatcatggaaagggcagaggtttgtcctcactggaatagacacttactgtggatatgggtctgcctattctgcacgcaatgcttctgccaagactaccatccacggactcacggaatgccttttccactgtcttggtattccacacagcattgcctctgaccgaggcactcactttatggataaagaagctccaagtgcttcagttttgggactcgcactggctctccttgctcctcagcttgcagacagcctattggaggaccctgtgattgttaagggtacagatgaagctgaatatttccagtcagtacgggaagagcctgattctggggtgaagaggaaaaaaatgttgaaaagtgggaagaactactga

SEQ ID NO: 117729 - DNA, 765 bp, Homo sapiens
atggggaaaatagtccagcctgagaaagcagtaagtgcaaaggcaggggtgtgtttgaagggctgtgactgttccgagtacaaagttcagtgtgagtggcaggatacctcaccaaagtacttgggcattgtgctttcttttggagaagagccagtgacacatttacgctgggatttacatgcttggagttacgctcttagcaaggtaataagcacaatatgtaggagaggaaaattctcagaatttaaagctcatacagctccagttcgaagtgtagacttttcagctgatggccagtttctagctacagcttctgaagacaaatccataaaagtatggagcatgtatcgccagcgcttcctgtattccttgtatcgacatacacactgggtacgctgtgcccaaattttcacccgatggaagactaattgtgtcatgtagtgaggataaaactattaaaatttgggataccacaaataagcaatgtgttaataacttctcagattccgttggatttgcaaattttgtggacctttaaccccctagtggtaccatgccatagccttcagcaggttcctgatcaaactgtgaaagtctgggatgtaagagtgaacaaattacctacagcattaccaaggatggtttactacggagctaaatgccatttgtggggctgttggagcttcacggaaaatagtgaacttagctttcaactgttctgcacatctatacccatctggttttgagttatttggtgctgcatag

SEQ ID NO: 117730 - DNA, 812 bp, Homo sapiens
ctaggcggccggcagcgcagggctgcccgctaccccgcagccgagggcgcgcagagtggggagacggcgcctggggccaggggcgcgcggagccgggggcgcgggcggggcggctggctgcagggccctgcgcgccaccgcgcgagccgctgggtcacagcccgggccgcacagcccgggccgcaccgcccgctccgcgaggaagtgacgactgcgccgtcccgagagcaacaaagttagagtctgcgggccgcactcgcctgcgccccgcacccctccgagcagcccggggatccagcacgcaggtaagccgcgggctcggcgccccctcccgccaccgggcgccggcgtggggctcggaatcgttccggggctcgggctgggccgcgcgggcgcggatgtggcgggccgggttgggccgggcgctggggtgccggggtgctgcagggagggagctcggcggccggggtcggggcgccgggctgcgccggtgttgtcgccgctttgccgcgggacttcaaacagcaagggctgcagcggggccagctccaggcgccgttggccttgagttcgcaggttggagcctgctgaagctctgccctctggtatgtttatgatgaggaaatcctgttcagtggcccttacatcatcattgtcatcatcaccatcatcatcatcatcatcatcgtcatcatcatcatcaccgtcgttaacccggccagacgtctctcccagagtgacagcagcaactggggacatgtacagaggctccttctcaggcctgacaaaggcactcagaacctggcccaggc

SEQ ID NO: 117731 - DNA, 1071 bp, Homo sapiens
atggggcggacctggttcaagtcccggctgagcactcaagggctgggagcagcctccgtcgggtcaggggtattttcccacaaggtggactcggtgggtttgaaagatggggagctggggacccctggacccggcttaaggctccgtggcccggcccgcatctcctgccgccgtcgcaggccctttgaagctgccccatcctttggtgcttttgaaatgtctttattaatcacctaccgtttgccaagccagaggtggcaaaggtgctggggaatgaaagggaggcgagtgatttctctgactccttcaggcccaggcctccgaattcctccaactcccagtttgaccatatttgtgacaagtcagagacgatacagcaaggggaagaagacacgttcccttccctctagaaagtcacagtcacgcacagaaggcagaaggcttgcagtgcacagcgacgggataaaggaaccagctctgcaacagaaccctccagaggaggcaaaggaggtctctcaggcagagcgagaacatgtcattccttcagggacagcagaaccaccacagcgtctcctggacttagcagaggtcgctggtgtggctggagcaggggatgccaagcctgctgagggcttcatgggccgcagggaggagtttggtttttctcctgagggcactggggagccacagcagagtttagagcagaagaaggacacaatttgtgccctgtgcccgtgcgtttgccgattcccagggcccgagcgctccggcgagtgtgtgtgtaacgccctctccctggacgcctcgagtttaggaaacggcggagccgcccggattgaaattctcggcccgtgcacgcccggcggagaaatccatgacgcattgtttagacagacgcctttaaaccgcgccgcggcggggggcggcggccgggggcgcctgcgcggggaagtcctggttgcaggcattgtgggcaccacccgtgctgcccacaggaagatcattgtccgtagcagcatcctgagctgtgacctgcgtttatttccccatggggacgtggggtctccctga

SEQ ID NO: 117732 - DNA, 169 bp, Homo sapiens
gacttctctgactaccagatccagcagatgacggccaactttgtggatcagtttggcttcaatgatgaggagtttgcagaccatgacaacatcaacgccccatttgacaggatcgcggagatcaacttcaacatcgacactgaggaggacagtgtgagcgagcggggct

SEQ ID NO: 117733 - DNA, 189 bp, Homo sapiens
cgccccatttgacaggatcgcggagatcaacttcaacatcgacactgaggaggacagtgtgagcgagcggggctcccagcgcagctctgaggcctgctgcagcgaccgcatccagcactttgatgaagacgaggacatctcggaggacagcgacactcgcggtgctgcccaggtgaaggccagagccag

SEQ ID NO: 117734 - DNA, 352 bp, Homo sapiens
acagtaagcacaatcttaagctcactgcaacctcccagcctcaccgcccgatgcagctcaagcctgcatgcgtcccacctgtgctgtcctcccctcacatgtggggcaggtctgacacctcagagggtcctgctcactgacccccggcagtcctggagggtctgtgtggtactggggctctaggcgtctcccccagccaagctgcaagctcagcaccaggctggctctacccgccctgttgaccggcaggccccatctgtgctcacagctcctccccttgtttggccaccctttcctcagggcatctgcagcaagtggggggcacagcacgggaaacggggccaaggccaca

SEQ ID NO: 117735 - DNA, 9026 bp, Homo sapiens
atcctctcttacaattgagatttctcagttaaaagtttcctgacctcccactttctttgcagttgttctgaacacttacatataccagatacacgccaaaagtagaagaaaaaagttaaagaaaaggcagcattaaatttaggcaaggcttcgaagagttgatcatctggcaacatggcaaaccggatgggttcattataaaacaggaagtgcagcattacaacatggggggaaagggcaaggacagggaaggggtcactagtgaagagcccatgttaagttgattttaaaaaagaaagcaagcaagcttcacacgatcttcttaatgctattacgtttgaaactgccagcgcttctttgcttctgcacttggcttgcggatccgtggcgagttcgtccactgttacagtggccagtggtaggggagagttcaacgttctccttgtcgattcctggggaatgctgggaagttgcaagtgaggtcatggaattagaaaggttaaggttggcagtgatactaagctggctctgcagtgcaggagggtaaggagatgtgggagtcaggagggattcttcactggtttcttcatcaattccaggcaggtacgtgtcaatcaaggcatcaagaaacttaacaataagctcagcatagtctggaatttgtgtttgctttgaaaacggtcctgcaaaccgccacaagccattaaaaccaaaactttgcaggtaagatgtttggtattgtggtggggattcttcatggtacaccacactctgcacaattccatggattggatttaacaaatttggatcttggcacaatgataacagggtgttgatcttagagtccaacaaattatgcacaacaggaaagactttgggaaacacaacactggcctctgctaagtattcataaagaattcgttgatcaaactcatctgtggtatattttaccagtgtagctagaacagtaagaagcagcgcctggatcttcggatcagtaagtacttcttcatccaagagaacatttgattcagacactgaaactttacgtaaatgtgggtgctgttgtgatgaggaaatcctctgagtttccatttcataatcagtttctgctactctcctcattttggggggtgttgtgatccctgattccatttcttgccttttaggagcctttgtgtctgatatcaagtgatcaaaacttttccttgttccaagcaacttcttagtgttggcctgagaaggttgccccatgtccaggctcatggatttcctggctcggggactggtctggccgacagttggataggtggctgcaaggtatccttcagaacctttgggagaggaccatggctgagtctcctttagtgtcctataggaagggtcaccatgatgaatgggatatgtatccataggaacattttccattgaaatatcagtaagaagaagtgactttctatgttttaggctgcagcgacttcgaacttcttcagacactgtaagtaaagctgctaagtaggccacgctctgtgtattcacttcaaatttgtcacaatttctgtgtttgttaaccagagttagtagtgtatgtaaaattctgactgttcttgcaacaatagcaggtgaaggatgcctgtacccttttaaaaggtgtccaaccaatgcaaagttaaagttagagttgaaattgagtccaacaaaatgatccatttgcttgcagtgccactccagaggattccggattgccataaatacttcctctggactcttgtcattgaatatacggagactatctaaagtatgcaggttttgttcaagaagtgcggtacctgctgaatacaagttgacctcatcaagctgcagcacagccacagctacccaaaagagggctttgtgcagaggcgagtccttattaagaagtggctgtaatttggttagtgctattactgtagcttctatcagaacttgactgttgtaagtgtcaggtccttttaagcaactctcaagtgccttgctaagaatacggattatctgctttatctgcccatgagacactcgtttgctaatacacccaaagacaacaagagctcttggttgcagggatggattatattggaatgcaaatctttgagctagttctgtccactggtccagccacttgcacgttggaatatctctcatgcatgcctccatgatctccaacaaagcttctgtgactgtttccaaggatgtcaaagcaaaagtctctctctcataggagccaggagagaatgacctgtcccggtaactggaacggaaggcaatgacagcagctgacttgactttgctaatgccaaacagcaagtaaaatttgggtaatgagaactctgtcagactgagtctcaaaacttgcttggtctcttcactaaaatgaagctgtgaacaagtacacagagagtgaatgatattaatgaccagtccatgtgtggaagctctaagggagagcggacctgtggctactaagaaagtaacaacgtggaagaggtagggaagatgagctgccacatcaagggaattgttgaaggacagcatcagcatgtagcgtgctaaaatagcaatatcatcccacataagatgttgttctaaagtaggagttggagataagcatgtcttgtcaattattttgcacatccttccaataaccttgcttgaaaccaatttcacatttccagaagccaaagctacagcagtatctgccatcacctcagcttttattgatcccaagccacctgttgcactggttttgatgaaactgtctagtacaacatcaagcagatctgtaatctgcccaaggcttccccatatttttgcttgaatagatgggtacatctgtttttcattgatggtcattgttatcagcttgtcaagaatagcagtaactctttgtcgtttggcatcatcattatgcttgcaaaaacgaactagatttgacagccatggagtcatgtattccaaacaaaggtgtttcaattcaatactagatttgctaaatccagaaatacactcttccaaaaattctaacgtgaggtgtggctcattggctgccagtgtcttactaatagagacaataaagagggtgttgttggcagggatacataaacctgatgtctctagtaactggccctcgatttttaaattaaaggtacaagttaaggcacacagaagattataggcagctgaccgtaaactcgggtcagaactgcctaaattaagtaatgcgatattgagcagtgtcccagggacatcttttggccgaatcttggtgtgttgggggatagagtcgggctgtgacagttcccagcgggtccggatatgaatgatagactggacaatggcttcacactcctggtgcatgaaggtgagcggcgtgccctggtttgcaatggttaaggtgaactggttctcatctactaggcagatttcttcaatttccgaagcataataaatgtcatttagaaagactgattgccctaggacttttgttcgctctgctgaagttacttggacagcagtagaaccaactttaatggaaactttggtgtctttgtgagctagcttgagagcattgtggaataccttcaggtcctcttctaaagccaaggtggcagcaggtagtttctgttgttcatgctctatgtgctcagccagtttcccaggacagtctatgaaaacaagccttttgctacctttgaggccagtcagcagccgctcatgatacttggtgtactccctgacccaggagttacagttatagatatagactgcggagacgttgtcgtaagcaaagccaggaaaaacaacaaaccacttagagagaaagtctgttttaaagcgattgctaggcccggtatgggtaaggtccactacaatttcatatggctttgcataatatggctttaaagtcagtaagacatggtatatcagcaaatcaccattgatttgaccagttttgaacctccgtgcaacataataaaaaataggattcccagctttggaagtcccagcttggtagaaaatacttaacgttttcaaagccttgaattcttctttttcatgtacctgatgcctagtcataaattcctcaaactttgaactggtaaggttaaggctggaccagtgtgtatctgccacaggtttgtgctctggaggacccaggtatgcaagaagtgttgccatcttatcaaaaggtcgtcttccaacagctttatgatccctgttgctggaaagatactgcccaattttctcctgattgttccagagtagacgatgtaaagcaagcacattgccgtcacttatgaaggaaagactatgatttactgcatcacttgtaggacaatcagatgctatatcaaggaaaaacctgcgtgctgcatcaaagttgcttttcacaaaatcattgaaaggccgcatatgttcttcttttgtgaagagaacatgattggcaatactctgaagtatctttgacattaacttcaagcccctttcgattctaggtggtggctttttatctaaaatccctgcttcatacggtgagacaatggcaggattgataaatctgaggaacatggcacttcctactgcaccgatgctgttctgagggaaacgctggctaaccactgattttttgttttcctttttttcttttactgtagctttattcagtagggagtggcaagttgcctggtataaacagtggcacacacttcgaagttgaggggggaattctgaggaggaactgatgatggcatggaagaacttttcagtcatctgaaggaggttccgctggttttcctcaaggctctctgatggttctaacctggtaggatccacttcaaagctaacatgttgccaatcagaggatgtgatcacaattcgtaataaaggatccaggagtttttgtagataggtagcaccatataccttgaaacagaatgtcattattttactggccaagctgttgcctcggaagagagtctgcatggagtctgccaattctacttctttagaaaacatgttccagagcagttggtagagtaaatgccgagaatcaaacagagtaaccagaactcgagctagttcatcccactgagaacaaggaaccacattggccagagccatcgctatagggagttctccttgatcacccatcattgtgaccagttccaccaatctctcaaaccgatcagccaatactgtttctgcaagtgtgtcaaattctgtgccttgttgaaggatttttgtcagaacttccataaatgtagctcttgtctggagatccttgtggtaacctaagcctatggagtgcatgagaccactgtctacgttggcattgagtaagtttgacattgcaaggaccgtacagtgcctcagtgatgccagcctccgagacatgccacgtttcctgccacctgtttgcgcactttcatcttcaacttcactgcagtcattcaaaaggttcataaataatgtgaagtatttaagaaataactgtgatttggcttccatcaattccacaccatctccttcttcaggctgcagagggagaccagctagaagtgaaactactgcttccatgcttgcctggtccaaatctcttgtaagacattttacatcatcatctgctgcttggtttgatgttcccataacccagtctgtcaggtattctaccatcttattcctaaatttcatctcttggcaaaatgagaggtcatctctccttgccatcattacttcaactaattgacacagtttcgtttttatttgaattgcatggaccatattcccaagcacacgaacatacctgaccagatttaacatcattgtttcaatgctagcttgccctagatgttcagagctgccttcagtatgattatctagcaagttcttcattatagctatggtttgttctacaaattgagtattggtatcagtcaataaaacctgtccttgggagtcaaaaaacttgctgatggtattcttcaatttgttaaatagcattggatacagagcaggactcaattctagacccaccagatccttaacattggtccgtatttgaagtcccactttctcatggttacacaccattaaggacaacagccgatccataaatttgctgacaggtgtatctgcgtttccctctgaagacatcactgaaatcatagaacccttacgttcactgactggacccatgggtgggctataggttgccaggccagaattgcttctctgctggaggcacactcccccaagggcacaaaggaagccagtcatgttgatccattcctgtagggagtctgtgtcagacaaatctatggatcctcctccactcacatgggacattcgcctcttaacaatggtcttgtgaaggctttcagcagcctggccatcttccattttggcttttggatagttaaggattagctttgttgcttgttcccattttgcatgtgtatcttcccaagcctcagtgtttcctgcagtgggatgctcaatgcgcctcagcagtgccatcactcttttctgaagtgctgctcttcctgttgacatcatattgctgacagaggcaaactccatgaatgtgttatagttgggcaagaggttatgcactgacacttcatccaccccacaccggatatctgcttcctcacagaggtggcggaaacaggacatggcaaccagaacagcttcagtgtcagggttccacagaaacatgtacagggccacttctagtttggtctgggcttgtcggcaaatcgggggggttccgctgcatcctgctgcactatccatagaggagttcccttttcccttccggagagaggctccaggagtacgtagtaattcttcatgatccatggacatttgactggtatttccactagaaggaatatcacatcctaccccgtaaaaaaggagaaagtgacaggaacttctatctgcctgcttatttttaagaagaaatttattcctgcagatcaatatttcccgcaaccacttgagaatttctgtgctactaagcatttgatgactagttaatttcttgcagatgtaaaaaagcatttgtgagctaatctcccaaaatgtttctacaggagcatcaggattccacaaatcaatgctatctaactgatgaagaaccagcagagcctccattgcttcctgagcaatctctggcatgtgtgactgagggaccagttggacgagccctgtaattaattctgctgtactgccttgggtttcgggcccctgttttcttggattacaaagcaagagctttggatctgcatgaattagtttcaccatggacaagagaagatacttatagcttcttgtctccaggtctgtaggtttttctttaaatttaaggcttgttactttttctttaaatgtaagactcggtgccattcgtattgctgggtgtgctccacaaccttgcactgctttatgaagtgtttcaccaaacatatttcgaagttcaaccgagtgacaatacacagcatcaatcttaggccaccaatccaatgcggaattggtgatgattcgatggagtgaatttaccagcacatagtgaaatgtagaaggtgaattctgagccaggcagatcttaaagtgttggttgttgtgagggcttatacgaaagcaagaaacaaggcagtcaatcattagatccacatctgcaggctgactgcctcttgagaatggcttacttggattaaaaagcaggttcttaagatcaaccaccatggactgaacaagtaggaaaatgacagagttatcttcccaattgatgtaagtacttgctttacacagtttgacacaggcaattgcagcactttctgtcagctgcctacttcctccatggccagcaagagcttttcgtagactgtccagaaataacttcttattcatgttgttttcatcaaccacgtctttggatatatcctggattatttctggacacaagataaggagaatgatttgtagtggccaaactgctgctttacgtttggtgctttcagcaaaaccatccaccaagtcaaatagcttttctgcacattcagccatatcagtctgtgggatctggtatagttttgtaaattcatctggataattttctacccagttccaaaatgccttttccaggctatttataactgctaactgcgcaaccttctttagggctttaaatttaaatgctgtttccttcaggagtcgttttaattttgcacaatccacattgatatactgtaacaattctatatcatgaacatcaacattgtcttctgaacaaacagttaattcctgtaacctggtagaaatgcgactaaagactgcattgaagttgttgcagctgagagaaaataaaaccccagaggcagaattccgaagttcagctgcatgctggtttccttcacgacaggtgtgaagaaaatggcagatttctggcagcaactgtttgaccagcatcgtttcatctaatctcattgtgtcctttggttgcccagcaagacatttttccagtgtatccaatataatcaactgagagagatataaatttttttcagcagcttctccaaatattctcatattgttaacattctttaaaatagtagtgaggccgcttataaccaaagaaaacttgtatttggaaatattgattagacattccttgttgtgctcagtactgactttggtatgtgtgttctgctgtcctgtttttattggaagctgctcgtcgaagcggctgaccacggcctggacccattccaccggcctgtgcgcggccatgtcctccccgcggccggggggcggcggagggaagggtgggccggcgccctgggccgggaagagggcggggagcggaggctgaggtgagggaagaggcaaggagagggtctgtggagtgcaggctcccagtgttcccacgggggtggggatggggggtcagcgccgagcgggagtgggaggcccccgcgccgccccgg

SEQ ID NO: 117736 - DNA, 484 bp, Homo sapiens
ttctgttgggcagacttctgtggagaccttaccaggcgtcagcatgtggcacaagagacagtccctgctgggggcagttggtgactctggagctggtgctccgaagccattagcgctgccaggctccttgcagctcatggagtcctgcctgggtgcaggcagtcctggccgtgtgccagctttgctctgcattcaggtggttggagagtctcacattctcactcaggagagcttcgtggaggagacgctgacggagaccaactgcaggaacactgtggacttgttgaggaggctcggggctgaccctcggcacccgcatggtgctgggacgcaggaggctcggggctgcccccttggtgcatgcacggtgctgggacgctgtcagacgctcctgtctttgccccgaagcagaggccaagagaggcacaagggccgcacacctgcctgctcctcttggacacgggtgcccgagcataccctgcaa

SEQ ID NO: 117737 - DNA, 5049 bp, Homo sapiens
atgattatctcaatagatacagaaaaggcctttgatgaaattcaacagcccttcatgccaaagactctgaataaactagggattgatcaaacatatctcaaaataataagagctatttatgacaaacccacagccaatatcatactgaatgggcaaaaactggaaggattccctttgaaaactggcacaagacaaggatgccctctctcaccactcctattcaaactaatattggaagttctggccagggcaatcaggcaagagaaagaaataaaggctattcggttaggaaaagagaaagtcaaattgcctctgtttgcagatgacatggttgcattttggaactgggtagaaaattatccagatgaatttacaaaactataccagatcccacagactgatatggctgaatgtgcagaaaagctatttgacttggtggatggttttgctgaaagcaccaaacgtaaagcagcagtttggccactacaaatcattctccttatcttgtgtccagaaataatccaggatatatccaaagacgtggttgatgaaaacaacatgaataagaagcagatactgagcctcaaatctgctaagattgacctgagtgagacccttatctcctgtagaaaaagagctgaaattgtgaaaaaacaaacacaaactcttatcatgcaagtggctgacctgcaacaaaaggtgcatgtacagcctaaccaggtgtctactgttaaagtgtgggcattgattggaaaagaatgggaccctgcaacttggaaagggcatacctataaccagactaaagtcctagcaggtgtgttactctggcccatttatccagtgacccaaagaactgccagttttgagtggggtccagaacaggagaaggctctgcaacaggtccaggcagctgtgcaagctgctctgccacttgggccatatgacccaacagatccaatggtgcttgaagtccgtaaagtgggtcgtgcacagcagcattccatcatcaagtggaagtggtacatacacgatcgggctcaagcaggtcctgaaggcacaacgtcggtcttcaagttcttcagttttggaacttggactggctctccttgctcctcaccctgcagacagcctattgtgggacctcgtgatcgtaagttatttctggacagtctacgaaaagctcttgctggccatggaggaagtaggcagctgacagaaagtgctgcaattgcctgtgtcaaactgtgtaaagcaagtacttacatcaattgggaagataactctgtcattttcctacttgttcagtccatggtggttgatcttaagaacctgctttttaatccaagtaagccattctcaagaggcagtcagcctgcagatgtggatctaatgattgactgccttgtttcttgctttcgtataagccctcacaacaaccaacactttaagatctgcctggctcagaattcaccttctacatttcactatgtgctggtaaattcactccatcgaatcatcaccaattccgcattggattggtggcctaagattgatgctgtgtattgtcactcggttgaacttcgaaatatgtttggtgaaacacttcataaagcagtgcaaggttgtggagcacacccagcaatacgaatggcaccgagtcttacatttaaagaaaaagtaacaagccttaaatttaaagaaaaacctacagacctggagacaagaagctataagtatcttctcttgtccatggtgaaactaattcatgcagatccaaagctcttgctttgtaatccaagaaaacaggggcccgaaacccaaggcagtacagcagaattaattacagggctcgtccaactggtccctcagtcacacatgccagagattgctcaggaagcaatggagcaggcagatagaagttcctgtcactttctccttttttacggggtaggatgtgatattccttctagtggaaataccagtcaaatgtccatggatcatgaagaattactacgtactcctggagcctctctccggaagggaaaagggaactcctctatggatagtgcagcaggatgcagcggaacccccccgatttgccgacaagcccagaccaaactagaagtggccctgtacatgtttctgtggaaccctgacactgaagctgttctggttgccatgtcctgtttccgccacctctgtgaggaagcagatatccggtgtggggtggatgaagtgtcagtgcataacctcttgcccaactataacacattcatggagtttgcctctgtcagcaatatgatgtcaacaggaagagcagcacttcagaaaagagtgatggcactgctgaggcgcattgagcatcccactgcaggaaacactgaggcttgggaagatacacatgcaaaatgggaacaagcaacaaagctaatccttaactatccaaaagccaaaatggaagatggccaggctgctgaaagccttcacaagaccattgttaagaggcgaatgtcccatgtgagtggaggaggatccatagatttgtctgacacagactccctacaggaatggatcaacatgactggcttcctttgtgcccttgggggagtgtgcctccagcagagaagcaattctggcctggcaacctatagcccacccatgggtccagtcagtgaacgtaagggttctatgatttcagtgatgtcttcagagggaaacgcagatacacctgtcagcaaatttatggatcggctgttgtccttaatggtgtgtaaccatgagaaagtgggacttcaaatacggaccaatgttaaggatctggtgggtctagaattgagtcctgctctgtatccaatgctatttaacaaattgaagaataccatcagcaagttttttgactcccaaggacaggttttattgactgataccaatactcaatttgtagaacaaaccatagctataatgaagaacttgctagataatcatactgaaggcagctctgaacatctagggcaagctagcattgaaacaatgatgttaaatctggtcaggtatgttcgtgtgcttgggaatatggtccatgcaattcaaataaaaacgaaactgtgtcaattagttgaagtaatgatggcaaggagagatgacctctcattttgccaagagatgaaatttaggaataagatggtagaatacctgacagactgggttatgggaacatcaaaccaagcagcagatgatgatgtaaaatgtcttacaagagatttggaccaggcaagcatggaagcagtagtttcacttctagctggtctccctctgcagcctgaagaaggagatggtgtggaattgatggaagccaaatcacagttatttcttaaatacttcacattatttatgaaccttttgaatgactgcagtgaagttgaagatgaaagtgcgcaaacaggtggcaggaaacgtggcatgtctcggaggctggcatcactgaggcactgtacggtccttgcaatgtcaaacttactcaatgccaacgtagacagtggtctcatgcactccataggcttaggttaccacaaggatctccagacaagagctacatttatggaagttctgacaaaaatccttcaacaaggcacagaatttgacacacttgcagaaacagtattggctgatcggtttgagagattggtggaactggtcacaatgatgggtgatcaaggagaactccctatagcgatggctctggccaatgtggttccttgttctcagtgggatgaactagctcgagttctggttactctgtttgattctcggcatttactctaccaactgctctggaacatgttttctaaagaagtagaattggcagactccatgcagactctcttccgaggcaacagcttggccagtaaaataatgacattctgtttcaaggtatatggtgctacctatctacaaaaactcctggatcctttattacgaattgtgatcacatcctctgattggcaacatgttagctttgaagtggatcctaccagggcagcatttagtcctaatgcaaagtcccataatcactgtgctgtccgtcccccaaatgcagattttctttgcacaccacggggccactgccaggaggtgaaggaagggtggtataggttagaaccatcagagagccttgaggaaaaccagcggaacctccttcagatgactgaaaagttcttccatgccatcatcagttcctcctcagaattcccccctcaacttcgaagtgtgtgccactgtttataccaggtggttagccagcgtttccctcagaacagcatcggtgcagtaggaagtgccatgttcctcagatttatcaatcctgccattgtctcaccgtatgaagcagggattttagataaaaagccaccacctagaatcgaaaggggcttgaagttaatgtcaaagatacttcagagtattgccaatcatgttctcttcacaaaagaagaacatatgcggcctttcaatgattttgtgaaaagcaactttgatgcagcacgcaggtttttccttgatatagcatctgattgtcctacaagtgatgcagtaaatcatagtctttccttcataagtgacggcaatgtgcttgctttacatcgtctactctggaacaatcaggagaaaattgggcagtatctttccagcaacagggatcataaagctgttggaagacgaccttttgataagatggcaacacttcttgcatacctgggtcctccagagcacaaacctgtggcagatacacactggtccagccttaaccttaccagttcaaagtttgaggaatttatgactaggcatcaggtacatgaaaaagaagaattcaaggctttgaaaacgttaagtattttctaccaagctgggacttccaaagctgggaatcctattttttattatgttgcacggaggcttgacgcaggattggatactgccatagaatttgaggttgttgatgttgaagtttgtccccggaatgttaacaaacatgaagagcaggccaatcggtga

SEQ ID NO: 117738 - DNA, 1044 bp, Homo sapiens
atgacccacaaatatgagtcagaaatagactatgggactctgggtctagagaaaggaaagagtctaggatatgagcacagcttgactttgaaaaagaaagcaaaggactctgaggatggacacagtagcaaattaagaagaccagtgatgcccaccataagagaccctcaaggggtgccactgggcacagcaagcagcccagatcttggttaccaagagaacaaccaccaccacttcaaaagactggtgactccctgcatgctatttctgagggcgttatcaagacccagtccaggtatgggcagaggtgcattctcacctgatgtggaagtagctttcttcccagattcaggggcttctgtgcactgtgctggaggcattctacaccatgactacccaggctgcgttcagattctgcccatcatcaagcacctcattctccgagggccccagaggctcctgtgccatgatcccaacttcagcctgacactgggcatagtgtggggaaaccttccaagtgactggcagcatcgggacatccaccgctgtggccttggccccatttcccgtgttgtgccccccacttgctgcagatgccctgacggcagcgtggccaaacaaggggaggagctgcaggcccttcacaagcatggaaacaggagtgactgggatgcaccgccaggtgtgaaaggcaccttgtcctctcctagaggaatccagcccaaggacttccccactgttgcctggacctacagggagctcaggccccaggtcctctgcacagctttgcccttgccgggaatggctcttggaggctcaagggagcctgagcctctgaccatctgcaagctgcctccaactctcagtcagggtttggatgccccaagctttctcgaggccttggctctggctgcctcagcctggctgtgttttgtgtccatcagagagctgcacctgggccctgactcggagctacagacaaggacgaggacagggtcagtcccggaggacgggcacctcctgaccctggaaggcacttcctga

SEQ ID NO: 117739 - DNA, 9131 bp, Homo sapiens
atttctcagttaaaagtttcctgacctcccactttctttgcagttgttctgaacacttacatataccagatacacgccaaaagtagaagaaaaaaagttaaagaaaaggcagcattaaatttaggcaaggcttcgaagagttgatcatctggcaacatggcaaaccggatgggttcattataaaacaggaagtgcagcattacaacatggggggaaagggcaaggacagggaaggggtcactagtgaagagcccatgttaagttgattttaaaaaagaaagcaagcaagcttcacacgatcttcttaatgctattacgtttgaaactgccagcgcttctttgcttctgcacttggcttgcggatccgtggcgagttcgtccactgttacagtggccagtggtaggggagagttcaacgttctccttgtcgattcctggggaatgctgggaagttgcaagtgaggtcatggaattagaaaggttaaggttggcagtgatactaagctggctctgcagtgcaggagggtaaggagatgtgggagtcaggagggattcttcactggtttcttcatcaattccaggcaggtacgtgtcaatcaaggcatcaagaaacttaacaataagctcagcatagtctggaatttgtgtttgctttgaaaacggtcctgcaaaccgccacaagccattaaaaccaaaactttgcaggtaagatgtttggtattgtggtggggattcttcatggtacaccacactctgcacaattccatggattggatttaacaaatttggatcttggcacaatgataacagggtgttgatcttagagtccaacaaattatgcacaacaggaaagactttgggaaacacaacactggcctctgctaagtattcataaagaattcgttgatcaaactcatctgtggtatattttaccagtgtagctagaacagtaagaagcagcgcctggatcttcggatcagtaagtacttcttcatccaagagaacatttgattcagacactgaaactttacgtaaatgtgggtgctgttgtgatgaggaaatcctctgagtttccatttcataatcagtttctgctactctcctcattttggggggtgttgtgatccctgattccatttcttgccttttaggagcctttgtgtctgatatcaagtgatcaaaacttttccttgttccaagcaacttcttagtgttggcctgagaaggttgccccatgtccaggctcatggatttcctggctcggggactggtctggccgacagttggataggtggctgcaaggtatccttcagaacctttgggagaggaccatggctgagtctcctttagtgtcctataggaagggtcaccatgatgaatgggatatgtatccataggaacattttccattgaaatatcagtaagaagaagtgactttctatgttttaggctgcagcgacttcgaacttcttcagacactgtaagtaaagctgctaagtaggccacgctctgtgtattcacttcaaatttgtcacaatttctgtgtttgttaaccagagttagtagtgtatgtaaaattctgactgttcttgcaacaatagcaggtgaaggatgcctgtacccttttaaaaggtgtccaaccaatgcaaagttaaagttagagttgaaattgagtccaacaaaatgatccatttgcttgcagtgccactccagaggattccggattgccataaatacttcctctggactcttgtcattgaatatacggagactatctaaagtatgcaggttttgttcaagaagtgcggtacctgctgaatacaagttgacctcatcaagctgcagcacagccacagctacccaaaagagggctttgtgcagaggcgagtccttattaagaagtggctgtaatttggttagtgctattactgtagcttctatcagaacttgactgttgtaagtgtcaggtccttttaagcaactctcaagtgccttgctaagaatacggattatctgctttatctgcccatgagacactcgtttgctaatacacccaaagacaacaagagctcttggttgcagggatggattatattggaatgcaaatctttgagctagttctgtccactggtccagccacttgcacgttggaatatctctcatgcatgcctccatgatctccaacaaagcttctgtgactgtttccaaggatgtcaaagcaaaagtctctctctcataggagccaggagagaatgacctgtcccggtaactggaacggaaggcaatgacagcagctgacttgactttgctaatgccaaacagcaagtaaaatttgggtaatgagaactctgtcagactgagtctcaaaacttgcttggtctcttcactaaaatgaagctgtgaacaagtacacagagagtgaatgatattaatgaccagtccatgtgtggaagctctaagggagagcggacctgtggctactaagaaagtaacaacgtggaagaggtagggaagatgagctgccacatcaagggaattgttgaaggacagcatcagcatgtagcgtgctaaaatagcaatatcatcccacataagatgttgttctaaagtaggagttggagataagcatgtcttgtcaattattttgcacatccttccaataaccttgcttgaaaccaatttcacatttccagaagccaaagctacagcagtatctgccatcacctcagcttttattgatcccaagccacctgttgcactggttttgatgaaactgtctagtacaacatcaagcagatctgtaatctgcccaaggcttccccatatttttgcttgaatagatgggtacatctgtttttcattgatggtcattgttatcagcttgtcaagaatagcagtaactctttgtcgtttggcatcatcattatgcttgcaaaaacgaactagatttgacagccatggagtcatgtattccaaacaaaggtgtttcaattcaatactagatttgctaaatccagaaatacactcttccaaaaattctaacgtgaggtgtggctcattggctgccagtgtcttactaatagagacaataaagagggtgttgttggcagggatacataaacctgatgtctctagtaactggccctcgatttttaaattaaaggtacaagttaaggcacacagaagattataggcagctgaccgtaaactcgggtcagaactgcctaaattaagtaatgcgatattgagcagtgtcccagggacatcttttggccgaatcttggtgtgttgggggatagagtcgggctgtgacagttcccagcgggtccggatatgaatgatagactggacaatggcttcacactcctggtgcatgaaggtgagcggcgtgccctggtttgcaatggttaaggtgaactggttctcatctactaggcagatttcttcaatttccgaagcataataaatgtcatttagaaagactgattgccctaggacttttgttcgctctgctgaagttacttggacagcagtagaaccaactttaatagaaactttggtgtctttgtgagctagcttgagagcattgtggaataccttcaggtcctcttctaaagccaaggtggcagcaggtagtttctgttgttcatgctctatgtgctcagccagtttcccaggacagtctatgaaaacaagccttttgctacctttgaggccagtcagcagccgctcatgatacttggtgtactccctgacccaggagttacagttatagatatagactgcggagacgttgtcgtaagcaaagccaggaaaaacaacaaaccacttagagagaaagtctgttttaaagcgattgctaggcccggtatgggtaaggtccactacaatttcatatggctttgcataatatggctttaaagtcagtaagacatggtatatcagcaaatcaccattgatttgaccagttttgaacctccgtgcaacataataaaaaataggattcccagctttggaagtcccagcttggtagaaaatacttaacgttttcaaagccttgaattcttctttttcatgtacctgatgcctagtcataaattcctcaaactttgaactggtaaggttaaggctggaccagtgtgtatctgccacaggtttgtgctctggaggacccaggtatgcaagaagtgttgccatcttatcaaaaggtcgtcttccaacagctttatgatccctgttgctggaaagatactgcccaattttctcctgattgttccagagtagacgatgtaaagcaagcacattgccgtcacttatgaaggaaagactatgatttactgcatcacttgtaggacaatcagatgctatatcaaggaaaaacctgcgtgctgcatcaaagttgcttttcacaaaatcattgaaaggccgcatatgttcttcttttgtgaagagaacatgattggcaatactctgaagtatctttgacattaacttcaagcccctttcgattctaggtggtggctttttatctaaaatccctgcttcatacggtgagacaatggcaggattgataaatctgaggaacatggcacttcctactgcaccgatgctgttctgagggaaacgctggctaaccacctggtataaacagtggcacacacttcgaagttgaggggggaattctgaggaggaactgatgatggcatggaagaacttttcagtcatctgaaggaggttccgctggttttcctcaaggctctctgatggttctaacctggtaggatccacttcaaagctaacatgttgccaatcagaggatgtgatcacaattcgtaataaaggatccaggagtttttgtagataggtagcaccatataccttgaaacagaatgtcattattttactggccaagctgttgcctcggaagagagtctgcatggagtctgccaattctacttctttagaaaacatgttccagagcagttggtagagtaaatgccgagaatcaaacagagtaaccagaactcgagctagttcatcccactgagaacaaggaaccacattggccagagccatcgctatagggagttctccttgatcacccatcattgtgaccagttccaccaatctctcaaaccgatcagccaatactgtttctgcaagtgtgtcaaattctgtgccttgttgaaggatttttgtcagaacttccataaatgtagctcttgtctggagatccttgtggtaacctaagcctatggagtgcatgagaccactgtctacgttggcattgagtaagtttgacattgcaaggaccgtacagtgcctcagtgatgccagcctccgagacatgccacgtttcctgccacctgtttgcgcactttcatcttcaacttcactgcagtcattcaaaaggttcataaataatgtgaagtatttaagaaataactgtgatttggcttccatcaattccacaccatctccttcttcaggctgcagagggagaccagctagaagtgaaactactgcttccatgcttgcctggtccaaatctcttgtaagacattttacatcatcatctgctgcttggtttgatgttcccataacccagtctgtcaggtattctaccatcttattcctaaatttcatctcttggcaaaatgagaggtcatctctccttgccatcattacttcaactaattgacacagtttcgtttttatttgaattgcatggaccatattcccaagcacacgaacatacctgaccagatttaacatcattgtttcaatgctagcttgccctagatgttcagagctgccttcagtatgattatctagcaagttcttcattatagctatggtttgttctacaaattgagtattggtatcagtcaataaaacctgtccttgggagtcaaaaaacttgctgatggtattcttcaatttgttaaatagcattggatacagagcaggactcaattctagacccaccagatccttaacattggtccgtatttgaagtcccactttctcatggttacacaccattaaggacaacagccgatccataaatttgctgacaggtgtatctgcgtttccctctgaagacatcactgaaatcatagaacccttacgttcactgactggacccatgggtgggctataggttgccaggccagaattgcttctctgctggaggcacactcctccaagggcacaaaggaagccagtcatgttgatccattcctgtagggagtctgtgtcagacaaatctatggatcctcctccactcacatgggacattcgcctcttaacaatggtcttgtgaaggctttcagcagcctggccatcttccattttggcttttggatagttaaggattagctttgttgcttgttcccattttgcatgtgtatcttcccaagcctcagtgtttcctgcagtgggatgctcaatgcgcctcagcagtgccatcactcttttctgaagtgctgctcttcctgttgacatcatattgctgacagaggcaaactccatgaatgtgttatagttgggcaagaggttatgcactgacacttcatccaccccacaccggatatctgcttcctcacagaggtggcggaaacaggacatggcaaccagaacagcttcagtgtcagggttccacagaaacatgtacagggccacttctagtttggtctgggcttgtcggcaaattgggggggttccgctgcatcctgctgcactatccatagaggagttcccttttcccttccggagagaggctccaggagtacgtagtaattcttcatgatccatggacatttgactggtatttccactagaaggaatatcacatcctaccccgtaaaaaaggagaaagtgacaggaacttctatctgcctgcttatttttaagaagaaatttattcctgcagatcaatatttcccgcaaccacttgagaatttctgtgctactaagcatttgatgactagttaatttcttgcagatgtaaaaaagcatttgtgagctaatctcccaaaatgtttctacaggagcatcaggattccacaaatcaatgctatctaactgatgaagaaccagcagagcctccattgcttcctgagcaatctctggcatgtgtgactgagggaccagttggacgagccctgtaattaattctgctgtactgccttgggtttcgggcccctgttttcttggattacaaagcaagagctttggatctgcatgaattagtttcaccatggacaagagaagatacttatagcttcttgtctccaggtctgtaggtttttctttaaatttaaggcttgttactttttctttaaatgtaagactcggtgccattcgtattgctgggtgtgctccacaaccttgcactgctttatgaagtgtttcaccaaacatatttcgaagttcaaccgagtgacaatacacagcatcaatcttaggccaccaatccaatgcggaattggtgatgattcgatggagtgaatttaccagcacatagtgaaatgtagaaggtgaattctgagccaggcagatcttaaagtgttggttgttgtgagggcttatacgaaagcaagaaacaaggcagtcaatcattagatccacatctgcaggctgactgcctcttgagaatggcttacttggattaaaaagcaggttcttaagatcaaccaccatggactgaacaagtaggaaaatgacagagttatcttcccaattgatgtaagtacttgctttacacagtttgacacaggcaattgcagcactttctgtcagctgcctacttcctccatggccagcaagagcttttcgtagactgtccagaaataacttcttattcatgttgttttcatcaaccacgtctttggatatatcctggattatttctggacacaagataaggagaatgatttgtagtggccaaactgctgctttacgtttggtgctttcagcaaaaccatccaccaagtcaaatagcttttctgcacattcagccatatcagtctgtgggatctggtatagttttgtaaattcatctggataattttctacccagttccaaaatgccttttccaggctatttataactgctaactgcgcaaccttctttagggctttaaatttaaatgctgtttccttcaggagtcgttttaattttgcacaatccacattgatatactgtaacaattctatatcatgaacatcaacattgtcttctgaacaaacagttaattcctgtaacctggtagaaatgcgactaaagactgcattgaagttgttgcagctgagagaaaataaaaccccagaggcagaattccgaagttcagctgcatgctggtttccttcacgacaggtgtgaagaaaatggcagatttctggcagcaactgtttgaccagcatcgtttcatctaatctcattgtgtcctttggttgcccagcaagacatttttccagtgtatccaatataatcaactgagagagatataaatttttttcagcagcttctccaaatattctcatattgttaacattctttaaaatagtagtgaggccgcttataaccaaagaaaacttgtatttggaaatattgattagacattccttgttgtgctcagtactgactttggtatgtgtgttctgctgtcctgtttttattggaagctgctcgtcgaagcggctgaccacggcctggacccattccaccggcctgtgcgcggccatgtcctccccgcggccggggggcggcggagggaagggtgggccggcgccctgggccgggaagagggcggggagcggaggctgaggtgagggaagaggcaaggagagggtctgtggagtgcaggctcccagtgttcccacgggggtggggatggggggtcagcgccgagcgggagggggagagggaaagggggcgttggcaaggaggctggggggagggggataggggaaggggacccggggaggggagggggcctcttggtcgctctccccactagcgccgtctccccacagccatcacagtccgagacgccgccatgacaccccaccggaagtgggatcctttccacggcccggggagagggagcgcgagcgagctagagatt

SEQ ID NO: 117740 - DNA, 2210 bp, Homo sapiens
atggtgcctctgcactccagcctgaagttgtttctggacagtctatggaaagctcttgctggccacggaggaagtaggcagctgacacaaagttctgcaattgcctgtgccaaactgtgtaaagcaagtacttacatcaactgggaagataacgctgtcattttcctacttgttcagtccatggtggttgatcttaagatctgcctggtgcagaattcacattctacatttcactatgtgctggtaaattcactccatcaaatcatcaccaatggcgacgggttgcatgaggcatgggaacataggccacctcacgcagatcgccaacgtgctggtgcagaacctggagcagggctctgtgcagacgcacatcagcgaggtcatctgagagctccctgtggattgccatggctgctaggagagcttcgtggaggagacgctgacggagaccaactgcaggaacactgtggacttgttgaggaggcttggggctgcgccctcggcgccggcatggcaagcactcactaccttcactcctggagtgaggacattgagggtgctttccctaatgagctgtcccttcagcaggccttctctgactaccagatccagcagatgacggccaactttgtggatcagtttggcttcaatgatgaggagtttgcagaccatgacaacaacatcaagtgtttccagttgcatgagggtgctgaggcccccagtgagaaccaggggaggagcactgaggcctcagatgagcaccgggggaggagccctgaggccccagatgagcaccaggggaggagcactgaggccccagatgagcaccgggggaggagcgttgaagccccagatgagcaccagaggaggagagctgaggccccagatgagccccgggggaggagctctgaggccccagacgagcaccgggggaggagcgccgaggccccagatgagcaccgggggaggagcgccgaggccccagatgagcacgccccatttgacaggatcgcggagatcaacttcaacatcgacactgacgaggacagtaccctctggaaactgaccttggcgttttactctgcagcccagcgcggctctgaggcctgctgcagcgaccgcatccagcactttgatgagaacgaggacatctcggaggacagcgacacttgctgtgctgcccaggtgaaggccagagccagcctctgccgaggaggtgcagcccccagaacacccgtcagatgcccagacgccctgctgtttgttatgccggctcgcagagcaagcacaccggtcctgcaagcactggcgcccaacgcagcggcctggagcctgctgctgtcactgaccctcagtgttaggcatctgtcctgggccaccaggcatctgactctgcatctccccgaggtttggagccccccatgcttcagaaagctgctcaaagaatggcccggagtgcggaggccaggatgggaaggcgagcttggaagcagacggtgatgcgcctggggcagctcctccccttgtttggccacgctgccgtcagggcatctgcagcaagtggggggcacaacacgggaaatggggccaaggccacagcagtggatgtcccgatgctgccagtcactggaaagcccaggccagagcccctcggagcaagccccttagatgcccagcagaatcctctctcccctcctgtaccttgggaggtttccccacactatgcccagtgtcaggctgaagttgggatcatggcacaggatcctctggggccctcagagaatgaggtgcttgatgatgagcagaatctgaacgcagcctggacggagagaagaggcagacccatctccatcctaggaggagctcttagttcctccagacagggatgtctccctgggaccaggcagtgtgactgggatgagccattcatcatcagggaagacacaggctacctgggtagtcatggtgtagaatgcctccagcacagtgcccagaagcccctgaatctgggaagaaagctacttccacatcagggactccgggcgtcctgtcctgtccctgcacggcggctttggccccagcctgtagccctctttgcgcagctctgcgcccgcagccctgcatcttccccaggttgtgaggtgatgaggcgaaagtcatcggaaagacgccgactcggtgtgcagggttcctgcgtggaaggagctgtg

SEQ ID NO: 117741 - DNA, 2424 bp, Homo sapiens
atgctgacagtaatacacagtgaaatgcaggctgccaaggtctcagatggaaatgaggaacttattgggaagtggaacttattgggaattgaaaggccctggggacctaggagggactggagtggtttgcatgggccaggcccagggacccccactgcccgaccgcggcctttgagagactcctcgcagaatacctggcgactgcagttaaagcctcggctcaaagggggcccaggtgcacagaatgcaagaatgaatgaggcttggcagcctctgcctagatttcagaggatttatgagaaaacctgggtgccctggcagaaacatgatgcaggggcagagccctcacagagaacctctactagggcagtgccaaggggaagtatggagttggagcccccacacagagctcccagagctgtgagaagggtgccacaattctccagattccagaatggtagatccacaagcatcctgcaccctgtgcctggaaaagctgcaggcactcaactcaagcctgtgagagcagatttggtggctgcactctacaaagccacaggggcagagctgcccaaggccttaggagcccaccctttgcaccagtgtcccctagatgtcactgatgaattgttggaaaaaattgcatcaagaagtcagaatataattgaaatcaacatttctgattgtcgcagtatgtctgataatggcgtatgtgttttagcatttaaatgtcctggacttcttaggtatacagcctacaggtgtaaacagctttctgacacctctattattgcggttgcctctcactgtcctttacttcagaaagtgcatgtaggcaaccaggacaaactcactgatgaaggactcaagcaggacaatcagcctcagtgtatagaagggaattttgaaagccgcatgcatgcccagggcaggacacttgttcaggaacgacctaagaagactgtaaactttatcactgtgtgcttgctaggtccagtacaagcaggaagtaaaggccaaggcagagttgtgaatgggaaagtgcttacctcaactgccaatttacggaggatctctgtggatggtaaatcagagaagagtgtgaaagatgcagaaaaggcctttgacaaaattcaacagcccttcatgctaaaaattctcaatgaactaggtattgatggaatgtatttgaaaatagtaagagctatttatgacaaacccatagccaatatcattctgaatgagcaaaaactcccttgggtggttgatgggactgggcgctgtggagcggggggcagcgtcactggggaggctcgggccatgcaggagcccacagtggggcaaggggaggctcaggcatggcgggctgcaggtcccgatccctgccctgcagggaggcagctaaggcccggcgagaaattgagcacagcagctgctggcccagagaataaaatacctatgaatacaacttacaagggatgtgaaggacctcttcaaggagaactaaaagccattgctcaaggaaataaaagagaacacaaagaaatggaaaaacattccatgcttatggatatgaagaatcaatattgtgaaaatagccatactaccaaagtaatttatagattcagtgctatcaccatcaagctaccactgactttcttcacaaaattggaaaaaaaaactactttaaacttcatatggaaccaaaaaagagcgtgcatagccaagacaatcctgggcaagaagaacaaagatggaggcatcatgctacctgacttcaaacaatactacaagcctacagtaaccaaaagagcatggtactggtaccaaaacagatatatagaccaatggaacagaacagagacctcagaaataacaccacacatctacaaccatctgatctttgacaaacctgacaaaagcaagcaatggggaaaagattccctacttaataaatggtgttgggaaaactggccagccatatacagaaagctgagactggaccccttcctcacaccttatacaaaaatcaactcaagatggatcaaagatttaaatgtaagatgtacgaccgtaaaaatcctagaagaaaatttgtgcaataccattcaggacatagttatggacaaagatttcaggtctaaaacaccaaaagcaatggcaacaaaagccaaaattgacaaatgggatctaattaaactaaagagcttctgctcagcaaaagaaactatcatcagagtgaacaagcaacctacagaatgggagaaaattgttgcaatctatccatctgacaaaaggctaatatccagaatctacaaagaacttaaacaaatttacaagaaaaaaaaaacccgtcaaaaaatgggcaaaggatatgaacagacacttctcaaaagaagacatttatgcagccaacagacatag

SEQ ID NO: 117742 - DNA, 1537 bp, Homo sapiens
atggggtggggcctgtcgtcaaggaagggactcagccctggaggtttctgtgagagctcaagccacaggagccacaggataagaggagtgtggctgcagaacccaggtggcaggcctttcctcaggccccttactcctgacctggacgaggccggggcttcctcaaggagagccccttcgccttaattttacctgggaaagccaagaaggagccatcaggactcaggaagtaagactgagaaaagatgtagatgtggcagggaaacagagtcagagtccacagcagggtgtacagttagggacagggagaaaaaggaaatacaccccaagacgactaattattgtgatggcaaatgaaggaaatggttttattgtcagatccatgatttttccggtgccctggtcttctccaggagcaggtaggctccccatagaagaagttacaaacctagaaagctcctcaagcccccaatataaattcctactgcctgcaagtggaagaatgctgtcagaagggtatctcagtggacttgagtactggaatgacatccactggagttgtgcctcttataatgagcaggtggctggggaaaaggaagaggagacaaattctgttgctaccctttcctattcctctgtggatgaaacacaagtcagaagtctctacgtgagctgcaaatcatctggcaagtttatctcttcagtgcattcaagagagagccaacatagcagaagtcagagagtcacagtgctgcagacaaaccccaatcctgtgtttgaaagcccaaacttggctgcagttgaaatatgtagagatgccagcagagagacctacttggttccatcttcttgcaaaagtatttgcaagaattataatgacttacagattgcagggggccaggtgatggccattaattcagtgacaacagattttccctctgagagcagttttgaatatggccctttgctgaagtcatctgagattcctttacccatggaggattccatttctactcagcccagtgactttccccaaaaacctatccagcggtactcatcctattggagaataacaagcatcaaagagaaaagcagcttgcaaatgcagaatcctatttctaatgcagttctgaatgagtacctggagcagaaggttgtggagttatataaacagtacattatggacaccgtgtttcatgacagttctcctacccagattctggcgtctgaactcatcatgacaagtgtagaccaaatcagtcttcaagtgtctagagagaagaatctggagacctcaaaagccagagatatagtctttagccgcctattgcaattgatgtcaactgaaattactgaaattagcactcctagtctccatatttctcagtatagcaatgtaaatccatagagaggatgcttccattactgtctcgcatttacttaaacatgaagcaacactttatccatttattctgagaatgtgcaggaggggttagtgaaggggaattaagggctagagaagtaaagatcagctgga

SEQ ID NO: 117743 - DNA, 455 bp, Homo sapiens
  misc_feature (1)...(455): n = a,t,c or g
gcacgaacttccgggtcgacccacgcgtccgtgaatttgaggattacactcagccaatgaagcgcactgtgtcatataacagcctttcaaattccagaggagaaggcaaaccagacctcaaatttggtggcaaatccaaaggaaagttatggccgttcatcaaaaaaaataagctttctctcaagctgggtgcaacaccggaggatttcagcaacctcccacctgaataaagaaggaaaaagctgcagcagaaagtcgatgagttaaataaagaaattcagaaggagatggatcaaagagatgccataacaaaaatgaaagatgtctacctaaagaatcctcagatgggagacccagccagtttggatcacaaattagcagaagnnnnnnnnnnnnnnnnnnnnnnnnnnnnnnnnnnnnnnnnnnnnnnnnnnnnnnnnnnnnnnnnnnnaaan

SEQ ID NO: 117744 - DNA, 146 bp, Homo sapiens
atggtggaaagtctaaaagaagtacagtggattcaaagtttttctttaacatcagcactgatgaccaagaaggcctttacagtctttattttcataaatgccttggaaaagaattgccaagtgacaagtttacattcagccttgat

SEQ ID NO: 117745 - DNA, 413 bp, Homo sapiens
gtggatttcaaatattatttgatgcttatttttgttttgtgtcttcttgtttctggatttttactctgtcacggctccatctcttacatgtagcttatgtcccttttaacatccccccatcagcctccccctccccctcctgcctctgcctcaccctctgctgttcccaacggcccccagtctcccaagcagcaaaaggaacccctctcccaccgcttcaacgagttcatgacctccaaacccaaaatcccactgcttcaggagcctaaagcgtggggtaagttctgctccggaatcctgtctctctggcgtgctttggttgcatgtttggttctgcataactaattttgtttgtgaatgaatccattgtgttttcccataacatgtaaaaaagttaaaaaaaaaaaaaaaaa

SEQ ID NO: 117746 - DNA, 2040 bp, Homo sapiens
ctgtggagcggcggggaggaggagccgccgaggagaccccgggcgaggagctgcgagccggaggaggccgcgcggactccgggctttccgccgtcgcggggatctcggggggcaaagggatcgccggggagggggaccagagagccgcgcccgccgcgcggagcgccccttcgcgtcccctgcaccatgagctggggcaccgagctctgggatcagtttgacaacttagaaaaacacacacagtggggaattgatattcttgagaaatatatcaagtttgtgaaagaaaggacagagattgaactcagctatgcaaagcaactcaggaatctttcaaagaagtaccaacctaaaaagaactcgaaggaggaagaagaatacaagtatacgtcatgtaaagctttcatttccaacctgaacgaaatgaatgattacgcagggcagcatgaagttatctccgagaacatggcatcacagatcattgtggacttggcacgctatgttcatgaactgaaacaggagacgaaatcaaactttcacgatggccgtaaagcacagcagcacatcgagacttgctggaagcagcttgaatctagtaaaaggcgatttgaacgcgattgcaaagaggcggacagggcgcagcagtactttgagaaaatggacgctgacatcaatgtcacaaaagcggatgttgaaaaggcccgacaacaagctcaaatacgtcaccaaatggcagaggacagcaaagcagattactcatccattctccagaaattcaaccatgagcagcatgaatattaccatactcacatccccaacatcttccagaaaatacaagagatggaggaaaggaggattgtgagaatgggagagtccatgaagacatatgcagaggttgatcggcaggtgatcccaatcattgggaagtgcctggatggaatagtaaaagcagccgaatcaattgatcagaaaaatgattcacagctggtaatagaagcttataaatcagggtttgagcctcctggagacattgaatttgaggattacactcagccaatgaagcgcactgtgtcagataacagcctttcaaattccagaggagaaggcaaaccagacctcaaatttggtggcaaatccaaaggaaagttatggccgttcatcaaaaaaaataagcttatgtcccttttaacatccccccatcagcctccccctccccctcctgcctctgcctcaccctctgctgttcccaacggcccccagtctcccaagcagcaaaaggaacccctctcccaccgcttcaacgagttcatgacctccaaacccaaaatccactgcttcaggagcctaaagcgtgggctttctctcaagctgggtgcaacaccggaggatttcagcaacctcccacctgaacaaagaaggaaaaagctgcagcagaaagtcgatgagttaaataaagaaattcagaaggagatggatcaaagagatgccataacaaaaatgaaagatgtctacctaaagaatcctcagatgggagacccagccagtttggatcacaaattagcagaagtcagccaaaatatagagaaactgcgagtagagacccagaaatttgaggcctggctggctgaggttgaaggccggctcccagcacgcagcgagcaggcgcgccggcagagcggactgtacgacagccagaacccacccacagtcaacaactgcgcccaggaccgtgagagcccagatggcagttacacagaggagcagagtcaggagagtgagatgaaggtgctggccacggattttgacgacgagtttgatgatgaggagcccctccctgccatagggacgtgcaaagctctctacacatttgaaggtcagaatgaaggaacgatttccgtagttgaaggagaaacattgtatgtcatagaggaagacaaaggcgatggctggacccgcattcggagaaatgaagatgaagagggttatgtccccacttcatatgtcgaagtctgtttggacaaaaatgccaaagattcctag

SEQ ID NO: 117747 - DNA, 1081 bp, Homo sapiens
gaatctttcaaagaagtaccaacctaaaaagaactcgaaggaggaagaagaatacaagtatacgtcatgtaaagctttcatttccaacctgaacgaaatgaatgattacgcagggcagcatgaagttatctccgagaacatggcatcacagatcattgtggacttggcacgctatgttcaggaactgaaacaggagaggaaatcagaaaacgaccacagggtcagcggagctagccgccgagccccgctccccgggcccttccggcggctgcgccctttcacccccgacgtgggcggagaggaagcggctgcaaaccaagcagaacatataataccccagcctcaagtggaactcaaagggaaagaccaatggtaccagaaatggaacgaagtgtggcaaggaacactcacctacactccatcagagcagacagggcactgtaatccagtcagccaatcggcccagcgtggcctgaagctaccgagctcctctccatccttctccacactgaaaactggcaccataggtacctgctttcagcagttcaagggtatttcccatgctctcaagtttttctttaacatcagcactgatgaccaagaaggcctttacagtctttattttcataaatgccttggaaaagaattgccaagtgacaagtttacattcagccttgatgattcacagctggtaatagaagcttataaatcagggtttgagcctcctggagacattgaatttgaggattacactcagccaatgaagcgcactgtgtcagataacagcctttcaaattccagaggagaaggcaaaccagacctcaaatttggtggcaaatccaaaggaaagttatggccgttcatcaaaaaaaataagtctcccaagcagcaaaaggaacccctctcccatcgcttcaacgagttcatgacctccaaacccaaaatccactgcttcaggagcctaaagcgtgggattcaaccacctgatggaaatgaaaaacaggatgatacgatggcttcttccttcactttctcactttccttggattatgaaatgccagtaattgagaaagcggaatga

SEQ ID NO: 117748 - DNA, 306 bp, Homo sapiens
atggcccaggactacggagccatgggtgacctggtcctgctggggctggggctggggctggcgctggctgtcattgtgctggctgtggtcctctctcgacaccaggccccatttgacccccggcctttgcccacgccgctgttgctgctcactccaaggtcttctcaaatattgtacgagaaagggttaaaactcaagaagcagaaagggcttgacgaccaccgaattagagaggctttccagggagcaaacgcaaaaaggaccctgtttggggaccccaagtttgtgaataaaactaagaactga

SEQ ID NO: 117749 - DNA, 367 bp, Homo sapiens
atggcccaggactacggagccatgggtgacctggtcctgctggggctggggctgggtgctggcgctggctgtcattgtgctggctgtgggcctctctcgacaccaggccccgtttgacccccggcctttgcccacgccgctgttgctgctgactccaaggtctgctcggatattggacagaggacatgcagagatgcgacacccacttaaactcgaagttgcaaagatgcaaatgagactggggtctcaggcaccagagaccacccatgggcacgtggcttttgggagtggggacctgctgccacagatctctgaagagtctggacctgctgggtctccccgagtgactgtctgggggtctccatag

SEQ ID NO: 117750 - DNA, 210 bp, Homo sapiens
atgagataccgctacatacctgttagaatggctgaagtcagaacactgatgaaaccaagtgctggtgagaatgtggagcaacaggaaccttcattcattgctggctggcaaacattcagcagcacaccctctcaagattgtttacttgcctttgctcctgttgagttacaacgcttggaagcaggagatgggctcagcagcagccaatag

SEQ ID NO: 117751 - DNA, 696 bp, Homo sapiens
atgaatgggcctttagtgctacagcaaacactttatgttcctggatttgggtatggtcttatcggggaggaagacgagcatgaccttagagggtcatccctacaaggtccacagccctgcaagccccgcggctgctttcacgtagctggcagggccacgctgcacaacgtctctaacgccgtcggagggcggcccccacctcccgacagcctggggtacaccgtgcaccctccagacagtcaggggcacacggggcccctcccagcgagggaggggacggggagtcacaggttcggcgtagaaggcggcagcgcaggtgggagcgtggtgaggcgccactcctccagctctccccaccggcgggaagacctcctcgccgcccgcatccgtgccgaccgcaacatttaccatcggcagctatttcagaggccgccaccgccagaggccccagaaacagatctcaagcagccgctgctgccgcggatcccgacaaccttcgcgtcgcgcgagggcacggagcacgcgcagctctgcggtcgacgccgggccgcccccactccgcttctccgggttttccgtgaagctccagccaacagcggccgtcaccggaaaaaacggggagcgaagtttattcagcgtatattccagcaaattgttgaaactgaaattttaaaagaacgcataaaatttaaataa

SEQ ID NO: 117752 - DNA, 432 bp, Homo sapiens
ctcccgggtcgacgatttcgtatggccctgagcccctggaccccattgctgggttctggcgagaagctggggcaggcggctggcgtctccaccggcccctccctggagttatgcaccttaccctccaccctgggctcctcggtcgcggtcgaggcgctggagcagctgtttgttgtgggtaagacgcccctcgggcgctggaagggacgcctcctcagaggtggcgcttaggaggcactcagcgggaaccctgagcggggactctcctcccggaaccagggcatcactgggcagggcagagccttctccccgctccttggaggctggggagagagaggtggcgggtgggaccaagtgcccagatctcctgccctaacgcagctgaggtgacttcgctcaaccctcaggagtagataaattactgaggggacg

SEQ ID NO: 117753 - DNA, 2151 bp, Homo sapiens
atggccctgagcccctggaccccagggctgggcgctggcgagaagctggtgcaggcggctgccgtctccactggcccctccctggagttatgcaccttaccctccaccctgggctcctcggtcgcggtcgaggcgctggagcagctgtttgttgtggaatgtgtccgagacgctcgcagattaaatctttttgagataaatacaataaaaatgagaattacaaggacagagaatgaaatagagcttctgaagaagaaaataactgacctgacaaaatataatgaagctctgggggagaagcaggaagagctagcaaggaagcatgcaaggtttgtcctgtcactcaaccaaactatggagaaaaaagccaccaccactgtttacataaatgagacttataccaaaataaacttgaagagagaagacatagcattgcaaaaaaaatgtattcaagaggcagaggagctaatggaaaaagaaagggcagaatatctaataagaaaacaagagttgactgcacagattaatgaatttgaaaatacccgtgaagtaaagagaatggagacttatcaaaagaagaaagaattggataaattacaaactaaaatgtcaaaaataaaagaaacagttactgtttccgcagcggttcttagtgatcacaatttagagatagcacgactacacgaatcaataaggtattgggaacaagaggtcagtgagctaaagaaagaccttgcaattctggaggcgaaactgtgttttttcacagataacaaagaaaaactagatgatatatctaatgatgaaaaaaatgaattcctgaacaagataaaacagctggttgaaacactgcatgctgctcgtatggaatacaaagacctacgagagaaaatgaaaactcttgccagacaatataagattgttttaagtgaggaagaaaaagcttttttgcaaaaacaaaagattcatgatgaaaatcagaaacagctgacatttatttctcagaaagaatactttctgtcacaaaagagagtagacatcaaaaatatggaagaaggactcatcacactccaggaacttcaacaggttattctttccttcatgtcctctgtatacagcaagcctaacttaagtcatagcagaggcctgacttgctgttccttccctctgtatttgcaaatgatgacaccctttccttgtgttataactcagtggaaaatggcttgcttgagaaaaaagcatgcacgttggacagccaagataaaagctgaaatacaagctattacagaaaaaattcagaatgcagaagttagacgaattgaattacttaacgagaccagtttcagacaacaggagatcagtggatttgtggcacagattgaaaaacttacaacagaattaaaagaagaggagaaagcatttgttaacaaagaaaaaatgttaatgaaagagttaagcaagtatgaggaaatatttgttaaggaaacacaaattaacaaagaaaaggaagaagaactagttgagtatcttccacaacttcaggtggcagaacaagagtataaagagaaaagaagaaagttagaagagctcagtaatattattacagagataatttggggttttctgtttgagcaggaagatgtaaaacaagaattacaacaattacgagatcaagaaagcaaaaaaaacaaagatcattttgaaactctaaagaacttagaaaatggattctatataaatgaccaaaaagcagatcttctgctcctggaaaataaaaaattaaaagaatatattttatacttgaagaataacatagagaaatacagagaaggacaagaagccctcatgcacacctcaagcgacttgtctcggcaactaatagctcaggagggtcttctgcaagttgaggagcaaggaatccagtggtggatccgtcagagtcccaaagcctcacaagtagggaagccaacagtgcagccttcagtctgtggccaaaggcccaagagcccctgccaaaccactggtgtaaatccaagagtccaaaagctgaagaacttggagtccaatgttcgagggcaggaagcatctagcacaggagaaagaggaatcttggaagactcagccagtctagccacgctggcagctgattag

SEQ ID NO: 117754 - DNA, 2658 bp, Homo sapiens
atgcaggccccataccgctgtcagcgcacgggctggcttcagcagaagaggctcaaggccgggctgtggggcctggagagctcatcttggtctcttgggcccctaggacaggctgcccagcaggagctcacctctgcccctggccagttccgcctcccgcccccaccccaagccccagagaggcccaccgctggtgggagcgcgagcctcggtccccctctgccactgggaagctctctgaagtcccagagcccagtagacccggaaggccacgaaggccccccagcacctgggccccacctgggggtccagagcgtctgcactgcccgtggtgccaggacccgtggtgccaggacccgtggtgcctcgacccgtggtgcctcagagcaggtccacatctgcccatcccagtcacatccaacgccccaggacatgctggagggtgggcgtgcaccttcacaccaaaaccatgcaagcccctgcacaggtaggggtccacagccagctggagaactgagacaagccgtgagcagttcccaaactcctggggaaggcgtgggtcttgccgcacttgttctgtcgtgctggggcacacggagccaagaccagagccggcgcatgtgcttgtcagagaggaatccagggagccctgtgggggctgcttggggaaatgaggctgtcatccccgcgccccaggtgctcaacggggaggataaaggagccctggcctgcgggaggcagccccaggggacggacggagccctggttcagagcccagagagggcattggagggccaggcctcagccaactccatttctcccctctctggcctgcgtgggcatcgggggcatggtgggtaccagatcctaccctgcctgctcaaccctatagacagcgtgggacacagagggcatggtggccatgcccattttacagatgagcagaaggagactgtgagagcaaataacgtgcccttgttcacactgagggcctggagattcctgctcccagcccaggcccagacggcaacagaagctcatggtgagttcaccccggtcctggtctggcacctcattgctggggaggtctcggcagtccagaggaggctcaccatccagcagctgtgcaccccccctaacacactgcgggctctccgcacccggaaagctgcccacaactgtcaggacagcaacaaagaggagccactgatgcacgtggcaactcggatgaatctcccaggcatgacgccgaactcaagcagcaagataggaccaaggcctgaggaaggcgaaactgccaggtgggcctcagcagcggaccctggtcagggcttggagtgccggttgaagacccaagggctgcacgagaatctcatggaactctgcaccgcccccgacgcccatgccaaggtgctgggcaaagctgcaaaggtgctggtgcccggccaccctcagtcaaggcggcaagaacccctcgctggttcgctcagctcttgctccctgccagcccccaggtgctggtgcttctgccacaggatagcaggcaccccacagcccgatggcggctcagatggagactgcggtactggatatcgtgggggtccatgtgagtcccgggccccgctgcctcctgagaccaaggagcatttccctctctggcgatgggcacgggagctcctggcaggacggcgaccgtccggtgggcccggagaggaggcagctgctgcaccctcggcgctggctctcagggatggctgggctgttaggcccgaactacacctgctgccgccgtgtggagaagaggtggccccaggagcccactgtctcggggcggtgcggacaagcctgggtctgctgtgtgcggagctgcgaggaggcagtgggggcgagcctgcgaagaagcgaagcaagctggagaggagcgtctatgcgggcctgcagactgcctccgtggagaaggcgcagtgtaagaagagcagctgtcagggcgggctggcgccctccgtggcccacagggtggcccagctgaaacccaaggtcaagagcaaagggctgcccacaggcctcagctctttccagcagaaggaggctacccccggggggcgcatccgggagaagctgtcccgagccaagagtgccaaggtgtctggggccacacggcacccacagcccaagggccacggcagccgggagacacccaggtgcccagcccagccctccgtggctgcgtcccaggaggcaggcaagttgctggctggctatgacagtgaggactgcgagggtctcctggggacagaggcaccacccagggaagcagggctgctgctgcacgccggggccagtgtggccgtgttggggccctcaccctcctctgtggtcaagatggaggccaaccaccaggccgagaagaagaaggagaggcaggggttgctatgtaaccacgagggaggacaggggttgctagagttagacatcaaagttgccgcgagcccaaaggagctacgggaatccgggaatgtggggccgcgtggaccggcggcggtggcccgccacgcccgccccgccgaagccctgtttggaatgtgggtttcccccagtggggctcgtgctgccaccacgtctgattatcccggtacggagccgccgcgctttctgtag

SEQ ID NO: 117755 - DNA, 556 bp, Homo sapiens
  misc_feature (1)...(556): n = a,t,c or g
gagcaagacntanatgagcctcttgccanagtgtcccttttaaaagatgacttcagggtgcaccagtcagaaattgaggcaaagcaagaaatacagcatcttcgaaaggaattgatcgaagcccaggagctagctagaacaagtaaacaaaaatgctttgaacttcaagctcttttggaagaagaaagaaaagcctatcgaaatcaagttgaggaatccactaaacaaatacaggttcttcaagcccaattgcagaggttacacatcgatactgagaatctccgggaggagaaggacagtgaaatcacaagtactagagatgaattgcttagtgcccgagatgaaattttgctccttcatcaagcagcagactgtcccgccggccgtctagagcccctccgtctccgtcacctctcgccccttcactccgggcgaggactggcggtggctgcccagaggtgcccagccacaccttccttcggcccaaaaggactttcctggccgcgccgaaccgacccttcattcatgctgcagtgctgcaacgtttccgccacca

SEQ ID NO: 117756 - DNA, 1396 bp, Homo sapiens
tgagaaaaaaagaattacaacataaaatagatgaaatggaagaaaaagaacaggagctccaggcaaaaatagaagctttgcaagctgataatgatttcaccaatgaaaggctaacagctttacaagaaaatcagacaagagcaaaagaatctgatttttcagatactctgagtccaagcaaggaaaaaagcagtgacgacactacagatgcccaaatggatgagcaagacctaaatgagcctcttgccaaagtgtcccttttaaaagatgacttgcagggtgcacagtcagaaattgaggcaaagcaagaaatacagcatcttcgaaaggaattgatcgaagcccaggagctagctagaacaagtaaacaaaaatgctttgaacttcaagctcttttggaagaagaaagaaaagcctatcgaaatcaagttgaggaatccactaaacaaatacaggttcttcaagccccaatggcagaggttccacatcgatactgagaatctccgggagcagaaggacaagtgaaatcgcaagtgctagagatgaattgcatagtgcccgagatgaaatgtggctcgttcatcaagcagcagcaaaggtggcctctgagcgggacactgacattgcttctttacaagaagagcttaagaaggtgagagctgagcttgagcggtggcggaaagcagcgtctgaatatgagaaagaagtcacaagtctgcaaaacagttttcagcttagatgtcaacagtgtgaggaccagcagagagaagaagcatcaaggttgcaaggtgaactagagaagttgagaaaggaatggaatgcattggaaaccgaatgccattctctaaaaagggaaaatgttttgctatcatcagaactgcaacggcaagaaaaagaattgcacaattctcagaagcagagtttagagcttaccagtgatctcagcatccttcaaatgtctaggaaagaacttgagaatcaagtgggatccttgaaagaacagcatcttcgggattcagctgatttaaaaactcttctcagtaaggcagaaaaccaagcaaaggatgtgcagaaagagtatgaaaagacacagactgtactctcagaactgaagttgaagtttgaaatgactgagcaggaaaagcagtcaatcacagatgagctcaaacagtgtaaaaacaacctgaagctgctccgagagaaaggaaataatccttccatattacaacccgtcccagcccgtattcatcggcctattcctggctttcctgatatggtgattcggtccattgtggagagaaagaaaccctggccctggatgcccatgttggctgccctggtgcaagtaacagccatcgtgctgtacgtgccaggtctggccagagcttctccatga

SEQ ID NO: 117757 - DNA, 1135 bp, Homo sapiens
ctggaagaaaaagaacaggagctccaggcaaaaatagaagctttgcaagctgataatgatttcaccaatgaaaggctaacagctttacaagagcacttgctttcaaagagtggcggggactgcacttttattcatcaattcatagaatgccagaagaagctgatcgtcgaagggcatctaaccaaagcggtagaagaaacaaagctttcaaaagaaaatcagacaagagcaaaagaatctgatttttcaggatgctgtgagtccaggcaaggattagggcagcgacgactctacagacgcccaaatggatgagcatgacctaaatgagcctcttgtcaaagtgtcccttttaaaagctcttttggaagattatagagggggctatcgaaatcaagttgaggaatccactaaacatatacaggttcttcaagcccaattgcataggttacacatcgatactgagaatctccgggaggagaaggacagtgaaatcacaagtactagagatgaattgcttaatgcccgagatgaaattttggctcttcatcaagcagcagcaaaggttgcctctgagcgggacactgacattgcttctttacaagaagagcttaagaaggtgagagctgagcttgagcggtggcggaaagcagcgtctgaatatgagaaagaaatcacaagtctgcaaaacagttttcagcttagatgtcaacagtgtgaggaccagcagagagaagaagcaacaaggttgcaaggggaccatactgatgaagctgcagacttaccattatcaaggcacagtgtaagtgatcctggagtcagctgtacacaagaagaaattcaagaagcaagaggactgactctattatgcttctcaaagataaaatgttctcagaagcagagtttagagcttaccagtgatctcagcatccttcaaatgtctaggaaagaacttgagaatcaagtgggatccttgaaagaacagcatcttcgggattcagctgatttaaaaactcttctcagtaaggcagaaaaccaagcaaaggatgtgcagaaagaggtaaagcgaaaagacattatgagcccaattatggttggacttaaagccaaaagcaaatcggatatccatgctagttag

SEQ ID NO: 117758 - DNA, 543 bp, Homo sapiens
atgcaacctgaactgcctatcatgaactgggtgctttctgagccatctagccataaagtgggtcatggacagcagcattccatcatcaaatggaggtggtatatatgtgattgggctgtagtaggtcgtgagagcacaaccaatggtttggctggatggtcagagacttggaagaagcatcattgggaaatgggtgaaaaacaaatttggggaagaagtatgtggatggaactttctgagtggtcaaaaactgtgaagatatttgtatcctatgtgagtgcccaccaatgtgtaacctcaacagaggaggatttcaataatcaatgggatggaatgacctgttctgtggacaccactcatcctctttccctaaccacctctgtcatcgccaagtgggcccatgaacaaagtgaccatggtggcaggtatggaggttatgcaggggctcagcaacatggacttccacttaccaaggctgacctggctatgaccactgctgagtgcccaatttgccagcagcagagaccatcactgagcccttaa

SEQ ID NO: 117759 - DNA, 280 bp, Homo sapiens
agacagatcttggcctgttactgggctttggtggaaactgaacgtttgactgtggatcatcaagtcactgtgagacctgaactgcctatcataaactgggtgctttctgacccatcttgccataaagtgggtcatgcacaacagcattccatcatcaaatggaagtggtatatatgtgattgggctggagcaggccctgaaggcacaagcaccccccgaaagtggacagctgcagcactacagcccctttctaggacatccctgaaggacagcactgaag

SEQ ID NO: 117760 - DNA, 416 bp, Homo sapiens
gggacccaaaatgtcaggcagtcctccagtcaaagtaagggcttatggaggtcaggcaattagtggagttttagctcaggttcaacttacagtgggtccactgacaaaggaagagaagactagggcctggttcgcagatagttatgcccaatatgcaggcatcacccaaaagtggacagctgtagcactacagcccctttctaggacatccatgaaggagagcagtgaagggaaatcttcccagggggcagaacttcaagcagtgcacttggttgtgcactttgcatggaaggagaaatggccagatgtgcgattatacactgattcatgggctgtagccaatggtttggctggatggtcaggggcttggaagaagcatgattggaaaattggtgacaaaggaatttggggaagag

SEQ ID NO: 117761 - DNA, 1164 bp, Homo sapiens
tcaatttactatttcattacggtttacaaactgatgatattccaactctattaacctttctgcatttattttctgaaattcttctgtaaatagtaacatttccttataacctattaggttactgtaattcatagattttttgtctttttgtacttcagactcatcttgcatttcgtatttcagattgaagttacatattgctgctgtctgctcctttttagtgaaaaatggcatatacaggacactgtatgagaacatagggatgctcattattactgggtgatcatttttcttagaccgggccttagctgccttcccgcggggcagggctcgggacctgcaggccgccatgcctgagcctcccactccttccatgggctcctgtgctgccggagcctcctcgacgagtgccaccccctgctccacggcgcccagtcggatcgaccacccaagggctgaggagtgcaagcacacggcgcgggactggcaggcagctccacctgcagccctggtgtgggatccactgggtgaagccagctgggctcctgagtctggtgtgcagccattgacttggcaaatgcctttttctccattcctgtccacaaggcctgccagaagcaatttgccttcagcgggcaaggccagcaatatacctttactgtcatacctcagagatatatcagctttccggctttgtgtcataatcttatcagagggacattgattgcttttcgctgctggttgtgcactttgcctggaaggagaaatggtcagatgtgcgattaggtactgattcatgggctgcagccagtggtttggctggatggtcagggacttggaagaagcatgactggaaaacatcacctctagtgatccacgagcaaaagttttgcttcctgttcccatgacattatgttctgctggcctagaggtcttagttccagagggaggaatgtgtgaattaccttcctgccttgtggaaatgtggaggtcagagccaacagcaatagcaatggtgacaagtaaggcacagaagagaatagagatgggccagtaacagcaaggctggacatttggaatgagtgtcagctccagacttccagcttctgcagcagaagctaaagtatcagtagggggctcatcccagagtatcaagtcttgggg

SEQ ID NO: 117762 - DNA, 2976 bp, Homo sapiens; identical to SEQ ID NO: 116582

SEQ ID NO: 117763 - DNA, 1070 bp, Homo sapiens
atggggccagtgcctggtgaggaggaagagagggttagagatgaatttggagatgaagattgtgcagcctttggttttattctacttgtgataagagcccctggaaacttttcagcaggtatcacccgaaagtggacagctgcagcactacagcccctttctaggacctccctgaaggacagcagtgaagggaagtcttcccagtgggcagaacttcaagcaggccacctggttatgcactttgcatggaaggagaaatggccagatgcgcgattatgtactgattcatgggctgtagccagtggtttggctggatgccaccccgtcatcgcccatgaacaaagtggccatggtggcagggatggaggttatgcatgggctcagcaacatggacttccactcaccaaggctgatctggctatggccactgctgagcgtccaatttgccagcaacagagaccaacaccgagccctcgatatggcaccattactctgggtaatcagcccgctacctggtggcaggttgattatattggaactcttccatcatggaaagggcagaggtttgtcctcactggaatagacacttactccagatataggtttgcctatcctgcatgcagtgcttctgccaaaactaccatccatggactcatggaatgccttatcctccatcatggtattccatacagcattgcctctgaccaaggcactcactttacagctaaagaagtgtggcagtgcgctcatgttcatggaattcactggtcttaccatgttccccatcgtcctgaggcagctggattgatagaacagtggaatggccttttgatgtcacaattacaacaccaactaggtgacaatactttgcagggctggggcaaagttctccagaaggttgtgtatgctctgaatcagtgttcaatatatggtactgtttctcccatagccaggattcatgggtccaggaatcaaggggtagaagtggaagtggcactacttaccgtaacgcccaatgatccactagcaaatattagcttcctgttcctgtgacattacattctgatagg

SEQ ID NO: 117764 - DNA, 1424 bp, Homo sapiens
atgggccgggcgaggcggctcacgcctgtaatcccggcactttgggagaccgaggcggacggatcacgagctctaacagtggaaaccacagtcactcaactacaacatttaaatacagtgggaataattggattccgaggtggcaggggccaagtggcagcagtcaactgtcaaaagcgagatatccagccttttaccagggtaactgtgcattggggaaagagaaatgatcagacatttcaagcactagtggacactggccttgagctgacattgattcccggggacccaaaacatcattgtgatcctccagttaaagtaggggcttatggacatcaggtaattaatggagttttagctcagattcaaattacagtaggtccagtgggtccctggactcaccctgtggtcattttcacagtgcctaaatgcataattgacatagacatacttaggtggcagaactcccacactggctccctgactggtaggatgaaggctattatggtgggaagggccaaatggaagccgttagagctgcctctgcctagaaaaacagtaaaccagaaaccatatcacacccctgtagggactgcagaaattagtgccaccatgaaggacttgaaagatgcaggggtggtgattccaaccacaaccctgttcaactctcctatttggtctgtgcagaagacaggtggatcttggagaatgacagtggattattgtatgcttaaccaagttgtgtctgcagttgaagctattgtactagatgtggtttcattgcttgagcaaattaacacatctcctgccatagagtgggtcatgcacagcagcattccatcatcaaatggaagtggtacatacatgatcgggctcaagcaggtcctaaaggcacaacctgcaccaatggcctcatggggagtttcctatgatcagtggacagaggaagagaagactacggcctggttcacagacggttcttcacgatatgctagcaccacccgaaactggacagctgcagcactacagtccctttctaggatatccctgaaggacagctgtgaagggaaatcttcccaccacccgtgtcatggaggcaaggatggaggttatgcatgggctcagcaacatggactttcactcaccaaggttgacctgcctggctatggccactgctgagtgtccaatttgccagcagcagagaccaacactgagccctcgatatggcaccattcctcagggtgatcagccagctacctggtggcaggttgattatatgggacctcttccatcatggaaagggcagagattatatgtgatctcaggagatgtgtatgggttcaagttgacaagggatggacttatgatggttaatacggagtgtcaacttgattggattgaaggatgcaaagtattgatcctag

SEQ ID NO: 117765 - DNA, 397 bp, Homo sapiens
cggattgcttaagagtactctggtgtcctccagtgtagttccacgttctccgtcgctccagcaacccctcaacccgggtttgagccccttgttggacgccacttgatgagaccagctcggtcgtggagaccccaacccagtagtgcctcggctgggttgccgtcttctcctttcagagatggatgccacaggttccgggcttcttgggctctgggaggacgcgcagcggaaggcgaggtcgctatatgaggccgctccaaagtcgcctcgcgctgttgttgcgtcactgcctccagcctccagcatccaggtagagtgcaggcatttctttcccggcacgtcgttcaccgagaggctgagactcttgcctgtccttcctctgccgcgtacgcgtggt

SEQ ID NO: 117766 - DNA, 2176 bp, Homo sapiens
atggatttcattaaggaccccaatctgaatgtggaccgcacacaagaatcagaaccaaaacctggacacagccaagactgcaggtttctcttcccttgctccaaatccactttcagaagaattagagaagaattgactaaagaatcctccccagactcaccctcggcggggccaccttcttctcatttcagtctggggccacattctccgggcctgcggggcatggcaggaggcaaagccaaaggcgaagtggccacaaattccggaggagaaagaagagggccaggcaccacgtgcctgcactctccctggatgctggaggctgctccgccgtgggcaggaggagaaggaagagaactgggtgccgcctgcctgcactctctccggatgctggaggctggaggcagtgaggcagcaacagcgcgagggcgacggcgactttggagctgcctcatgcagcgacctcgccttccgctgcgcctcctcccagaacccaagaagcctggaacctgtggcgtccagccctgaaaggaggagacggcaacccagccgcgctccgctggggtgggcgctgaaggagcccgggtcggagaggagccctccccttctctcctgcgtggaagccctgcagcctccgtttcttttgggactggggtccggggccttctgcctgacccggggtgagaaagggagccctgatcaggacccgttttgcctgcactctccctggatgctggaggctggaggcagtgacgcagcaacagcgcgaggcgactttggagcggcctcatatagcgacctcgccttccgctgcgcgtcctcccagagcccaagaagcccggaacctgtggcatccatctctgaaaggagaagacggcaacccagccgaggcttccagatcctgaggagctctggggccttccttctggacagggaacatgtctgcctggcttcctcagccagcactactgggttggggtctccacgaccgagctggtctcatcaagtggcgtccaacaaggggctcaaacccgggttgaggggttgctggagcgacggagaacgtggaactacactggaggacaccagagtactcttaagcaatcccttgctcctcagaaaagggggaaggaaggttagtactagccgacttatgcagctttgtagtgtggtagagaaatattgcccctggtttctggaccaaggaactatgaatatagagatctgggaaaaggtagccagagcactgaaaaaggcatatagggatggtgctgaggatattcctataaatatctggtcagtgtgggctctggttcatcccaccttggagcctttccacacagatcatgatgaggaggaatcagaggaagaaggagagtataatgaagtaacaaaagaggtgacagagcagttttgcttgccagctaaagcagcaaaggagggaggaaatcctagtctcactagccctcagcaattaacaacagagactgaggcagagatacagctgattgagaagcaagtgcataaggctcaaataaatagaatagatccagaaaagactttagacttattgatttttccaactcagcattcacctactggtggtgttgtccaagagcaggacttggtagaatggctttttcttccacatagtaattcatggactctaactccttatttagatcaaattgctactctgataggaaatgggagaactcaaattgttaaattgcatggatatgaccctggaaaaattattgtccctcttacaaaggcacaaatacaacaggcctttataaatactcttaattggcaaacccatttagctgatttcatgggtgttcttcataatcactttccgaaaacaaagttatttcaatttttgaaattaactaattggattctccctagaataactaaatttaaaccaattgaatgttctgaaaatgtttttacaggtaggtctagtaatggtaaagcttcttattccagatcaaaaaataaagttttccagacatcctatacttcagctcaaaaagcggagcttgtagctgtaattgaggtgctgactgcttttgagatgcctgtcaatgtaatttctgattctgcatacatggctcattccacacaattaattgaaatgctcagttatgatttcatacagatgaacaactga

SEQ ID NO: 117767 - DNA, 784 bp, Homo sapiens
atggggctaggctggctggcaggtcaagaagaggaatatccctccctcctagagacttgggcagagctgctccagaagggctccacctgcatcaccaacaccgaaggatgggtggggcaccccctggaccccattggctgcctctgcagggcgctcctggaggcctgtcgtctggaggaggagacacttaccctttacccagactcaggccccgagaagcggaaggtggcctaccagcacgtgcctgtgcccgggagccctggggagtcctacttggtgctggcgctggaggtggcactgctggggctggggcagcagcgggccctgccggaggggctgtacgcccaggacaaggtggtgcgcaacgaggagcagctgctggccctgctggaggaggtggagttggatgagcggttggtgcaggtgctgcgcaagcaggcggggctgctgctggaagggggtcccttcagtggctttggggaggtgctgttccgggagagcgtgcccatgcacacctgtgcccgctacctgttcaccgcactgctgcctcatgacccggacctggcctatcgcctcgcgctgcgagctatgagctcccctgatgaggaaacaggatctccctgccggctcctccgtcaaccagaaaaggagccagctccccttcctccttcccagaactcattcgggaggtttgttccccagtttgcaaaatccaggaagacagtgacaagaaaagaagagatgaaggatgaggaccgtgggagtggggcctttagcctggtaa

SEQ ID NO: 117768 - DNA, 447 bp, Homo sapiens
tcacagcccgtgcaaaggccctggggctggactgtgcctgtatgtttgaataacggtggcagctgcatcgaggaagcgggtcgtgagctgtccagcgccgctctggggtcggcccagcgtgtctctcctgcggctcggcgaacccgggccccccgcccggcacatctcccggagccggggccgctccgggaggggggcggtgggcgcgcgcaaaatccggcccggagtcgccgcccgggactggccgccgcaacccgcttgagcgccccaggagccggcccgaaaacccgtgctggagtttccttcctttcgcctcctctcgcctcctccccggggcacgcaaatttcgggccggattctttcttgggagacggagtaatgcgtcaggcctaacgcagtgaaaacaagcaagacccagcccggaactcccgggacctgggttcgcat

SEQ ID NO: 117769 - DNA, 1435 bp, Homo sapiens
tcaggggaccttcaggtccacggactgtgtccccgagtccagcaggagcttcttcagtagggggtcctccagtacaggcatggccatgctccctatgtgtcgggtcactggaaccacggggatcgattgggggaccaccaaaggggctgcagctgtggggtccaagggcttcttggttcctgggggactatgcctgtccccttctggcctcagcacctgtcttagcggcttgcaaaactctgtgccaaacacctgcggttcctgcttccctcgaggtgacggccactggtcgctgtgaaaacacatgtggctgctcagccctttctccgtataaaacatctggctgcagttcttgcagacaaaagtgctcctgggcttcgtccagtctgtgggactgccgttttgctggttacctctgcctgccacattctcttccttcaccggatgggggagcctgtagatgtttccaccctggattctgctgaatattgtcagcttggacttggagggatctgccgggggcccggccgatgagaaggaggccatggctacctggctcggagaagccgcacagcacatatccatcttcgccttctctttccggaagccggagaatcgcggggccctggggttgcccaagagccggtagcctccaccccgggagcaggctgggcccttttcaccttttgtgatccttgaagccgcgccattctcggctggggcctgcttccctggcagcgaggctcctggtggctcctccccacctaactgggtctgccgttggcctgtggaggggaagatgtcctccaggtccaaggtccctttagaggatcgcagctgcttggccagagaagagatgtctggattcctggaagggtccagagacggtgctgcaaggggcgttggaaccgcggccactttcagtcccccctttgcgtctcgtctcgtgctgccgggggaggcctctctgggaaccccgggtgtggtttttctcctgcgggctggggagccctctgcctcggggtttccagggccggcgtggagagagtccacagcaggagccagtggtgggggctgctgcggccacggcccctgcagcggcctcagggcggctggtttgccctcgggcgcagggagctgggaggagactgctgccacctgggcatgggagaagatccgctgggacttggtgatcatctggaacacctgcatctgctcgtggctcacaagaggttcctgcgacttgaggaagagctggcggaagagcggcgaggcatccgcagggagcccgcctgccttctgggcctcctggaggccgggctccccggggttctggcacaggaaggagtcgcagtcgaccttgaccttcttgggggcgcaggggtcatcttccccgctggccgacctggggtcgctcggggcctccgcggggacc

SEQ ID NO: 117770 - DNA, 759 bp, Homo sapiens
atgaatgatgctggaaaccatcattctcatcaaactaacacaagaacaggaaaccaaacaccgcatgctctcattcataagaggaagttgatcaatgagaacacatggacacaggaaggggaacatcacacactggagccttttggtggaacaacagacagaatagtttccccttcccatactcgcagtccagacatggcaatagccaatttccaaagttctgggtgttctgttgtccccgataccatccctcgccctcagtatcagtgtagatccagacattctgttttacttacctccaacctgactgttcccatgcagagttgtgttaagcctccttatatgctgttagtgggaaatatcaaaatttggatgaacaatcaaactgtccgatgcattaattgtcatgtatacacttgtattacctcccattttgactccaggaaaagtgtaatgttggttctagctcgagaaggaatctggattctggtaactttgcccagaccttgggaatcctccctgtcaatacgtttaattaatgaagtgttacagcgaattctaaaaagatctaagagatttgttttcactttaatcgctgtgatcatgggcctaattacagtcactgcactggccaccactgccggaatggcgttacatcaatctgttcaaacggctcattttgctaatgattggcaagccaattccaaccagatgtggaattctcaacaaggcattgatcaaatattggctgctatttga

SEQ ID NO: 117771 - DNA, 357 bp, Homo sapiens
ttttccagaaacaaatggcttgcgcactgcagatggcacaccacagacagtcccatgtgccacccactaaagctaaaaagtcacctggtaatggagttcaggccgtttcctctaatgacagaagtctatgatttttttaaaataactggttaattcaaggcaagagtttgttcttttcccgacacaaaaagaaattaagagttattatatgagagccttaaacttaggcacttaaacctcaaatcccatcatttgttgtattggtgctaagaactaaaactcatcttcaaacgtcatcttccaacacataaacagcagattcaatctagtttacctgtagctatatctcttttcgcc

SEQ ID NO: 117772 - DNA, 723 bp, Homo sapiens
atgcggaaggaaaagcagggggacggcattgccgacgggaagttcaccgcaatccggaccggcagctcccggacattcagcagcgagcgcacttcatcccactccgcaccccctccacacccacttctcaccggcagcgacgggggacatcgacggcaatcgctacccagcaacccccatgacgaagtacccaagcgcatcggcacgaagacccgtccacagaccaacctgcagcggtgggggcagtcacaccaaccacgcagagtcattgcctccactcactcctttggaggaggcagacacgcacccacccggcggcagtcaataaacgagacccccgcactgcatacgaacaggcagttgtctccccccaccacgagaggcgccatacacgagaagagagcggcgtcggcaccccccgtgagcacacacaaggatacgcgaggcgagctctgttgtcctcacacgactgtgggtgttgataacacccaactaaaactcatcttcaaacgtcatcttccaacacataaacagcagattcaatctagtttacctgtagctatatctcttttcgccttcattatcaacaatttggggaaggagataagcttcgtttgctctcctaaacaaccaatgagaaggccgcacgctgacagctgggaaaccagagatttagtccctaaagaaatcgaaagcagttatgttccagacaagagaagatga

SEQ ID NO: 117773 - DNA, 418 bp, Homo sapiens
ccagcctcgaaagaagcattttatacctggcaatatcgtgtggcaaagaagctcacagcattggaaattaatcagatcacacggtctcgaaaagaagggagagaaagaatttatcatgttgatgataccccttctggatcaatggatggtgtgcttgattatagtaaaaccattcaaggcacaagggatccaatttgtgccataactgcatcagataagatattgattgtgggtcgtgaatctggcaccattcagagatacagtctacctaatgttggtttgattcaaaaatattcccttaattgtcgagcctaccagttctccttgcattgcaactttagccgtcttgctatcatagacacctcaggagttctgactttctttgacttggatgctcgagtaacggacagtacgggac

SEQ ID NO: 117774 - DNA, 1371 bp, Homo sapiens
tggggttattgctcaaacactgtagtttatgcatataccagacctgatcgtccagaatattgtgttgtcttctgggatacgaaaaacaatgaaaaatatgttaaatatgtgaagggtctcatttctattactacctgtggagatttctgcattttggctacaaaagctgatgaaaatcatcctcagaacactggcagccaagcattgagctttgaggtgggagtttggaaatcttctcaggagaattcgacctgttcaagagaaaagccttctaaagatactgagattgagagtccccagggaaatagccctgcccatcaccttacagtaaagacgccagtcataccattgtttgttgcaatgaccaaaacccatgtgatagcagcctcgaaagaagcattttatacctggcaatatcgtgtggcaaagaagctcacagcattggaaattaatcagatcacacggtctcgaaaagaagggagagaaagccgtcttgctatcatagacatctcaggagttctgactttctttgacttggatgctcgagtaacggacagtacgggacagcaagtagttggagagttgttaaaattggaacgaagagatgtctgggatatgaagtgggccaaagataatcctgatttgtttgcaatgatggagaagacaagaatgtatgttttcagaaacttggatcctgaggaacccattcagacctctggatatatttgtaattttgaggatttagaaattaaatctgttcttttggatgagatattaaaggatccagaacatccaaacaaggattacctaattaactttgagattcggtctctgcgagatagccgagcactgattgagaaggttggaattaaagatgcatctcagttcatagaggacaatccacacccccgactttggcgcctactggctgaagcagctcttcagaaactggatctatacactgcagagcaagcatttgtgcgctgcaaagattaccaaggcattaagtttgtgaagcgcttgggcaaactactgagtgagtcaatgaaacaggctgaagttgttggctacttcggcaggtttgaagaggctgaaagaacgtatctcgagatggacagaaggaatacacttgaacttgactgtggattgggcagaactggcagtgtgaactttcacacattcctgacccttgctaaactgttcatggctctccagcaaaggcatggtataggcagcctgtctctggctaaggaaagtctgctgaatgtgaaggatcttctaagtatagaaccttggcattcagaggtatacatggtggacccagaggaaggggtccctgagttggcaattgataaggcagctgtggcatga

SEQ ID NO: 117775 - DNA, 469 bp, Homo sapiens
ccagggacatgtagaggctccacagggcagccatgagaagcatgttggcgcagcccgtgatcagtacgaaacacgagatgcccagtccgagaagagccagcaagtccaggttggagttcatgtctgaccagtccatcagccagaggatggtgggcatgtagctgaagacttcccagctcgtcctgtcctggaagtactgctggaagttcttcaggaacactctgcagggaagcagccccctgtcaccgatgagctgcttgttctgatggaaagccaccaggaatgccacgaagtacacgaaggctagggccttcaggagcacgatccgggtcagccagaaggtgcccgtgtggagatgggccggagagcctgcggggccacgccccggcgcgggcggcgactcaggctccggatccgagtacccagtcttccgcctcctcagcgactccgcgggcgccgccattgttgg

SEQ ID NO: 117776 - DNA, 984 bp, Homo sapiens
tcagccctgggtggggtcaggagtccacgagtgatgagggctaagtctgaaggccagaagggtgtcggcagccacggagagaacaagtacagttaacctgcagggttgaccagtgagggcctcaatcttccgcagggaacgccgggccacaacgtcgacgcacgaccctgggggttccaagaacatggcacccaggtcccgctgcttaggccggaaactcctgtcacataagcttttactcgtccagatttcagccattcctgggagtgacatctgtgctgaggggaagctcagtgtcagtgtcaggcatccccgaccacctcgggcagcctcggtcctcccaggagccgtcacggcccgagaacgccgctgcccagatgtgaaccgggtgtccaggatacgcaggctgcacagtggcgtgaatgaagggcagggctgaactccagggcctacggacaatcgctgcacagccgggccagtggctgaccctgcttcctcgctgtccaagtacacgaaggctagggccttcaggagcacgatccgggtcagccagaaggtgcccgtgtggagatgggccggagagcctgcggggccacgccccggcgcgggcggcgactcaggctccggatccgagtacccagtcttccgcctcctcagcgactccgcgggcgccgccattgttgggtctctgcggaggagggtgctagggcgatcgtcgcagccagcaagggacagagtaggcagggctgtgcctggaatgctcgggggaccctcccctttctcccagcctgagcacccttccgcctttgcacaacccagctcctgcctgcccttgggactggacttcaagctcttaataccatcacagtgaccatcagcttcagcataggaattctggggacacattgtgaccacagcagctaccttctggctacagtgagtaatgctgctgtgaacatgggcgtacatcccacaatcccacat

SEQ ID NO: 117777 - DNA, 1028 bp, Homo sapiens
tttcgtactccgatgtgatgggccagtgggacccgcttttcaactgcaactcgggcgactgcatcttctgctgagggacttgtggcttacgggtctgctgcccgtttaagaagcggcgaatgaaccaaagcacctgcaccaactacgacacgccggtctgggtcaacaccggcaagccccccgcccgcaaggacgaccctttgcacgaccccaccaaggacaagaccaaactgaccgtctacatcatctgcagggaggtggccgtcatggagctcgagggcatcttcaccaagctggggctggacaaagcgcaccggccccaaagggagcacatgtccagggcccttgcggatgtcatgagagcacagggcctgtggaacactgatcacatggagagagacctaaacatcgttgtccacgtccagcattatgagaacatggacacgagaacccccataaataatcttccccccatgaccagagataacaaacagctgacccagaaggagacaattgatcacaatgctgcccaacagccaattagattcccctcaggaagctgtggctcagaggttaagacctttgtgggagatcacatggacagcaatgaccccaccagggctggatttagacgcccaactcctaaccccggcctcttcctccactctgtgtccgactccacttcagcagcccttgcaccaattacgacacgccgctttggctcaacaccggcaaagccccccggccgcaaggacgaccccttgcacgaccccaccaaggacaagaccaacctgatcgtctacatcatctgcggggtggtggccgtcatggtgctcgtgggcatcttcaccaagctggggctggagaaagcgcaccggccccaaagggagcacatgtccagcttgtcagcaaacagcttggtggtgtggctgcagaagcccacgtggacagttctggcctttgggtatcaccaggtcccaggcataattagtataaatcaaaatcctctagactatgacaggaaaatg

SEQ ID NO: 117778 - DNA, 1095 bp, Homo sapiens
gtttagtagaaccgggcaggttgcttgaagcgcaggggtttgacaaaaacaaacggtgacggcgccgcggaagggtctgtggccgaggcggggaagccccagcgccgggccaaggccaaggccagccggactaaaacaaaggaaaagaagaagtatgaaactcctcagagggaagagtccagtgaagtctcccttccaaaaacctccagagagcaggaaatcccttctctagcctgtgaattcaaaggagaccatctgaaggtggtaactgattcccagctccaggatgatgccagtggacaaaatgagagtgaaatgtttgatgtaccactcacctccttaactataagcaatgaagagtccctgacgtgtaacacagagcccccaaaggaagggggagaggccagaccctgtgtgggggacagtgcaagcactccaaaggtccaccctggagacaatgttggaactaaagtagaaacccccaagaacttcacagaggtagaggaaaatatgtcggtacaaggtggactttcagaaagtgcaccccaatctaatttttcttatactcagccagcaatggaaaatatacaagtcagagaaactcagaatagtaaagaagacaaacaaggcctggtttgttcttcagaggtgccacagaatgttggcttgcagagttcttgcccagccaaacatggttttcagacacctagagtgaagaaactgtatccccagttgccagctgaaattgctggagaagcaccagctttggtggcagtgaaacccttgcttcgcagtgagcgactctacccagaactcccgtctcaactggaactagtaccatttactaaagaacagctaaaaatcttggagcctggttcatggctggaaaatgttgagtcatatttagaagaatttgacagcatggctcatcaagacaggcatgaattttatgagttgcttttgaactactcacgatgtaggaagcaactgctgctggctgaagctgagctgcttactctgacatctgattgccaaaatgctaaaagtcggctgtggcagtttaaggaggaacaaatgtctgtacaggtattttga

SEQ ID NO: 117779 - DNA, 931 bp, Homo sapiens
  misc_feature (1)...(931): n = a,t,c or g
atgggccagaccgcctccacctcccccgcccgcctggcctgtcctgagtgcatttccctgcactgtgtcgtcactgcacagccagtcaccgcggtctcagtcatcggcgcggatggctatgctggggtcccagggtggccgcagcagtcagggtcactgtgggagccctggggtggagtgacaaaccgcattgtcctgtgcccgccatggcagaagcgcagcctttgtatggaggcccaaccgcgctcccgtctggagaagcggcttccggggtgtggctgccgggtcggctctggtccacagcacggccctccccagccgacgacagccaccggagaggagatcggaacacgattgtctcagatgcagggcgctgtgcgggacgaagccgcaaggactctcgtatcgggcccttgggactcgggaaggttccagaggcggcggctgctctggacctcggtgttcactgacctttgtttcacttgcctctgctcgactccgagagcaggaaacccggccgtggcctggcagctccgcctcccatgcccgcacgctggggtctgtcttgtctggagcaagtggggcacacccggaaggaaggcgggggtcagggctgtcggccttggcccccctgctggtcgcctgtttcggggactcggggcggcccagtnaccacccgcctgaggcggggctcagcagcgttgcatgtacgggcctcgtactgcctcatggaaaatcctccggagccgccctccattgtgggttcctgagagtaggacacatttgccatggttttgtgggaatcacgcgcccctgatggaacttttctgctgttgtgaagtacttttatccatttggcttctctgctgaccttgccaagttgttcgaggtggaattaaacacctcccagaccaaaaaaaaaaaaaaaaaa

SEQ ID NO: 117780 - DNA, 1788 bp, Homo sapiens
  misc_feature (1)...(1788): n = a,t,c or g
gcggccgcgcactccccgcttccccgcccggctccggccacaggcctgggacgccgagccaccgccggcgtttcagacgcaaaccccaccgcgaccctgcagcagcctgccccgcctggccgccagaggcaccttccaactccgaaacacatttttcaacatataatagaatcattatcagaggtggacacatttagaagttgttcttaatcagagggcagcttgtgcttaggaaagccaacctcagtcctcagcacccagcacccagtgctgcaggtttctcctgggtgaagatggaccagcccaccttggccctcccgcaagctagaacaatatgtacacgtctctcaaactatgaagagaagatttgggaggagtatgagaaaatcctcaataccaaactagcagagcaatacgagtcgtttgtgaaattcacacatgagcagattatgcgaccatgtgggacaagcccaacaaactatgtgtcttgaagctttttgttgcagatctcggtaccaggtttgacctcaaggcatggttgctatacatttttttgcaactggtttgatgtcagcatttcagctccaactttgcatcctgagaacacttaaacgtttctgcaggtccattttatacaacttgaaagaccgtaaaactttctggttgccacaagcatatctttcttttctgctcatccaataaacagctgtgccctactgtgatagatttttccaacaaaaattacctggagcagcagtttagcaaaatatgccttcagtggcattcaacaaatggagtttccccaagcacagttctgtaagaagtgcgtgtgagagtgtgtgtatatgtgtgtatgtgtattttaagttattatttgtattgtgcaaaaatttttttttgatcttggggattctggctgtgaatttggtgcacgacaattatggtaaaaaaacatttgcttggtctaaagaagatcattaatgttttgtgaccatacaagttgtaacagtgggattgtttttatgtgtaggtattgttaaatacagggactgtttccagggcacagaatatggaatcgtaagttagggatgggacattaggatgtggattatggatggataaaagccgaaggtcttgcgggtccctgttatcctacagacacgtgggtgagaaattaggaccaacctnggagacgggcccattgacacatgggcncctgcctggggcatgttaggttaattctttgactccaagccttaaaatactcacatggagtcagcgctcacctcattcacacaattatcatagagctccctggacactgaacctctaaagggaaaaggtctaccctggagcccagggagccatcagggttggcttgggagcatgagaggtgagcccagggcttaggcctgggccaggccccggcaagcactgctactttggggaggagccactttcacctttgtattagttattaaaaaatataatttgggctgggcgcagtggctcacgcctgtaaatcccagcaactttgggagtccgaggcatgcggatcacttgaggtcaggagtttcgagaccaccctgggccaatatggtgaaaccccatctctactaaaaatacaacaaagttagccgggcgtggtggcaggcgtctgtaatcccagctgcttgggaggctgaggcaggagaatcacttgaaccctggaggtggcggttgcagtgagcacagatcatgccactgcactccagcctgggcaacaataatcggacttcgtctcaaaaa

SEQ ID NO: 117781 - DNA, 197 bp, Homo sapiens
  misc_feature (1)...(197): n = a,t,c or g
agcttactgttggaaatgctatcagttgtaaagatagggaaaatctctcttncactacggtggtaggaaatgaatacatatcatttcccagcttccaggatgtcctggcaccttaactgtgcgtccccaaggacctacagatcacagggcaacaggggccgtgaaagagtagcccagggcncccaaggtgcaggagg

SEQ ID NO: 117782 - DNA, 392 bp, Homo sapiens
  misc_feature (1)...(392): n = a,t,c or g
ttgggatccgtctcctctttcgcctcctgcaccttgggagccccgggctactctcccacagcccctgttgccctgtgatctgtaggtccttggggacgcatagtcaaggtgccaggacatcctggaagctgggaaatgcatttcatcatatcaatgtgaagatttcttccagaccatggctggagaaggaaagaagattgttgcagtggcaggaccaaggtcaaatgagttatagccaagtctacagtaagatgtggcagtattctgttttgaagccgggaccatgattggcaagcttgccacttggtcaagtgctcaccctctgaaaatgtcttccttggtctttgcctccagctgggtgccacaaactctgaactggattccaaggcttn

SEQ ID NO: 117783 - DNA, 496 bp, Homo sapiens
cccagttcagagtttgtggcacccagctggaggcaaagaccaaggaagacattttcagagggtgagcacttgaccaagtggcaagcttgcccaatcatggtcccggcttcaaaacagaatactgcccacatcttactgtagacttggctataactcatttgaccttggtcctgccactgcaacaatctgtgaaaaacacaagagaattcatactcacctgagacttaggtgacaggcctgcagaacttggttctctctatagtcactgagtcaggcaaaacacaccttctttccttctccagccatggtctggaagaaatcatttcccagcttccaggatgttctggcaccttaactgtgcgtccccaaggacctacagatcgcagggcaacaggggctgtgacagagtagcccagggctctcaaggtgcaggaggcgaaagaggagacagatcccaagctcctgtgccagcaccagcgagagactccctcgtgcc

SEQ ID NO: 117784 - DNA, 769 bp, Homo sapiens
ctggaaccaattcttgaatttgggtagctttctcatgcctcttataaaagcctttcctttatgcccctctggtggaccagaaatactggctgggtgctttccatttcaccaatcactgtttgttccagataaactggttaacgttttaacataggactcccgttaatttttaacaagagagactggggaccccacgggccgcagctcctcccacggcaaacacccagtggcagtttttccctgatgacccaccaggcctccctgaacaatctgggaaataactcatggctgtgggcgcagagcagggcgctgcccaggtacaggaccggatgggccgtacgggacgtgggggccctcgttgctggcccagcggccatcttgcagccacagggggcttagggccaagctgcgggagactcggagctaaccgtggggaggccggtcctgccggtttcacagtctgttctcccctctcgggatggcgaacgccgtatactcaccatttcccagcttccaggatgtcctggcaccttgactatgcgtccccaaggacctacagatcacagggcaacaggggctgtgagagagtagcccagggctcccaaggtgcaggaggcgaaagaggagccggatcccaagttcctgtgccagcgccagcgagaaacaaagaccccgccaaacgccagaagccacgccctcctctcctgtcctctccaactgcgcgcctgattgggctgttccctcgtgccgactcgtgccgctcgtgccg

SEQ ID NO: 117785 - DNA, 545 bp, Homo sapiens
  misc_feature (1)...(545): n = a,t,c or g
agaacttgtgaatctgaaaatcacctgcttgacattcatttgagaaagtgaaacataaaggagagtaacataagcaagacgacagaatgtgaggttctgcatccacatcccccacgacataatgcagctgccacagcaaacataagtgcattcatgaaagccttggaatccagttcagagtttgtggcactcagctggaggcaaagaccaaggaagtcattttcagagggtgagctcttgaccaagtggcaagcttgccaatcatggtcccggcttcaaaacagaatactgccacatcttgctgtagacttggctataactcatttgacctaggtcctgccgctgcaacaatcttctttccttctccagccatggtcatttcccagcttccaggatgtcctggcaccttaactatgcgtccccaaggacctacagatcgcagggcaacagcggctgtgagagagtagcccagggctcccaaggtgcaggagacgaaagcggagacggatcccaagttcctgtgccagcgccagcgagagacncag

SEQ ID NO: 117786 - DNA, 3695 bp, Homo sapiens
atggggaaaagatcatttgaacgggtcttggtggacaagtgtgactctggtaggtcctgtctgaggaaacaacatgaaaatgagtgtgcctttatacagatactggacactcagagtcttatgattcctggccagagaggaagcttcaggcttgcagattctcagcacacagacagggtcctgtgcacactgatggcagagaagtgggacagaaaggctttgtcctacacgcggaattccttccgggcacagatacggttgaggaagacgaggttccaagggaaaggatgtatgatatgcaagaagagcagagtgcttccatatcaagcagcttatgtctcgcagcatggcagtgcctgccaaccttcctcacacctcccctctgttggttctctcagcagcacgggggacgatgaagaggaagaagaaatcgtgcatatgggcaatgcaattatgtcattttattcggcccttatagatctactgggccgctgtgctcctgaaatgcacctcatccagacaggaaagggggaagccatccgcatcaggtccatcctgcgctccctggtccccacagaagacctggttgggatcatcagcatccccttgaaactgccctccctcaacaaagatgggtcggtcagtgagccagatatggcggccaatttctgccctgaccacaaggcacctatggtgctgttcttggaccgcgtttatggcattaaggatcaaacttttctgctccacttgctggaggttggatttttacctgacctaagagcttctgcctctctagatacagtttccctaagcaccacagaggctgcgcttgcactaaataggtatatatgttctgctgtgctcccgctcctcacaagatgtgcccctctctttgccggaacagaacactgcacctctctgattgattccacactgcagacaatatacaggctatccaagggacgttccctcaccaaagcacaaagggacactatagaagaatgtttgcttgccatttgcaaatgtgaaactgctgtaaagtcactggggtgtgagagaggggagagggagcgggcacggggagtgggggcaaggaaacaacgggtagtaattgacgagagaaaatcttcagacccacgacttgcagcccaccatcctctccccatatcagcatcccccaaagatcttccagaattacaagcaaagcttctgacgaatcactatgaacagtgttggaagtattactgcctgccttcaggatgggggagctacgggctagctgtggaagaagagctgcacctaacggagaagcttttctgggggatttttgactcgctctcccataagaaatatgacccagatcttttccgaatggccctgccttgtctcagtgctatagctggggccttgccaccagattatttagataccagaatcacagccacgttggagaaacagatctcagtggatgcggatggcaactttgacccaaaacctattaacaccatgaatttttccttgcctgaaaaattggaatacatcgtcaccaagtatgctgagcattcacatgataaatgggcctgtgacaagaacttcaagagagaagagcaaaattttgtgattcagaatgaaattaataatttggcatttttaactggagacagcaaaagcaagatgtcaaaatctggaggacaagaccaggagcggaagaagacaaagcggcggggagacttgtattccatccagacctccctcatcgtggctgcactcaagaaaatgctgcccattggtttgaatatgtgtactccaggcgaccaggagctgatctccctcgcaaaatcgcgatacagccatagggacacagatgaagaggtcagagaacatctgcggaacaacttgcacttgcaggaaaagtctgatgacccagctgtaaaatggcaactgaacctctacaaggatgttctgaagagtgaagaacctttcaatccggaaaagacagtggagcgtgtgcagagaatttcagcagctgtcttccacctggaacagttgagaagccaaaattcttccagaatgaagaagtctgggctacaggtgactagcttctgccaccagaagatcagcctaatgtgcaccaaccgatgtgatctcttctcaggtggaacagcctttgaggtccaagaaggccgtctggcacaaactgttatcaaagcaacggaaacgggcagtggtggcctgtttcaggatggcccctctctacaacctgcccaggcaagtattttgtcttttttcctggcatgtaagccagcgatgggaatggaggtatcctcccacagctgtgctctctcactcttaatccaaggaatagaaattggaatccttggcctatggagctattgcagtctgcatagtataagggcctggctaagacaatcaaggcaccgctctattaacctcttcctccatggctatcagagattttggatagaaacagaggagtattcctttgaagagaaactagtacaggatttggctaaatctccaaaggtggaagaggaggaggaggaagagacagaaaaacaacctgacccactacatcagatcattctctattttagccgcaacgctctcacggagaggagagttgtgtttattagatttccctttaatttgattgtctgtcttctcccttccctgctccatgaaatccagagttgtcaaagtggtgaggatgaagaagaagatgaagacaaggaaaaaacattcgaagagaaagagatggagaagcaaaaaaccctctatcagcaagctcggctgcatgagcgtggtgctgcagagatggtccttcagatgataagcgctagcaaaggtgagatgagccccatggtggttgagacgctgaagctggggatcgccattctgaacggaggcaatgctggtgtgcaacagaaaatgctagattacctaaaggagaaaaaggatgctggattctttcaaagcctttctggtcttatgcagtcttgcagtgtccttgatttgaatgcatttgagaggcagaataaagctgaaggcctggggatggtgactgaagaaggaacacggacaagctctgacccagcactggtgctctcagactttcagaacttcctgcggactcagatgggcaacaccaccaccgtgaatgtcatcatcagcactgtggactaccttctgcgtctgcagcccatggatcaaggagtaattttgacttgcaagtcttattttttaagaaatgcatttcgtaaggctacagctgctacagatagtgattcctctgatggatctgggcacgtcagtagccatcaacatcaaggcaagacctttcaccagcaaaaagatggtggaacttacaacttgctgagagctcaggaatcaatcagtgatttctactggtattattcagggaaggacatcattgatgaatctggacagcacaatttttccaaagctctggcagtcaccaagcagattttcaattctcttacagaatacatccagagcaggctcttctcgctcactgccctgtactttactgaaggatcagatagctcaagggtatctcctgtttctggtctaggattccagtcaaatcgagctgctgaaggactcttggatcttcttcaagacatgggggggatgcttctgtccctcctgggaag

SEQ ID NO: 117787 - DNA, 2523 bp, Homo sapiens
atgaagcagtttctgctgtacttggatgagtccaatgccctggggaagaagttcatcattcaagacattgatgacactcacgtctttgtaatagcagaattggttaatgtcctccaggagcgatgtcacactaggcttggttacactgagtttctggtggcctggagggtaacttttggcctttgtgtggaagctgtcactttgcaccttaaatatcagatcttaattcggggacttcttgagatgatgtccttcagtgatgcagatattctgaaacaactccctgtaacagtcccaggcctcttccctgcctccctgtcaccaagcagcctgctgggcaactcccctccttcttggctgcgacataactcagagtccaaagtttctgctgtctcaagcccttcagccaccaagacactcagcacagggatagggaaactggatcctggacataaggagatggcagaggagtcagagcttttgaagaataagatgcaagcccctcccctttcgaggtgtcctgagagccaaaaatgccagcaccagctgaggcttcatcactggaaacccagcgtccggcaccaggtgaaacgccgtagccccgctgtgctccgctcagccatgccacctgcagactgtcctgcagttctggaggccaccacagccacacatccagagaaaggcacagctcttagtaaacatttgccatcatcagatagtatgtctctaaaagtagatgttgaggctcttgaaaattctcctggtgctacgtacatttggaagggtggaaaagttactagagatagtcaaccaaaggaacaaggaaagggagatttgaaaaagaaaaagaagggaaaattgcctaagaattatgacccaaaacttaccccagatccagaaagatggctgccaatgcaagaatgttctttctaccagggaagaaagaagggtaaaaagaaggatcagatgggaaaagggacccagggagcaactgcaggagcttcatctgaactggatgccagaaaaactgtgagtagcccacccacctccccaagacctggcagtgcagcgacactatctgcctctacaagtaacatcatacccccaagacaccagagacctgcaggggctccagcaacaaaaaagaaacagcaacagaaaaagaagaaaggtggaaaaggttttccagtactacgtgaaataacggtggtaaaagtggacacacttgttgtgttccagatcttagaggaaaggctttcagttttccacattcagtatgatactagctatccttttagtacagttgatatagaagatcatgagtgtgctgtgtggctgctcctacggaagagcaagtcagatgacaaaaccacgcgactcgaggctgtgcgggaaatgtcggagacccatcactggcatgatgcagaaaaggcctttgacaaaattcaacaacccttcatgctaaaaactctcaataaattcggtgttgatgggacatatctcaaaataataagagctatctatgacaaacccacagccaatatcatactgaatgggcaaaaactggaagcattccctttgaaaacgggcacaagacagggatgccctctctcaccactcctattcaacacagtgttggaagttctggccagggcaatcaggcaggagaaggaaataaagggtattcaattaggaaaagaggaagtcaaattgtccctgtttgcaggtgacataattgtatatatagaaaactccattgtctcagccccaaaactcctcaagctgataagcaacttcagcaaagtctcagaatacaaaatcaatgtgcaaaaatcacaagcattcttatacaccaataatagacacacagagagtcaaatcatgagcaaactcccattcacaattgctacaaagagaataaaatacctaggaatccaacttacaagggatgtgaaggacctcttcaaggagaactacaaaccactgctcaatgaaataaaagaggatacaaatgaatggaagaacattccatgctcatgggtaggaagaatcaatatcatgaaaatggccatactgcccaaggtaatttatagattcaatgccatctccatcaagctaccaatgactttcttcacagaattggaaaaaactgctttaaagttccaatggaaccaaaaaagagcccgtgtcgccaagtcaatcctaagccaaaagaacaaagctggaagcatcatgctacctgacttcaaactatactacaaggctacagtaaccaaaacagcatggtactggtaccaaaacagagatatagatcaatggaacagaacagagccctcagaaataatgctacatatctacaactatctgatctttgacaaacctgagaaaaacaagcaatggggaaaggattccctatttaataaatggtgctgggaaaactggctagccacatgtagcaagctgaaactggatcccttccaagctgaaactggatcccttccttacaccttatacaaaaattaa

SEQ ID NO: 117788 - DNA, 6209 bp, Homo sapiens
atgatcctggaccaagcctttaaatatataacagaattgaaaaggcaaaatgatgaactcctgcttaatggaggaaacaatgaacaagctgaagaaataaaaaagctacggaaacaactggaagaaatccaaaaagaaaatggccgatatattgaattactgaaagctaatgacatatgcttatatgatgacccgacaattcactggaaaggaaatcttaaaaactcaaaggtctctgttgttattcctagtgaccaggttcaaaaaaaaattattgtttattccaacgggaatcagcctggtggaaacagccagggaacagctgttcaggggataacttttaatgttagtcataatttacaaaagcagaccgccaatgtggtgccagtacagaggacttgcaatcttgtgactcctgtatctatttctggagtttacccttctgaaaacaagccatggcatcagaccacagttcctgcattggctaccaaccagcctgttcctctttgtcttcctgctgccatttctgctcagagtattctcgagcttcccacctctgaaagcgaatcaaatgtgcttggtgccactagtggctcactgattgctgtttcaattgaatctgagcctcaccaacatcattctttgcacacatgcctaaatgatcaaaattcttctgaaaataagaatggacaagagaaccccaaagtattgaagaaaatgaccccttgtgttacaaacatcccccacagctcctcagcaactgccactaaagtgcaccatggaaacaagtcctgcctgagcatacaggacttcagaggtgattttcaaaacacttttgttgtttcagttaccaccacagtctgctcgcagcctcccagaactgcaggtgattcttctccaatgagcattagtaagagtgcagacttgacaagtacagctacagtggtggcatcatctgcccctggagtagggaaggccaccattcctataagcactctttcgggaaaccctttggacaatggttggactctttcttgttctttgccttcttcaagtgttagtacttcagatttgaaaaacattaatagccttacacgaatctcttcagctggaaacacacagacaacgtggactactttgcaactggcaggaaacactattcagcccttaagccagacaccatcttctgctgtgactccagtattaaatgagtctggtactagccccaccacaagcaaccacagtagatatgtggctacagacatcaacttgaataattcctttccagcagatgggcagccagttgagcaagtagttgtaacattgccttcttgtccatctttacctatgcagccactaattgcccagccacaagttaaatctcagcctcccaaaaatatccttccactgaattcagcaatgcaagtgattcagatggctcagccagttgggtcagctgttaattcagctccaactaatcaaaatgttataattcttcagccacctagcaccaccccatgcccaacagtgatgagggcagaagtttccaaccaaacagtaggtgcaacagatagtaatcatacaggctgctaatcagaatcctttgccactcctccctgctccacctcctggttctgttcgactccccatcaatggagccaatactgtaatagggtctaataattcagtgcaaaatgttccaacaccacagacttttggaggaaagcatcttgtccacatattaccaagaccttcatctttatcagcgtctaactcaacacaaactttttctgttaccatgtcaaaccaacagcctcaaaccatttctttaaatggacagctctttgctttgcagcctgtgatgtcttcatcaggaactacaaatcaaacccctatgcaaattattcaacccaccaccagcgaagatccaaataccaatgttgccctgaatacatttggtgctttggccagcctcaatcaaagcatatcacagatggctgggcaaagctgtgtacaattgtctattagccagcctgccaattctcaaactgctgcaaatagtcaaaccactacagctaactgtgtttcattaacaacaactgcagcacctcctgtgacaacagatagttcagccacactagctagtacttataatctagtgagtacttcctcaatgaacactgttgcttgtttgcctaacatgaaatctaaaaggttgaataagaagccaggtggcaggaaacacttagcagcaaacaagtcagcgtgtcccctgaattcagtcagagatgtgagcaagttagactgccccaacactgaaggctcagcagagccaccctgtaatgatggactgctagaaagcttccctgctgtgttaccatctgtctctgtgtctcaggcaaatagtgtgagtgtttctgcttcacattctttgggtgttctaagctctgaatcattaatacctgagtctgtatcgaaatctaagtcagcagaaaagtccagcccaccctcccaagaatctgtaacaagtgaacattttgcaatggccgcagcaaaatccaaagattctacccctaatctacaacaagagacatctcaggataaaccaccaagtagtttagcattatcagatgctgccaaaccctgcgcttcagccaatgtattgattccatctccaagtgatcctcacattttggtttctcaggttcctggtttgtcatctacaacaagcactacaagtactgactgtgtttctgaggtagaaatcattgctgaaccttgcagagttgagcaagattcatcagatacaatgcaaaccacaggtctcttaaaggggcaaggtttaactacattgctatctgatcttgctaaaaaaaaaaaccctcagaaatcatctctttctgatcagatggatcatcctgacttttcttcagaaaatcctaaaatagttgattcaagtgtgaatttacatcccaaacaggaactattactgatgaacaatgatgatagagatcctccacagcatcattcctgcctccctgatcaagaggttattaatggttctttgatcaacggtagacaggccgactctcccatgtcaaccagctctggcagtagtcgtagtttctcagttgcatccatgcttcctgaaacaacaagagaagatgtgaccagcaatgcaacaactaatacatgtgacagctgtacctttgtagagcaaactgatatagtagctcttgcagcaagagctatttttgaccaggagaaccttgagaaggggagagttggcctccaggctgatataagggaagttgcttcaaagccttctgaagcatcattgttagagggagacccacccttcaaatcacagatacctaaagagagtggcacaggacaggcagaagcaacaccaaatgaatttaattctcagggttcaattgaagcaactatggagaggccccttgagaaaccaagttgttctctaggaattaaaacatcaaatgcatctttacaggattcaacttctcagccaccaagcatcaccagtttaagtgtgaataatcttatccatcagagcagcatcagccatcctctggccagctgtgcgggtttatccccaacttcagagcaaacaactgtgcctgcaacggttaatctgaccgtttcatctagctcctatggcagtcaacctcctgggaccatctctgatgactgaatattcccaagaacagctaaatactatgactagtaccataccaaattcacagattcaagagccactcttaaagccaagccatgaaagccgtaaggattctgctaagcgtgctgtccaagatgaccttttactgtcttcagctaaacgtcaaaagcactgtcagccagcccccctcaggcttgaaagtatgtccctgatgagcagaactccagacaccatttctgaccaaactcaaatgatggtcagtcagatccctcctaattcttcaaactcagttgtgcctgttagcaacccagctcatggagatggccttacacgattatttccacctagtaacaactttgtgactcctgcattgaggcaaactgaagttcagtgtggttctcagccttcagttgctgaacagcagcaaacccaggcaagtcagcatctacaggccctgcagcagcatgttccagctcaaggtgtatctcaccttcatagtaaccatctctacataaagcagcagcagcagcagcagcagcagcagcagcagcaacagcaacaacaacaagcagggcagttaagagagaggcatcacttatatcaaatgcagcatcatgtacctcatgcagagagctctgtccactctcagccccataatgtccaccaacagaggactctgcaacaggaagttcagatgcagaaaaagaggaatcttgttcagggcacccagacctctcagctttccttacaaccaaagcaccatggaactgaccaatcccgatccaagactggccagccacatccccaccatcagcagatgcagcaacaaatgcagcaacactttggaagctcccagacagagaagagctgtgaaaacccttcaactagtcggaaccatcataaccatccccagaaccatctcaatcaagatattatgcaccaacagcaggatgttggaagcagacagcaaggttcaggggtttcatctgaacatgtatctggccataatccaatgcagaggcttttgacatcaagaggcttagagcagcaaatggtgtcccaaccaagtattgtgactagatcttcagacatgacctgtactccacacaggccagagagaaatagagtttcaagttattctgctgaggcactcattggaaagacatcttctaattcagagcagagaatggggatatcaattcagggttccagagtttcagatcagcttgaaatgagaagctatcttgatgttcccagaaataagagtttggctattcataatatgcagggtcgtgtggaccatactgtggcctcagatatccgcctttctgattgtcagacgtttaaaccaagtggagctagtcaacagccccagagtaattttgaagtacaatcttcaagaaacaatgaaataggtaaccctgtatcatcattgcggagtatgcagtcccaggcttttcgaattagtcaaaacactggccccccaccaattgaccgtcaaaagagattatcttacccaccagttcagagcatcccaacaggaaatggtattccatcaagggacagtgaaaatacttgtcaccaaagtttcatgcagagcttacttgcccctcacctcagtgatcaggtcattgggagccagaggtcactctcagaacatcagaggaatacacagtgtggtccatcctctgcaattgaatataattgtcccccaactcatgaaaatgtccatattagaagagagagtgagagtcagaatagggaaagttgtgacatgtcgttaggtgcaattaacaccaggaacagcaccttgaatattcctttttcaagttcctcttcctcaggagatattcaaggtcgaaacacaagccccaatgtttctgtacagaaatccaatcccatgaggattactgagagtcatgccaccaagggccacatgaaccctccagtcacaaccaacatgcatggggttgcaaggccagcgttgccacatccatctgtgtctcatggaaatggcgatcaaggccctgctgtacgtcaagctaattcttcagttccccagagatcaaggcatcccctgcaagacagcagtggttccaaaattcgtcagcctgaaaggaatcgttctggaaaccaaaggcaaagtactgtctttgatccaagtcttccccatcttcctctctctactggtggcagtatgattcttggacgtcaacaacctgccacagagaagagaggaagtattgttcgtttcatgcctgatagcccacaagtacctaatgataattcagatatgccaccaatgcacatgaccaactctcacttatccaattttaatatgacatctttgtttccagaaatagccacagtgcttcctgatggctcagcaatgtcacctttgcttacaatagcaaattcctctgcctctgactcttccaagcagtcctcaaacagacctgcccataacataagccatattctaggtcatgattgcagttcagctgtttaa

SEQ ID NO: 117789 - DNA, 415 bp, Homo sapiens
cttgcctttgatgattgagtactgccacttggcccctgccacctcgggatccaattattcccattgtatttaaattttgtagttgagtgactgtggttcccactgttagatctctaggggcctgccaggactttagtctagttataggtctagaagcaaataggagtattgggggtggcttctgaggagaatcaacattatcttgactggcaactgcctcaggggaggccatcactattgcctcaggcagaagagagtttatctcctcaaacaaaggtggaaaggctgaaggcagcatggattgaggaggggattttgccactactggggatgaggaagctgtttcttctagcaagaaaggttcatcagagtttacaagctcagtgtccccagcttcatcagggtcctcccacat

SEQ ID NO: 117790 - DNA, 886 bp, Homo sapiens
atgctggatctcccttggtttaatgtagaggaggggatccaaaggctaagggaaattgggatgctagagtggcttagtcactttagacctacccgtctcagcagggaggatccagaagacataccgttcaccaataccttgccaaataaatttgtgaggggagtacctgcatccttgaagagctctttcattggtcttctctgtatgccagatcttaccaagacagttggatcttggagaatgacagtggattatcataagcttaaccaaacggtgactccaattgcagctgctgtaccagatgtggtttcattgcttgagcaaattaacacatctcctggtacctggtatgcagccattgatttggcaaatgccattttctccattcctgtccataaggtgaaggataagttgctgcatttggcccctcctacaaccaaaaaagaggcacaatgcctagtggggctatttggattttggaggcaacactttcttcatttgggtgtgtcactctgggtcatttatcgagtgaccctaaaggctgccagttttgagtggggatccagaacaggagaaggctctgcaacaggcaggtctaggctgctgtgcaagctgctctgccacttgggcccctaaagacccagcagatccaatggtgcttgaggtgtcagtggcagatagggatgctgtttggagcctctggcaggctcccataggtgaatcacagcagaggcctctaggattttggagtaaggccctgccatcttatgcagataactactctccttttgagagacagttcttggcctattactgggctttagtagaaactgaacgtttgactatgggtcacaagtcaccacatgacctgaactgcgtatcatga

SEQ ID NO: 117791 - DNA, 1818 bp, Homo sapiens
atgcatgcacagcctcaccaggtgtctactgttaaagtgagggcattgattggaaaagaatgggaccctgcaacttggaatgcagacgtgtggggggaccctgatgaagctggggacactgagtttgtaaactctgatgaatcttttttgccagaagaaaaagcttccccatccccagtagtgacaacatccactccccaacccatgctgccatcagcctttccacctttgtctgaggagataaaccctgcactgcctgaggcaacagtgatggcctcccctgaggcagttgccaggcaagataatgttgattctcctcaggagccacccccaacacccctgtttgcttctagacctacaactagactaaagtcctggcaggcccctagagggccagaatgcataattggcatagacatacttagcagcggacagaacccccacattggctccctgactggtagggtgagggctattatggtgggaaaggccaaacggaagccattagagctgcctctacctagaaaaatattaaatcaaaaacaatatcgcatagctggagggattgaggagattagtgccaccatcaaggacctgaaagacgcaggggtggtgattcctaccacatccctgttcgactctcccatttggcctgtgcagaagacagatggatcttggagaatgacagtggattatcgtcagattaatcaagtggcaactccaattgcagctgctataccagatgtggcttcattgcttaagcaaattaacacatctcctgacacctggccatacgaccccccatatccaatggtgattgaggtgtcagtggcagataggcatgctgtttggagcctttggcaggcccccataggtgaatcacatcagaggcctctaggattttggaacaaggccctgccatcttctgcagataactactctccttttgagagacagctcttggcctgttactgggctttggtggaaattgaacgtttgattatacccaatggtttggctggatggtcagggacttggaagaagcatgactggaaaattggtgacaaagaaatttggggaagaggtgtatggatgaaactctctgagtggtcaacaactgtgaagatatttgtattccatgtgagtgctcaccaatgggtgacctcagcagaggaggattttaataatcaagtggataggatgacctgttctgtggacaccattcagcctctttccccagccacccctgtcatcgcccagtgggcccacgaacaaaggggccatagtggcacagatggaggttatggatgggctcagcaacatggacttccactcaccaaggctgacctggctatggccactgctaagtgcccaatttgccagcacttatgggggaatggccttttgaagtcacaattacaacgtaaacaaggtaacaatagtttgcagggctggggcaaagttctccagacggccgtgaatgctctgaatcagcatgcaatatatggtactctttctcccatagccagaattcatgggtccaggcatcaagggttggatgtagaagtggctccactcaccatcatccctagtgatccactagcaaaatttttgcttcctgttcctgcaacattacgttctgttgacctagaggtcttagttccagagacaggaatgctgccaccaggagacacaacaatgattccattaaactggaagttaaggttgctacctggacactttgggctccttctacctttaactcaacaggctaagaagggagttacagtgttggctggggtgattgacccagactaa

SEQ ID NO: 117792 - DNA, 1260 bp, Homo sapiens
atgcctgcagaattcttccagcgttgttcagtgattatggttcagctgccatggaaagaagcccatgtggagagaccacatggggagagagactacactccagacttgcagccagacatgtgggagaagtttcccgggctgagacgcgcgcttcgccccgtggtgaagacgctgctggtgcagctagaatataggcaggcagaaaagtgtgaaaagagagactggcctagcctcccagactacatctttctcctgtgctggatgcttcctgctcttgaatatcggactccaagttcttcagttttggaactcagactggctctccgtgctcctcagcctgccgacagcctattgtgggaccttgtgattgtacctataactagtctaaagtcctggcagacccctagaggtgaagttgagggtgtgacccatgaggagatttgtgcatctttgaagagccttgcagttgctcttctctctatgtcagatctaacagtgggaaccccagtcactcaaccacaaactttaaatacaatgggaataattggatcccgaggtggcaggggtcaagtggcagcactcaaccgtcaaaggcaagtgccagaattaataattggcatagacatacttagcagctggcagaacccccacattggctccctgaatggtaggggatatatcaactctctggctttgtgtcataatcttattcggcgagatcttgatcgctttttgcttccacaagatatcacactagtccattacattgatcacattatgcgattggattcagtgaaggataagtggctgcatttggcccctcctacaaccaagaaagaggcacaatgcctagtgggcctattggattttggaggcaacacatttctcatttggagacagcccttggcctgttactgggctttggtggaaactgaacatttgactatgggccatcaagtcaccatgcaacctgaattgcctatcatgaactggctgctttctgacccatctacgccgttaaggtttgtgactgggggcctgcaaactaaacagacaaaagacagattggcaaagaaaggacagatttttattgatgtagtacacaggagttcacagaaaaatatgcttcaaggaggaagttttgactctatagagccaatggatgtggaccctggacttagaaagagatttgtaaacaaaccagagaacaccgaagagctgctccttcgcactgaaatggtttgctggctttctgcctag

SEQ ID NO: 117793 - DNA, 318 bp, Homo sapiens
atgtatggtcctctgcaaaagctagaggactgcctggatgcagtattcccctctgcattcagcttatggaagggtccccacagttacttccagtcactagttacttccgctccgctcccacccgcgggactcgcgacctgccccctgcccccggctggcccagctcggaataggcagagcagcgcctcagaaatcgcagcccaaggcgaagaaatccagaagcctcccgcggacgtcccccgggacggggtgtggcgagccccgctccgagcccgccgactcctcgtgagacgagaaccgcagcgacgcggagaccct

SEQ ID NO: 117794 - DNA, 852 bp, Homo sapiens
tcaagtggtgggcgactttgcacgcatcaacctttccgagcttgtctcctcatttgcaaaatggggacaaacatggcatttatcttctaaggccactgtgagggttctgagagagaattcatggaagatgcttagcccagggctggggacccagtaagcactccgggaatattcgtcattactattattactattattgctgctgctgttgctgctactactactactgctgctgctgctgccccccttgtcataacctgatgagggctttgctcggtgccacacttcaggctttccaaagaggattctcaaacttttctctccacagaaatggctcatgggcaatgacaccaggagcagaggaggcccctttttctgtgctggggtctcagcaccaaccagaccagtgttgtggccaccctgaatatggagtgtcccattcgccccctggcggcgccggggacacgccgggagccgttgtagccgccgcagccgcagccgccgccgcggcggaatgagctgtccacagcagcactgggtgccgcccgaggtcacgcaagaatctggcgggaggctgggaactggccttaaagcacattcagccctttgggagaacttcaaccctgtgttgggctcctgtttcctactttctggcttctgcgacacctggtctgacagccacacaactttagttctgacccttttggctttcacactggcaataacacaacggatactgctgtcccagcattgccgtgtagttccgacctggctgtctgggatgctcctcctgtagcccttcagtaggacctcacctcggggcctcttgctgtccaactgaccattgggcat

SEQ ID NO: 117795 - DNA, 1623 bp, Homo sapiens
atgactccccaatcggaagagtcataccatacttgtgaatgtacagtgagcagagccttcattcatcatgtatggtcctctgcaaaagctagaggactgcctggatgcagtattcccctctgcattcagcttatggaagggtccccacagtatcatagaaccacacaagttttaggaaaagataggattgaaggggccctctctgaaggcctgcctactccaaaccatcctaccacccatctactgctgcctgaaaaactcactattagtgagtcatatctttgggtaaaggctgtattgccccagccactagctctacccctacctagggacagcctttatgtagagtcactgtgggtccagcagcaccattcaggccatggatgtctttctctggctgagaatgggaaggttctctgtctctgcagtggggaagtcacccaaacctattgcctccgtattagactctgcctgaaggaagccgctttctggatcctaccccagacgctggaggctgggctgctgcggcatcgtctattaggtccaccagtaatcccagctaacaaaagcgaccatggctactctgacgtgtgggacgacgatgctagccaggccgtgccaggggctgctggtgctgttactgatgcaaattctgagccgtggccacgcacactttggctggcctccaggggacggtcagctaggtccgctggggaaccttcctccctgcctggtcccactaatgatgacaccaggtccttgggcctgatgcaagaagatcagatgtcctgcaagggagagtcaccatctcctacctcatccccggcaccccacccccaccttaccagaatgcaaggtgtcctggctagcctgcaaggtggggccacccctctgccccaccaagttgccccagaagctggagaggaaaaaactctgggtctccagacaacggtctggagaatccttgaggatctggaagtccccgctgctgcctggcctggtttatcaccaactctggcagttttgagaaagactcacttgggttctaaggaacagaatttttctgtgaaaactgcatctcatcaagctgaaagatctccagcagtgccaaggccagggagcaggtctctgtcctcagctgccagcttgttggctgcagccccaaaagacctactgatatttggtcctcatcaagagctgacccagagagtccatcctcacccagagcccgaggacgcagagaacggcctgcgcaccgcccgcggctgcttcggaggggtgagggggtacagcgagaaacagagctgcgtctccctcgtcccctccttaaattccggcgtcctccagtcacagtgtcccagcacctacggccccccacccctaggcctgggcgcacagagccaccgagagggcttgagggtggggctggaagtctctgcccggctggtctgcggcggcggagggaagttgcttcttccctggccgggcctctccggagcgcagtgccggcgcgcccggagtccgaggagccggcgggcaccccattcgccccctggcggcgccggggacacgccgggagccgttgtagccgccgcagccgcagccgccgccgcggcggaatga

SEQ ID NO: 117796 - DNA, 1221 bp, Homo sapiens; identical to SEQ ID NO: 117724

SEQ ID NO: 117797 - DNA, 2021 bp, Homo sapiens
atgactgtgctgactcagacctcaagccagcacagcactgggtgtcacgcaaagcctgctataaccactccctggctactggctgtgttctttcaaggccctggggttctacagtcagtgggtggcaaagccagccaggcagacataattctgggtttgagtccagtctctgccatcttccagctttatgatgtttcctttcctccagggaagcagggtcgcccaggccttggctcagcaggcagaattgaagtagcccgtgattgtggaatgctgtggaagcaacgtggatatctgatctcatcaagtcaacccatcaaaaatggtcaacaagtctccgacctctttgaagcaatccctgaacccaaatcattggccatcatcaaaatctctggttattcgacattagaaactccagagagtaagcacaaccatttcactaacactttagcagccattgacttggtgaatgcctttttctccattgctgtgcataaggtgctaccagaagcaatttgccttcatctggcaaggccagcaatatacctttactgtattagctcaggggtatatcaactctctccggctttgtgtcataatcttactcagagagaccttgattgcttttggcttctgcaagataacacactagtccattacattgatgacattatgctgattcgatccagtgaacaagaagcagcaaacacactggacttattggtgagacatttttgtgccacaggatgggaaataaatccaactaaaactcagggaccttctacctcagtaaaatttctagggttccagtggtgtggggcctgtcaagatattccttcaaaggtgaaggataagttactgcatttggcgcctcttgcatctaagaaagagacacaacgcctagtgggcctatttgaattttggagacaacacagtcctcatttgcgtatgttactccagctcatttatcaagtgacccgaaaggctgccagatttgagtgggcctgcactgatggcctcatgcgaagtccctatgatcagttgacaaaggaagagaagactagggcccggttcacagatggatctacacaatgtgaaggcaccacccaaaagtggatagctgcagcattacagcccctttctaggacctgcctgaaggacagtgttcaccaacgggtgagctcagcagaggaggattttaataatcaagtggataggatgagccgttctgtggatatcattcaccctctttccccagccacccctgtcatcacccaatgggtccatgaacaaagtggccatggtggcagggatagaggtcatgcatgggctcagcaacatggacttccactcaccaaggctgacctggctatgttcactgctgagtgcccaattttccagcagcagagaccaacaccgagccctcaatatggcaccattcctcaaggtgatcagccagctacatggtggcaggttgattatattggacctcttccatcatggaaaaggcagaggtttgtcatcactggaatagacacttactccagatataggtttgcctatccttcattcaatgcttctgccaagagtaccatccatggactcatggaatgccttatccacagtcatggtattccacacagcattgcctttaaccaaggcactcactttatggctaaagaagtgtggcagtggtctcatgcttatggaattcactggtcttaccatgttccccattatcctgaagcagctggattgatagaactgtggaatggctttttgaagtcacaattacaataccaactaagtgacaatactttgcagggctggggcaaagttctccagaaggttgtgtatgctctgaatcagtgttcaatatatggtactgtttctcccatagccaggattcatgggtccaggaatcaaggggtagaagtggaagtggcactacttaccgtaacgcccaatgatccactagcaaatattagcttcctgttcctgtgacattacattctgatagg

SEQ ID NO: 117798 - DNA, 1197 bp, Homo sapiens
tcacactgggccctgggacaggccccagggcaggcacaggctccagctccagccccagctccagtcctggcacaggttcagtcccaggtgcaggcccaggtgcaaattcagttgtgcacccaggtgcagactcaggcgtgagggccggagctgcgctggctcctgggctctgctgagtgaaactgcttgggcagatgagccctccgggaggagctctgggacctcataatgccagacagtctgcagtagctgggggttttggacgggctcggagacctggacggcacgagtagcttcaaggtacttggtggtctgggccagggcagcctctgggagctgctctacagactgccacaggtccagtggtgatgaaccaatttctgaggtgaacatggcatcatgaaggccactccagagcaccatgtcctcggttttggggatggttttaaacttattctggagagaagccacttcccgctgcagtgcaaccatcttccagttctgtattttgaagtcttcagcaaagatgtccattctttctgggtgtaccttgtcaagcatgttcttcagcatgtccacttcttttctgagggctgtgatggtgacctggagtgcatgaagatcagtgagcaagtcctgcagggtctgcattgacttggccatgacttcatcatgaccctccaccatcttccggagcttgatcagatgccacaggtcctggacgggccgggcagtgccctggctggcttccagcagctgggcagtggagggcaggtcctgcagcagggccagctgggttcccaaacttgtcgaggcggctcaccacgtggtcgaagacattgctgagcctcttcatggggttgaggataggctgggcgtctccttccctgggcatgatgaccacctgcgaggtctgcaggaagtcctcatcgcctgagaggactttcttgagctcggccatgtggatgtgctccaagatgccgtgcagcaggaggtgcagggccttgaagttccgcaccccgcactgtgggatggcgatgttggccagctcggtgaacgtgagtgagaagctcatcctgccagggtgggtcagtggggctggggttccaggtgtcctcaaggacaaggggtagctttcagtggttccgagagctacatggactggtcctcgcggaatcgtcgattccggaatacaga

SEQ ID NO: 117799 - DNA, 380 bp, Homo sapiens
  misc_feature (1)...(380): n = a,t,c or g
cgcggccgcgtcgacctagacactgccttaggcaaggatttcatgaccaagaacccaaaagcaaatgcaataaaagcaaagataaattgctgggactnnnnnnnnnnnnnnnnnnnnnnnnnnnnnnnnnnnnnnnnnnnnnnnnnnnnnnnnnnnnnnnnnnnnnnnnnnnnnnnnnnnnnnnnnnnnnnnnnnnnnnnnnnnnnnnnnnnnnnnnnnnnnnnnnnnnnnnnnnnnnnnnnnnnnnnnnnnnnnnnnnnnnnnnnnnnnnnnnnnnnnnnnnnnnnnnnnnnnnnnnnnnnnnnnnnnnnnnnnnnnnnnnnnnnnnnnnnnnnnnnnnnnnnnnnnnnnnnnnnnnnnnnnnnnnnnnnnnnnnnnan

SEQ ID NO: 117800 - DNA, 1380 bp, Homo sapiens
aaacaaacaaacaaaaaaaaaaacttaggaatatacctaaccagggagtcaaaaacctccacaaggaaaactacaaaacactgctgaaagaaatcatagacgacatgaacaaatggaaacacatcccatactcatggatgggtagaatcaatattgtgaaaatgaccatactgccaaaagcaatctagaaatttaatgcaatccccatcaaaataccaccatcattattcacagagttagaaaaaacaatgcctaaaattcatatggaaccaaaaaggagcccacatagccaaagcaagactaagcaaaaagaacaaatctggaggcatcacattacctgacttcaaactatactgtaaggccatagtcaccaaaacagcatggtactggtacaaatataggcacatagaccaatggaatagaatagagaacccagaaatgaacccaaatacttacagccaactgatcttcaacaaagcaaacaaaaatataaagtggggaaatgacacccttttcagcaaatggtgctgggataattggctagccacatgtaggagaatgaaactggatcctcatctctcacctcatacaaaaatcaactcaagatggatcaaggacttaatcctaagacctgaaactataaaaattctagaagacaacattggaaaaacccttctagacattggcttaggcaaggatttcatgaacaagaacccaaaagcaaatgcaataaaaacagtgataaacagctgggacttaattaaactaaagagcttttgcacggcaaaaggaacagtcggcacagtaaacagacaacccacagagtgggagaaaatcttcacagtctatacatctgacaaaggattaatatctagaatctacaacaaactcaaacaaatcagcaagaaaaaaacaaacaatcccatcataaagtgggctaaggatatgaatagacagttctcaaaagaagatatacaaatggccaacaaacatatgaaaaaaggctcaacatcgctaataatcagggaaatgcaaatcaaaaccacaatgtgataccaccttactcctgcaagaatggccataatcaaaaaatcaaaaaacagtagatgctggtgtggatacggtcgacagggaacacttctacactgctggtgggaatgtaaactagtacagctgctatggaaaacaatgtggagattccttaaagaactaaaagcagaactaccacttaatccagcaattccactactgggcatctacccggaggaaaagaagtcattattcgaaaaagatacttgcacatgcatgcttctagcagcacaattcacaattgcaaaatcgtggaaccaacccaaatgcccatcaatcaacagtggataa

SEQ ID NO: 117801 - DNA, 751 bp, Homo sapiens
tttagcgtttaactatttttttttaacttttggaaagcaaggtgtaggaaggggatttagtttttccattaggtcgtggcatgttaagacttgtttctttttccaaaatgttcaagttgctgaagagaactatggactatgggtcaggaagtccgtcggtttcgggtcacattccgctcccgcaggcctgcgggccgccccagctggtttgttcccggcgtgttagaggtcagaggccgaggccgcactcagtgcctgggtctcgcgcagctccagggctctcaggcgacactgggcgtttcctttccggcttcggaaagttttgttttggttcaaggaaaggcgccctgttgaccaaaggcttctcagtctcctccgggtggccagcggccaagtttcctccagcccagcgagtccagactatagtccgttcgagatcctcgaaggccggggaagcgagtcttgtgaggagagaaagcgagtgggcagccagcctgccgactccactgccgctggctggcccttctcttccctctgtccctgggccagtgcccgtcgcaccacaaacagtgcgagcagtctccccggtgactcctcaaggacccagttctccaccattcctaagagaacactcaacccagccgcgcccgggatgcagagagatctaccaacacccgagaatggggacagggcgcatgcgcacaccgtggccgtggcgtctaagtgctcgcccagctgcggcagccgctag

SEQ ID NO: 117802 - DNA, 2949 bp, Homo sapiens
ttattcggaattcttgccaacaatagcactttcgctcctccgagacagggatgcagcgctgtccagcaggaaccatctgaagtagccatcacaaggccctgaggtcacgggtgtgggcttgccaacccgtgtcagctcagaatctggagcctggccacagagatctgatatagcttggacattgctgaagacagcatttggagagagtacttggttttctgctcctgcgttggttggcttgggatcttggcctccagctgcttccatgttgttccataggacatgattttgttcttttttatggctggctggcctttcgctgtgtgtgtgtcccacatttcccttgtcccgtccactgctggtgggcacctgggttggttgcttgtttttgctgttgtggttggtgcttatttcttttgctgacctcaagtccaagcattgtctctttttctcagtgttgtcccccccaaaatgctcaacatttgttccctggggccacacacctcgcatggtgtttcttgcgtgcccgggacagctgctgcccagttttgttgggcgttttccagctgcagatgcagtgggtccttttgcaaagcctggctttccaaagcaacaggcaatttcatgtgcacgaccagacagagaatttgcctgctggaacatctgctgcaggggaccttctgctctggtgtccacactgcaccctgtgcttaggcgtgctccagaattggggagcagaaagggacctttcttctctgttagaaccttgcagagctgctcaggtctctgggcctcagcagaagggctgggggtcaaggaccatttgcgcctgatcagatgttctcgtccactgaatgggccctgggagttgttgaggggctggattagcacctgctcctgcccaagctgaatgaggccaaccctgggaacctgcgtgaggaagggccctgcctcctcctccctcactgtctcactgtccccaggttccttcaagcctaacactgccattgtcagcatgccaccagtggtcaaacgtctgccttgattccatgtggagaggtccttggatttggaacctgggacttcctctgtggagctctgcccactgcccttgcttctggcccacgactgcgcgtggccccaaaagctgagcagggcttcttggatctgtgtgactcccgtgtcaccatcagcaattaacatgatactcaacatccggaacgaagttttgttgaacgtggccacatccattcgctcgtatgccatccgtagctgtagcaggccgccggcggcgccgcaggcgctgagcgagacgagggagccggggtggccgagcacacggcccgagtagaagcacagctcggcggggcggccgcggcgccgggccgcgcccgcctcctccacctcgaagcctcgggacaggaagcgcaggtcgcggcgcagctgaaggtacaggtcgcgcccgaaggccggcaggtgcagcagcagggcgcgctctccgggccgggcgcgcggggcggctgggggcgtgcgggggcgtcgccgccgtcggggcccgggggctgcgggcagcggcggcaggtgcacgtcgtcggggcgcacccgccacgggagcaccacctccacgtcggccgccgcgtcgccgacagctccacgctggcccgcgccacccggggagggtctccggcgcagccgcgcgagcacctcccggaacggcgccgcgcatcggcgagcggagacccggcggcggcgcgcctgccacggagccacccgattcccgtactccggccgcggcccgcgcctcctccgctcgggcgccgtcagcggtcccgccgccgcccccgggccgccaggacgccgcgagaacgcagagggaaggtagccgcaggacgcggggtgaagagggctgtgggagggggcgctacctgtgcccgggtccagtccccaaaccagcagcagcagcacgggcaggacgagcggaggcagcagggcgccgtcacacatggtacccgggaccggcagcccccccggaccgtggcggcgaagcaggagcgcgctaggcggcggcgccagccggagtgaagccctccagcctttggaaaaagtaattagcgcttttccgaccctgttttcaggagccgactcctggcaggttggttgtaggggccctcttgagtgcttcacacacagcagtcctgttggggtgaaggtcaccgtcactgtgataattgttgtcgtcgttgaaaccacccagcccgaaagcagcatgggctgtgcccagagccgccgtgccagaagcccacgcttagaaatagagggccgaagaccaaagaggactgcgggttcttgggccaaacgtgaccctctcaaatcccccaactcggggatttcgttagctggggactggtgtgcccgggttccaagacccctgcgtagactctgtctataggtggaagaaggcctttgccccgaggcatccagaggtaacggtgagaggaacaagggcacgtgggggatcccaccacagcctcccctgagaccctcttcacgctggttgcaggagtagccaaccccgctccctggcagcccgtgagatgccacatcccctccagcagggggcggccggcatcggtcccgtcttcctaaaccggcgttggtgggaaatgccggcaccagctccctccccgctccagagccctgttttccccatttgtatttcactactttcctgttgagcttggattccagcctcaaattccgcgatttggccggcatcctaatccccgagtgactcttgccaaccactctctgtggggcctgtgtgcttcctcctgggttctggggcgctggcggcgtccgcttcaccgggaacgggagccccagcctcccgaggccttcctgcctggctctgggaatggccactgtccagaaagccccgcggccgtccat

SEQ ID NO: 117803 - DNA, 355 bp, Homo sapiens
gcatctgctccacaccagcactttggccctggtgacagctttgagaatccggggagctgaggcctgaaagatggcggaggggttaggagtgaacttcttcctcacctctgggacctggaagccggccccagggctgctgtcccatcccgaagtgtgggttgtgatgactcgggctggttttgtctttgtggatcttgagggcttcactccagtccaagcctggaattcctgtctgtacgacgtggtcactgctgcagccgcgtccgcgtcgccgatgggcagcacgtagaccccgccgtgcgccgggcgccaggtggcgcggaggactgcgcggaggatttgcccctgcggccgc

SEQ ID NO: 117804 - DNA, 1208 bp, Homo sapiens
atggcgtggccctgtatcagccgcctgtgctgcctggcgcggcgttggaaccagctggaccgctccgacgtggcggtgccgctcactctgcacggctactcggacctcgacagcgaggagccgggcacgggcggcgccgcctcgcgcaggggccagcctcccgcgggcgcccgggattccggccgggacgtgccgctcactcagtaccagcgggacttcggcttgtggaccacgcccgccgggcccaaggatccgccgccggggcgcggaccgggggcgggcggccgcaggggcaaatcctccgcgcagtcctccgcgccacctgcgcccggcgcccgcggggtctacgtgctgcccatcggcgacgcggacgcggctgcagcagtgaccacgtcgtacaggtatgggctgggtagggaccgcaacgagtccccaccctgtggtgggaggacgcggaggcccggagccagagggatggggtgggcggcagagcggaggcgcctggagcccggatcccacgcgacctcggagctgccggcggcctcagaggtcacccccgtttggtccgtgggcactgcaggcggcgccttcgctgctccatggcccggactctagtgcttcgagtcacccccgtgccgggaggcgcaccgctggcccttcgccagccgcccgtccctgggggcagccgtcaggaatggcctgccttcagccgagttggaaccggcctccctttaactcccaccgccgggcctagccgtgcgaggggtgcgcgcaggccatgtcccccagctctccccggtcactgcctactggatagaacttatactggcttgcagactcttggagcagagacgcttttggctgttgttaatagtgctgctatgaacgtaggtgtacaggtagtggatgttgaactccatcgccattctctcggagaagactgtatctatcctcagtcctcggagtctgacatctctgatgcccctccatctttgcctttgaccattccagccccagtgaaagcttcttcaccaataaagcagtcacatgagccagtacccgatacctctgtggagaaaggcagtcaccgggtcctgcccattccatctttaaggtcccctctcccatctgggctccagccccgggttcctcctctggcggccgccaggattgctgtcgtctgtggctctggtggcttcctgctctga

SEQ ID NO: 117805 - DNA, 954 bp, Homo sapiens
tcaggttagctgcagctctgttccatgtggcttcttcgcagttgggtccaggctgaaggagcagtctctatttcggacagccccttctccctgcatcagtgctgggccgtgctgcacaaagcctggtgtgttttcctccagcttccaggtggcttcacttttactctcaatcctctttctgacaatctgcttggtaaacgtgtggactcggccccttcctggggccctcttggctctgccttcagaggtgtccacatgccctgtgttggtgctgcttgggaaggcaaaggccccaatctgctcagaccaagtggtaagcttggaccaagcggatccagaccaactcccataggtcagcagcaacttcctgaagtcccgcgtgcaaagggacctttgggcccagcagctgtgatctgtcagcaatgcctgctccaagcacgggagggaaaagaggcagtttttccggcaggtacttgtcagcttctctggagctaggcggactccccatggctcccaccggcccctctgctctttctgctccaccctccgtgtccaggggagcccgatagagcacgcgggaaaagccgggtgtctacgcttccgcgacttaggctgcagagataagagaaggtcaggctctgggaggacgcgaggccgtccaggaatggcagggaggcccgctggggcctgactttggtcctaatggaccaaagcttcgacggagcaaggccgggtgtccgtggtggcacctctcatcagtggacgctggcgaatgactatggaaacaacattcaacagcagtgttttctatgccaggtacacaaccgccttggcgtgggttgataaccatgcctatctcaccgcgtggcactgagccgaccgcacacccagggccccggtctccagggctcgcttactcgcttactgcgtgaagcatcacgaaatcgtcgaccg

SEQ ID NO: 117806 - DNA, 857 bp, Homo sapiens
atggcactgtgctggacgacccccatctcacggggtactgttggcatcccccttgtccccctaattctgtctgtaatggaagcctatcacctgtccttcgagaggaggcagagtcgtccgaggcccctgtgcagtccccgcagcgctcgtggactccatcagccaagagtcctccacttccagcttctcctccatgcagccagctcaaggcaggaggagaccaagaaggactacagagaggtgcgttacctgttggaatggacagaggaggacctggaggatgcggaggacactgtcagtgcagcagaccccgaattctgtcacccgttgtgccagtgccccaagtgtgccccagctcagaagcgcctgggcccccgcggcaggtgccccacactcctcgtccccaggagccctcgcggacccggggtcggctcgaggcaatgcgctccgtcctggcagtaaccagcccctcctgcgggatccctgcctgcctggcctcgggcctcccgcacccaccggatcccgcgcacgctgagcaggccttgaggcgtcggagaccacgtggtccaccaacggcccaacaaccgtacacccttaaacgctgtgagctggaagccttggtgcgccacaaacctcagctgccgcatctgaacacagcccctgccccaacctaccgcttccgctttaaaagccaaacaaaacaaaacgacacattccccatggtaacatcaacagtgaaaaaagctgacatcatgtgccttccaacaggataccagagggagataaaacatccctttcagggcattcctatcagaaacgtgtaccgtgatgaaggcgtccttcagcaccccttgtaa

SEQ ID NO: 117807 - DNA, 1812 bp, Homo sapiens
atgaagcgcctctccaccttgctcaccctccacttgtacgcataccccattcctcctggacgtgggacaggaactcaggacctgccaaatggcgagactgcaagagctgtaagggctgaaacaccccccaactcaccacactgtggtgatgaggagagaaaagctgtggccattctgggagccagggctgtgatatgctttaacaccctgtttggggctctgtggttcctggcatctccaagctttcaggtgccaccacattccccttgtccagatgctggtgcctgcagtggaagccacttgcagccagctctggggtctcggcaggtggtccgcgacatgacctccgagttcttctctgcccagctccgggcccagatctctgacgacaccactcacccgatctcctactacaagcccgagttctacatgccggatgacgggggcactgctcacctgtctgtggtcgcagaggacggcagtgctgtgtccgccaccagcaccatcaacctctactttggctccaaggtgcgctccccagtcagcgggatcctgctcaataatgaaatggatgacttcagctctaccagcatcaccaacgagtttggggtacccccctcacctgccaatttcatccagccagggaagcagccgctctcgtccatgtgcccgacgatcatggtgggccaggacggccaggtccggatggtggtgggagctgccgggggcacgcagatcaccatggccactgcactgcccccaagccatgctgatcacactcccatgccccaggccatcatctacaacctctggttcggctatgacgtgaagtgggccgtggaggagccccggctgcacaaccagcttctgcccaacgtcacgacagtggagagaaacattgaccaggaagtgactgcagccctggagacccggcaccatcacacccagatcacgtccaccttcattgctgtggtgcaagccatcgtccgcatggctggtggctgggcagctgcctcggactccaggaaagttccaacacctggggcagggttctgggaagggctggtggaggtgggctggtgggaggcggtgatcacagcccagcacctggatatcaccaggggcactggggccaggggccagggaccttcctggctgtgcctcaggatggtggagagaggaggggggacgtcccccacgctgctgtctccactgttcctgctgcccccactgttcctgctgcccaggcctctgagcttccaggactgcagcggagccacggtccaggactgcagagccatggttggcctggtccttctggggctggggctggcgctggctgtcattgtgctggctgtggtcctctctcgacaccaggccccatttgacccccaggcctttgcccacgccgctgttgctgctgactccaaggtctgctcaaatattgtagggcatgccaacttttgcacagaactgggaaaccctctgagcaggaaccacatcctgacttctcacgggagtcgggatccgagcaagcagcgctcagtgaaactgagcaggattgccctggccctggactgccttttgctcctagcccttacccttggacactgtactgcgggacaggatgccttgggctatggtgttcacctttcactcatgagcaatgtgcccaagaacaagagcccaaggaatggtgtagaagatggaaggaaaccacctgggcccctgctgaggacactgcaccaactctatgaattgaccacccctacagctgttggtaaatggatgtcgtcttcatgggaggtgtag

SEQ ID NO: 117808 - DNA, 366 bp, Homo sapiens
atggcccaggactacggagccatgggtgacctggtcctgctggggctggggctggggctggcgctggctgtcattgtgctggctgtggtcctctctcgacaccaggccccatttgacccccggcctttgcccacgccgctgttgctgctgactccaaggtctgctcggatattggacagaggacatgcagagatgcgacacccacttaaactcgaagttgcaaagatgcaaatgagactggggtctcaggcaccagagaccacccatgggcacgtggcttttgggagtggggacctgctgccacagatctctgaagagtctggacctgctgggtctccccgagtgactgtctgggggtctccatag

SEQ ID NO: 117809 - DNA, 462 bp, Homo sapiens
tccgcccctcccagggtgtctgggggacacgggggctccctggcctgggcctggatgtactgggcctccaccgaggacaagaagtccacctcgccttcctggctgagcacccgccagtaggcttcagaacccccatccaagagggcgtccgtggccagccgggcactctcgttgtcactaaagtcagccctggctggccggacccactggctcttgacatcttccagacgcttccggattttgcccaggtgccttgaccggctcatgcctcccgtccctgggtggtgctgggggaggctggcacgtcagctcctccagatgtgggaagcaaatggaacacaccacggaggagtggggctcccgcacccccgggaggccgcctgctcccaggaccggcgtgcagggcacctccaagaagtgatttaccgctgtcctgagccggacgcgtgggtcgaccaggaa

SEQ ID NO: 117810 - DNA, 616 bp, Homo sapiens
caagagccaagattttagtctttcttggttggcttttttaaatgctttgggctttcctttaatgtatcttcaaaatcattctggggccaagttacatcataaaacattttattacatataaggactgaaacaggatttttcttaactgtaacatggtccacaaatgtaaatgcaaaacccccatggtggttgcaggagcaagtctagttgagacaggtcaggacgaaagcataaaagatgagtaactgaatggcatcccgggtcctgtagccacgccctccagattgccgccgcaaaggacctggaacctcagggccccaccctatgccatgaagaaggccgcagtcgctgcctcaaccaagccaggctccgccggggccgttcctatcctgagggtcggagggggaagggactcagccaaagccgcggcctcccagggcttgggcctccgcggcagccgggacgctgtgggttcgccgtggatcgccgcgatgtggcgtttctccaggcccgggagttcctggccctgctggaccagctgcaggagctgcgccagggtaaccgaagctgaggcagaggccggggccgagcattggggactgcggggacgctccat

SEQ ID NO: 117811 - DNA, 354 bp, Homo sapiens
tcaatgcgtcggtcttttgacagctccaatctgatgccgctttttctggatcaactgatattgcaatgtttcttttggtccaatcttgagcgcgcgtaaaccagcttctccgcgctcttcatagacctcagccacctggctacagaaccacccccttatgtacttgacaccgggcacgggcactctttggcggtttttgaccacacgcgagaacgtcccatatggccccgttccgtagtggaaccgcactatctgtggtgtcgccaactggccatattggccctccgtatgactaacaccgccgctcattgctatcagtaagagtcggtatctgcattcgcaggtacaggccat

SEQ ID NO: 117812 - DNA, 568 bp, Homo sapiens
ttaaacaaaagacatttattttctcacagtcctggaggctggaagtccaagaccaaggtgttcgcagggttggtttcttctaaggcctctctccttggcttggagatggccctggttggtcttctgagtgcaggtgtccctggtgtctctttgtgtgtccagattttctcttataaggaactggtggttgggtggcgatgctgcaacagtatttcgcgacgcgtgtatcccgcataacgacggtaccaacaacttctataccgctaatctggctaacgggatcgccgctatcggctataaatctcagccagctttgtgggtaactggagggcttctcgttatcatcatcacctttatcgttcgtggcatcgtgtacccgctgaccaagtcgcagtactacctccatggtcgaagatgctggttctgtagccaggtgctgaaggtctatgaagagcgcggagaagctggtttacgcgcgctcaagatggcaccaaaagaaacattgcaatatcagttgatccagaaaaagcggcacagcattggagctgtcaaaagaccgacgcattga

SEQ ID NO: 117813 - DNA, 2006 bp, Homo sapiens
agctcggtacccggggatctattactggagacaaatacagcttgcgcccattgactgcaaattcagtaacatcggtaacccacttctcgtttggccgcgtacccttgaaatctctttggagaacattaggggcggtttgccctacctctcctctgtaagagcggtatcgcttgaccttaatcgctgctttaagtgagagggttcccatcaggcgctgaacagctttatggttaatctgtttcccttctcgatgaagagacagcgttaccctacggtatccgtatcggcctctattctcgtgataaatctcactaatacgctttttaacgtccgcatacttgtcaggcttgctgagagcctttagatgataataaaacgtactgcgcggtatctccgcagccctgagaagctcatcaagaggataaaactgccttagcttcgtgagaactttcacttttttcggggaaggagctaaggctttcagcttttttagatacataagccgcgtttcaagaaatcgaacttgcctttcaagatcctcaatgcgtcggtcttttgacagctccaatgctgatgccgctttttctggatcaactgatattgcaatgtttcttttggtgccaatcttgagcgcgcgtaaaccagcttctccgcgctcttcatagaccttcagccacctggctacagaaccacccaaaccgacacaggtggtcaggtagagaataccaaggcgttgagagaactcgggtgaaggaactaggcaaaatggtgccgtaacttcggagaaggcacgctgatatgtaggtgaagcgacttgctcgtggagctgaatcagtcgaagataccagctggctgcaacttgaaataccaccctttaatgtttgatgtttaacgttgacccgtaatccgggttgcggacagtgtctggtgggtagtttactggggcggtctcctcctaaagagtaacggaggagcacgaaggttggcaatcctgaccccatgccgaactcgaagtgaaacgccgtagcgccgatggtagtgtggggtctccccatgcgaagtagggaactgccaggcatcaaatttagcgtgctgatatggctcagttgtagagcgcacccttggtaagggtgaggtccccagttcgactctgggtacagcaccaccggaccatccccggaaccctcctgcgtccttaggttgttgagtgcatccggagtgcgtggactgacggctccggggtcccagccagcaagcgagacccgcatcctgggagtggccacggcggcgcacgtggaccagcaagagcgcaggccggccacgcccgcggccacgagcagtcccagagccggaggcaaaaggagcgctgagggtccccgggcctgaggcccggcggggccgcgggcaaggccttgcgccgtcggggtgcactgggaactcacaccgcgctcccatgtagcgggagcgcaagcgcagacgaggccggagaagtgggcgtagcagcggccgcgtgagcacaggggcgcgcggcgcacgggtccgcgcgctcgcggcagtccggccgccgaagcccagcgcgcaggagcagcggtgcgcgccgccgccctcacacacgtgccgccgttagcgcaggcgcggcccgcgcagtcgtccaggcgtgctcgcagcgaggacccgcgaagccggcgcggcagcggcagcgcaggcgtggcccaggtccaggcagagtccgcgcggcgcctcacattcgtcctcgagcggtgcgcaggggcgcgtcccggaccgcaccgcgagggggcgctgcgcggacggcagaggcgcgtcacgcggtcccgacggcaggcggctcgcagcgcgcgcggtacgagaagccagctcccaggcgcctgcgcgctgaatgtcccgggcccacgggcctccgctgccaagcgccgcctgccagccacgcgcgccagcaggctccaggcgggcctggacttcaccttcagggcagacccgtcggccat

SEQ ID NO: 117814 - DNA, 505 bp, Homo sapiens
tcagggttccagggccaagttatccactcccttgggtctttcctgcacgagaagcacagcgggaccaagcaggttcgctcgttgttccctagggggatgtagtcacccttcccgccactcccctcaccttccgcctccacccccagtacagttccgtgcaggtcccagaggccggcagggctcaccttccaggggctcaccttcctggggctttccctgcggggcccgggggagctgcagcagcagcagtgggcgacgaccagcagcagcaggagcagcacggtgcccatgaaggtgaggaaaacaatgaaggcaacagtgtcccatgtggactggaaaaactggtggctcttcagtctccccaggacttcctgaaccgtggcctccagctcctctgtggacacagccatcttggagtgcaccgtgccacctcctagaagcctccaattcccccaaccaggcaggtcctggggagaacaggctgcttcctgcttccggctccgtc

SEQ ID NO: 117815 - DNA, 821 bp, Homo sapiens
tttttttaatacctaagatgtttaataagatgtttaacatcactagtcatgagggaaattaacatttaaagcattatgaatcaccactgccaggtgctgatgaaaatgcagcgcgcctggagtcgcgggcgttcctggcgggggtggaaatcgggggctgcccatttggaagacagttgagctgatgagttgaacgtacccttaacataggctccagcaatcccactctcaaaagaaatgaaactgcacgtccccaccaaacctgcacgcaaacgtctgaagtggcttcactcacaacagcccacatgcccatccacaggtgaacccgtgagcaactgtggtacctccacctgtcccacaacctacaactcagcagtaccaagggctggacgctggtgccaccacacgggtcccgcgaagcctgctgcgaagtgaaggaagccagacacaaaagtctccatcctgcgggagtcactcacaggacaattctggaggacgcaaagctctcctgtgacaccccaacacctcctctcccccagagcaccacaggctgctccctccccggaccgagcacccgtgtaactgtgcatctcacttgggtagcatctagcacatcttgggggaccatctgctgtctccttagtgtctgtgtagacctggggtgtcgtactatcatcctgggggcctggactgctgcctggagggttctgaggctgtgcctggcctagtggacggcatgggctgcttaatgacatcttacagcatgcaggaagggcgaagtgcagctcctggatgggctgttgccatggtctggcccccat

SEQ ID NO: 117816 - DNA, 2104 bp, Homo sapiens
atgggcagggctaatgacgatggcagggcgacaagagggacagtgcgtagcgtggcaatctgcgtgctagaaaaccgagcaagcggggaaaagccggtgaaggcgagtatcacccacgaggagcggcaaaagaagaggagccgaagaaaagaacagacaagagaagaagaagggcagagaaaaagaaagaagagagaagagaagcgaaagacaaagggacagaagaagaagaaaggagcaaaggaaggaagagcaaagaagaagagcaagaacaaacgagaggaaaccaaggcaaacacaggcaaatggggccacctcgagctaaaaagcttctgcacagcaggccggcatgtgggggggctctccctgaacggatgcgacagcaatcaggcgtggaggtgctccttgcagcagccgtcggacatgcctgaaccaaggcacaatcgcaaccccatcaggacggcagacgacacggtgatgcggggtaaccagggctggcctccgagcacgatgccagtggacacggctgcctcagaaccggagcggggtaaccgtctgactcgacggaatctgtgtgccggcgacctcttgcgatgcatgtgcctacccatgagtctcacggacccgtattcacccgactggtgtcacatacctttcactgcggttgctaagctgcctgcggtgggtcggcccgtggcctgccggcccacatacagccccagcctctgccacaacccccaacgcccagcgcagcttctggctcactcatctgctttgcaatgtgcacctctgtcctgggatccccagagatgtgcacctccatccccgcgtccccacagacgtggacccccgtccccacatccccacagacgtgcacccccatccccacatccccacagacgtgcaccaccacagcccgcacagacccaaccacgagcgccccgcccccccccaaacccagagacgcgcgacaagagagccagccacgaagcacacccgcaacgcacaccccagacgatccgcctgcaaccgaggaacacacacgcacccgcgccgccgtcggaccacagagaggacaacgcaccatgcacgaccacggaaccgaggacaggccacccccaacacgcggcagcccaccgcgggccgacacgaggagacggacggcgccacacggaggcgacagcacggccaaacgcgcggcgagggaggcccaggcgcggcagggcggccaaaacccggcagagagaaagacaagagcccccacacgacaacacgagacgcaccaggagacggccaaagcggcgagacaggacaggcgcaccagcaggaaccagaaaccgaacaagcggacacaaaaagaggcaaccagggacgcgagcaagcaccggaacagccccggcgagccaacaacagcagaccccgactgtcttgtcccgttgtatatcccgtttcggtgttttttacgggcctgatttctctgggggtatattccttctgttctttgcctcttatgtcggattcgacgttgtccacatacggaggacagagacgtggaagtcgcgtgcaaggaagacccaggatacgggagtgctctccccactccgtagagagcgttcctgtcctccagcccatggccgctttccaggactcttcctgtccacccaccggcaagttggcccagcagctttgcgtcctccagaattgtcctgtgagtgactcccgcaggatggagacttttgtgtctggcttccttcacttcgcagcaggcttcgcgggacccgtgtggtggcaccagcgtccagcccttgggagattggcaagtgacagccgtggctccttagccccagacccagtctccttccttgtcgcaatcacgggatgtggaaaaaaggcacaggggtcagcacccttccgtgggttctgtgtgactgatgaaagctgcgtagaggggaccctcaggggcgaagaggccgaagacagcaccgagacctcagtgtcgggcgcgggtgctcccaaagcgcagcgggcccacctcccccggcagaggatcgtgcggcagtcaaagtcgcacacggggcttctgagatgtgcggcccgggcctaa

SEQ ID NO: 117817 - DNA, 603 bp, Homo sapiens
atgtgggaaagtttggaactccctagagacttgttgaatggctttgaccaaaatgctgataatgatatggacaatgaaatccaggctgaggtggtctcagatggagatgaggaacttgttgggaactggagtaaagggaaacagcttaaaagttcagaaaatttgcagcttgatgatgcaacagaaaagaaaaacctattttctgaggagaaatttaagctggctgaagaaacttacctaagtaatgaggagccaaatattaatagccaagacaatgggaaaaatgtctccaaggcatgccagagaactttggagcaggccttcccatcacaggctcagaggcctagggggaaaaaatggttttgttggctaggcccaaagcccttctgctgtgtgcagcctagggacttggtaccctgtgtcccagctgctgtagccatgggtaaaggggccaaggtacagcttgtgccatggcttcagaggggagcaagccccaagccttcgcagcttccatatgatgttgagtctgtgggtgcacagaaatcaagaattgaggtttgggaacctctgcctagatttcagaggatgtacggaaatgcctag

SEQ ID NO: 117818 - DNA, 732 bp, Homo sapiens
atgtggaagcaactttggaactgggtaacatgcagaggtcagaatactttggagggctcagaagaagacaggaaaatgtgggaaagtttggaactccccagagacttgttgaatgactttgaccaaaatgctgataatgatatggacaatgaaatccaggctgaggtggtttcagatgaagatgaggaacttgttggaaactggagcaaagcacattaccgcttttgcattgggcagggctggcctgtcctctggcccctggcacgtgcacaagtgggccactcctcaggctccccaaaggtgaatgcagctatgcggcagccctggctggcactggaagaggtcggtggtagtggctccaggccggcagctcccaggctctggagagtgcatgtttcagctccctttgccctgcaggcagccttctttgtgtgctataccacctattctccaagcaaacttgccactcaatggacgccaaaactgttgtgcccagatcagctgcaaagaagatcagagctttcattagaaattttaaacaagtgggaccaagatcttgaagcatttattcaaagaactgtaacaggagatgaaacatggctttaccagtacaatcctgaagacaaagcacaatcaaagcactggcaccgaagaggtggaagtggtccagtcagagcaaaagcagactggtcaagagcagaggtcatggcaccagttttccaggatgcttaa

SEQ ID NO: 117819 - DNA, 1374 bp, Homo sapiens
atgtggaagcgactttggaactgggtaacaggcagaggttggaatagtttggagagctcagaagacaggaaaatgtgggaaagtttggaactccctaaagacttgttgaatggctttgaccaaaatgctgataatgatatggacaatgaaattcaggctgaggtggtctcagatggagatgaggaacttgttgggaactggagcaaaggtgactcttgttatgttttagcaaagagactggcagcattttgccccggtcctagagatttgtggcactttgaacttaagagagatgatttagggtatctggcagaagaaatttctaagcagcaaagctttcaagagaaatgctatttctctcccccgaagaagaatgggaccttgaaggacctactgggactagtcattcaaccttggtgtgggcctgcccacttctccgggaccagactgggccacctcctgagaaccacagatgtgccacgccttcaggaaccccatcacatgctgtccgaggaggaaggaagaggggttgagtgtgctgacacacagagtaacaggctgtttaggagagagggtggaagaagagggccacgtttttcagtgtggcatgggtccccgcaggcttcccttcctgctggagcaagtggagactatgcacctccccagaaacgtcctctgggccgagggcaggctcagagtaaggaggagagagagagagagagacagagaagcagcaagaagagcagaaaagtcaacaggcctgagagggccatggtgcaaactgcttcaaaggcaggtccttggagcccatgtcactgcagaggagttggagggctagagaacagagaagtttggcagccatcatccttggccatagttccggaaggctgcaagaggctaggtgggcaatgtatgagcaggacatctagcaaatgggccatggagagcctgactgagactcttatgtcctattctggcccagaaacttcacaatgggtcttaaatagcacagagaagtgcagccctgaaaggttcacatggacaggagtctcagcatgtggacaggtgatagaggagcaaatgggctcaaagaatcttgactatatgctggagcacagtctgccatgggccctgcacatttttgcaggatatgccaagaattcaaggccatgcatctctttcctaagacctttctcagaatcgtgtttgcagggagcaatgttgcaggatgaagtaacctctctcacaaagagcaggcttgcatctgcttcctataaaagcagcaggccaattccaggtttcccagccccaggcaagctgaccccagacaatgcaggccccaggagtatcatggaggaagaaaagaagggttga

SEQ ID NO: 117820 - DNA, 873 bp, Homo sapiens
atgtgggaaagtttgcaactccctggagacttgttgaatggctttaaccaaaatgttgataatgatatggacaatgaaatccaggctgaggtgatctcagatggagatgaggaacttgttgggaactggagcaaaggtgactcttgttatgctttagcaaaaagactagtggcattttgcccctgccctagtgatttgtggaactttgaacttgagagagacaattcagggtatccggcagatgaaatttctaagcagcaaagcattcaagaggtgacttgggtgctgttaaaggcattcagttttaaaagggaaacagagcataaaactttggaaaatttgcagcctgacaatgcaatagaaaagaaaatcccatttcctaagaagaaattcaagcaggctacagaaatttgcataagtaacaaggaggcaaatgtgcagaagacaaatgtagagttggagccctcacacagaatccctactcaggcactgcctagtggagctgtgagaagagggtcaccgtcctccagaccccagaatggtaggtccactgacagcttgcaccatgtgcctggaaaagccacagagactcagcaccagcccgtgaaagaagccaggaggggggatataccctgcaaagccacaggggcagatctgccaaaggctgtggaagcccactttttgcatcagcgcatcctgaatgtgagatatggagtcaaaggaaatgattttgaagctttaaaatttgacggccctcctggatttcagacttgcatgtggcctctagcccctttgttttggccaatttctcccatttggaatggctgtatttacccaatgcctgtacccccattgtatctaggaagtaactaa

SEQ ID NO: 117821 - DNA, 1210 bp, Homo sapiens
atgtgggaaagtttggaactccctagaaacttgttgcatggctttgaccaaaatgctgataatgatacggacaatgaaatccaggctaaggtggtctcagatggagatgagaaacttgttgggaactggagcaaagagccacctggcaacacggagagggagcccacttcccctgagccgggatgtagatgggacctgttgatgtcaactgccaatagcatggaagagagcgtgcaggaacaggagagagaacgcacaggttttcctcccttttcctgtgcagacctgctccagggtcatacaacatcgagtgccaatcagacaaggttcaccccgtggatgaaaaaagagctacagtttgaaaacctagtgggaaatctaactgactcatccctgccttcccaaatatttgcagaaaatagtttgggggcatcaggatctgcaacacatgtacgtcgtatcaaaatcattattcgcatgacagccaagacctcgggctctctgaagctgattgcctggctttctctgaatgctgtggatctgctgagctgtgggcttactctttggggttttctggtgatagctaagcctcctggggatgattcactacatgttcaaaacaccaaacgaggccaggacatcgcccagagcagcaacatcctgcggaaaagagtgtcagtggcatcttttgttatgcagaggagatggaatcctcccagctcccagacccaggctccggtcaaccccctcgaggtggcccctgggaccgccgtatgagcctctctccaaccggatccctgatgctcccggagagccggcccagcctcgaccccgggacactagtcattggatcagggcatacctggataaccgggtctggcgccgcgtggacataggctgtggaagtccccggagacccctgccccatcccctgccccgcggggtgtcagcggtggcctcccaggcagcaggagcgcgcaagtgggaagcggggatcccagcccacaccacctatgacagccagctgctgcagggaggaaggattcttcatccttctgagccacatggcgtcccccagaccacctggtccagctgctgctgcagggaggaaggattcctcatccttctgagccacatggcgtcccctagaccacctggtccagctgctgcagggaggaaggattcttcgtccttcatggttcttccctga

SEQ ID NO: 117822 - DNA, 1621 bp, Homo sapiens
atgttcttaaataaagtacctgtctttggaaagcaagccccccagtatggactgagtggggtgagcaacgaaggcaaggtggaggcacagatcacctgtgcacctcagagcaatatttctcagactttaatgtgcaccaagttacctggggatcttgttaaactgcagcttcttaccccacagagtgacaacagttgtacccatattggtgacaacggaacttaccggtcacaactgaaagcagcttttgcagagaaactcaatatgggaaaattaacctttttcataactggagtaaatcacaagtgggggctgccattgtccctgacctggctgcctgccaattcctgggagagccttctgtctttcccacctccttccccaccccaacagctaaatgataaaccaggcagacgatcgaacataacgcacagctcaaaagaagacaagaaaaccgaagaaagtttggaactccctagagacttgttgaatggctttgaccaaaatgctgataatgatatggacaatgaaatccaggctgaagttgtctcagatggagatgaggaactttttgggaactggagcaaaggtgactcttgttatgttttagcaaagagactggtggcattttgtcccttccctagagatttgtgggactttggacttgagcgggatgatttggggtacctggtggaagaaatttctaagcagcaatgcattcaagaggttactcgtgtgctgttaaaggcattcagttttataagggaaacagaccataaaagttcagaaaatttgcagcctgacaatgccatagaaaataaaatagcattttctaagaagaaattcaagccagttgcagaaatttgcataagtaataaggagccgaatgttaatccccaagacaatggggaaagtgtctccagggcatgtcagaggtcttcacagcaggccctcccagcacaggcccagaggcctaggaggaaaaaatggtttcacagctgctccagctatggctgaagggtccaacatagagctctggctgtggcttcagagggtgcaagccccaaaccatggcagcttccatgtggtgttgagcctagttcagaagatgtatggaaacacctggatgaccaggcagaagcttgctgcaggagcaggttcctcatggagaacctctgctagggcagcacagaagggaaatgtggggttggaacccccaagcacagtccctactggagtaccacccagtggagctgtgagaagaaggccaccatcctccagaccccagaatggtagatccactgacagcttgcaccatgcacctggaaaagccacaagcactcaatgccagcccctgaaagcagctatgagggaggcggtaccctgcaaagccacagaggcagagctgcccaagaccatgggaacccacctcttgcatcagcatgacctggatgtgagacatggagtcaacagagataatttgggagctttaagatttgactgccccactggatttcagactcgcatggggcctgtagccccttcattttggccaatttctcccgtttggaatggctgttgtttacccaatgcctgtatccgcattgtgtctagaaagtaa

SEQ ID NO: 117823 - DNA, 636 bp, Homo sapiens
atggagattcggaggacctggcaggagcatcaaggtcccttatccacaaacttcctgcccatgctgcccagggaaaagcaataccagtctgtatcagccagggagaggcctgccagccaagatagtggctctgggctgtggttggtcacagtaaaggacgttttcacggtcgtttcgtattcagcactaagagaaagcctacggccgctgtcagccgaagacaggaatcttgaggccctgtctctggacaccatcgagttaactgtctgccctgtaccattctgcctctgcgcaggtgacgagcaaaagggcacctgtgtcgcctgctctgtccagccggagaagccacgggtgcaagatggcggcattcgccacagcccctcgccctcctgcagagagcgcccgagccggcgcaccaccaccctgcagccccacccggccgcctgcatcatgccggccttcggtgctcaccagtccggcccgccgaggaagggcgcggaccacggccgcagcaacgcgcacggacagcatctttgcagttactccgcaggcggtacttctgcagccgcagcctccggactgactgggacaaaatggccgagccgcaaagaaggtcaagacagccggcccacctga

SEQ ID NO: 117824 - DNA, 1896 bp, Homo sapiens
gcattatggaacctttatttttcatgtgatttctgtacataaggagtatgagagtaacccttttacaaatggaactaatttactagaacaatgacaaaactgaactggtatttgatgtgaatccacaggagtttaagcttcaaatccagccaagaaatttgttacaatctctttcagctttgcatctgattgttctgagatctttccatcagccctgatagtgcccaacaaggcttggtgctggctgacgacatgagacaagaaagcattctcaaactttgtaatcttgctgggctccagtttatcaagatatccccttacacccgcatagataacagccacttgttcttcaatagccatgggagaatactgtccttgcttcagcaactcagttagacgcacgccacgactcaaaagttgttgagtggcagcatcgaggtcagaaccgaactgggcaaaagcagcaacctcacgatactgagccaattccagcttcatggtacctgctacctgcttcatagccctggtttgggcagcggatccgacacgagatacagacagaccaacgttaattgcagggcggatacctttgtagaacaattctgtttccaagaagatctgtccgtcagtgatggaaatgacatttgttggaatgtaagcagacacatcaccagcctgtgtttctatgactggcaaagcagtcaaggagccaccaccaaaagcatcgttcattttggctgctctctccagcaaccgggagtgtaggtagaacacatcaccaggataggcctcacgaccagggggtcggcggagcaacagagacatctgacggtaagcaacagcctgtttggataagtcgtcatagatgatcaaagcatgtttgccattgtctctaaaatactctcccatggaacagccagagtaaggagccaggtactgaagtggggcagcatccgaggccgtagccgacaccacaatggtgtacttcatggcatctgcatctgtaagtctcttcaccaactgggcaacagtggatctcttttgaccaatagcaacataaatacagtacagcttcttcttttcatcagatccatcattgaaacgtttctggttaatgattgtgtcaatagcaattgaggttttcccagtctgtcggtcaccaataatcagttcacgctgaccacgaccaattggcaccaagctatccacagccttaatgccagtctgcattggttcccgcactgaaattcgaggaatgataccgggggctttcagaccaacttcgcctacgcgtcttggaaccaaattggaccctttccatcaatagcattacccaagggcatcaactacacgacccaacagctcttcacccaactgggaacgtccacaatggctcctgtccttcttcactatatctcctttccttaattagtttatcaatttcccaaacacggacaacacccaaccattgtcaggttccaaagttcaaaggacatacccttttaagcctgaaagaaaaactcttaccatttcttctgcttggaacattccttcagcccattgtacggcgggcaataaccatcaccaatactttaagacacgcccaggtttcattcaagatcaaaaagaggtatcacgctccaagaatacgcttcttcaagaaattagaggacatcttcagcagtcccagtcttttgaaggatgagtgttagaggcatggaagttccttgcagcaatgaaagatgaacccaaagcatttctggagaccaggtccggcccgccgaggaagggcccggaccacggccgcagcaacgcgcacggacagcatctttgcagttacctcgcaggcggtactttctgcagccgcagcctccggactgactgggacaaaatggc

SEQ ID NO: 117825 - DNA, 499 bp, Homo sapiens
  misc_feature (1)...(499): n = a,t,c or g
agtgtcgtgcaattcgctcgggaccggcctggagatggagttcgactgcgagggcctgagacggtttgcttgttatgtacaagttcagggacctagggtgtggaagaactaaggaatgtaaatgtatttttcccacatttcaaatattccatggacacctatgtttttaaagatagttctcagaaagacctgctgaattttactggcacacttcctgtgatgtatcaggcctaaatctgtcattgttggnnnnnnnnnnnnnnnnnnnnccaagtttcaagaggaacttcccatgtattctctatcatcatctgatgaggcacggcaggtagacttgctagcctatattgcaaaaatcactgaaggtgtttcagatacaaattcaaagagctgggcaaatcatgagaataaaacagtcaataaaattactgtggttggaggtggagaactcggtattgcctgcacattagcaatttcagcaaagggtattgcagacagg

SEQ ID NO: 117826 - DNA, 1449 bp, Homo sapiens
atgtccgacgtgcacgcggccactgggagcccagctgagttgtgtgtagtgctgaatgacgagaaggtggagggtgtgtggctgaaggatggcaaggagatcacggacttgccaggcgtgcagattgtgaagcagggtgcagtgcacaagctcatctttcccagtatgggccctgagcacgagggcaagtacacattccgggccaagggcacggaaagtgaagcctctgtattcatcgcagatcctcctaccatcgacccgtcagtactggaggcactggctgcgcacgccatcactgtgaaggtaggccacacggcccacatcaaggtccccttccggggaaaaccactgcccaaagtgacatggtacaaggatggcatggaagtgacggaggaggaacgcgtgtccatggagcgcggggaagaccaggcactgctcaccatctccaactgtgtgcgtgaagacagcggcctcatcctgctcaagctcaagaatgaccacggctcagccacggccactctgcaccttagtgtgctgggtgtttcagatacaaattcaaagagctgggcaaatcatgagaataaaacagtcaataaaattactgtggttggaggtggagaactcggtattgcctgcacattagcaatttcagcaaagtgtcatccggagcgctatgaagagctagtcgcatattgcgtggcgtcctgccgctgtcatgaggaagctagcgtcaagagcattatggtcgtccacacaggagacagagagcctcctggttttgcctcccagcctcaagtgactgatgtgactaaagaagccgtgaccatcacgtggaatgcccctacccaggatgggggagccccagtgctcggctacattgtagaacgaaggaagaaaggcagcaacctgtgggtgccagtcaacaaggaccccatccagggcaccaagtgcactgtggatggtctcctggaggacacagaatatgaattccgagttatagctgtaaataaggcaggccctggacagcccagtgtgccatccagctcagtagtggccaaggatcctgttaaacccccaggcctggtccaggacctgcatgtatctgattcctccaactccagcatttccctggcctggcgggagcctgcagagggagacccaccctctggctacatccttgagatgagggctgaagacacaaaggagtggtccaagtgcacaaagatccccatctcaggcacctgctacacagtgggaggactcatcgagaggcagaaatacttcttccgaatccgggctgtgaatgaggctggggttggggagcctgtggagctagacaagggggtccgtgccatgccaccaccagtccacagggtgccagaagatgacagtggctccatggggacaacagaggcagaacaaggtagcggtgacgacacgggctactga

SEQ ID NO: 117827 - DNA, 930 bp, Homo sapiens
atgcagagatggtttaatatatgcaagtcaataagtgtgatacaccacataaacagagttaaaacttacatgatcatctcaatagatgcagaaaaagcatttgacaaaatccagcatctctttatgattaaaactctcagcaaaattggcatacaagggacatacctccacgtaataaaagtcatctatgacaaacccacagccaacataatactgaatgggaaaaaagttgaaagcattccctttgagaactggaacaagacaaggatacccactctcacaactcttcttcaacatagcactggaagtcctagccagagcaatcagacaagagaaataaagggcatccaaatcagtaaagagaaagtcaaactgtcactgtttgctggtgatatgatcttttatcttgaaaaccccaaagactcctccaaaaaactcctagaactgataaaagaattgagcaaagtttccaggtataagattaatgtacacaaaccagtagctcttctatacaccaacagtgacctagtggagaatcaaatcaagaactcaaccccttttacagtagctgcaaaaataataaaatacttagaaatatacctaatcaattacatgaaagacctctacaaggaaaactacaaaacactgctgaaaaaaatcatagacaacacaaacaaatggaaacacattttatgcttatggataggtagaattaatcttgtggaaaatgaccatactgcaaaaagcaataaacaaactcaatacaatccccatcaaaatactaccataattcttcacagaattagaaaaaccaattctaaaatgtatacagaacgaaaaaagagcccacatagccaaagcaagactaagcaaaagaataaatctggaggcatcagactacctgatttcaaactatactataagccatag

SEQ ID NO: 117828 - DNA, 639 bp, Homo sapiens
atgggaagaaaccagagcaaaaaggctgaaaattccaaaaaccagaatgccttttctcctccaaaggaaaacgactcctcgacagcaagggaacaaaactggatggagaatgagtttgacatgttgacagaattggacttcagaaggtcggtaataacaaacttctccaagctaaaggagcatgtcctaacccatcacaaggcagctgaaaaccttgaaaaaaggttagacaaatggctaactagaataaacagtgtagagaagaccttaaattacctgatggagctgaaaaccacattgttcatggtggacaatggagcagatgactggagaatagccatgacttatgagcgtattttcttcatctgcttggaaatactggtttgtaatgctgtgttagggggcaaattggggatggaaaggaaaagagagagcaaagggacagcaggagcatgggaggattctaagggctcagctggagcctttcgcattccatcagagatctgtgcaatgtggggacatcagagatctgtggatggggtatttcctcttgaacctcatgaaaaagctaacatttcaatgatttccatgacaggatacttgacagttaaaagaactgaaaaagatagcatcaactaa

SEQ ID NO: 117829 - DNA, 1833 bp, Homo sapiens
ctgcgccagggccccgcggggctggggcccaaaaagcgtgcggagcctcagctggtggagacccagaatgtgcggcttattgaggtggagcgcagtgtgagtgtgggcccacagtgggccctggggaggtgccccgtgcagtgtgagtgtgggtccacggtggaccctgggctggggggtatcccgtgcagtaatgcgatgctggtggcagagaaggcagctttgcaggggcagctgcagcacctggaggggcagctggggagcctgcagggccgtgcccaggagctgctgctgcagagccagcgggcgcaggagcacagcagccgcctgcaggccgagaagtctgtgctggagattcagggccaggagctgcaccggaagctggaggtgctggaggaggaggtgcgggcggcacggcagtcccaggaggagacccgcgggcagcagcaggccctgcttcgggaccacaaggccctggcacagctgcagcggcggcaggaggccgagctagagggactgctggtgcggcaccgagacctcaaggccaacatgcgggcactggagctggcccaccgggagctgcagggccggcacgagcagctgcaggcccagcgggccagcgtggaggcacaggaggtggccctgctggcagagcgtgaacgcctgatgcaagatgggcatcggcagcggggcctggaggaggagctgcggaggcttcagagcgagcacgacagggctcagatgctgctggcagagttgtctcgggagcggggtgagctgcagggtgaacgcggggagctacggggccggctggcgcggctggagctggagcgggcacagctggagatgcagagccagcagctgcgcgagtccaaccagcagctggacctgagcgcctgccggctgaccacgcagtgtgagctattgacacagctgcgaagtgcccaggaagaggagaaccggcagctgctggctgaagttcaggccctgagccgggagaacagggagctcctggagcgcagcctggagagtcgggaccacctgcaccgcgaacagcgggagtacctggaccagcttaatgccctgcgccgcgagaagcagaagctcgtggagaagatcatggaccaataccgcgtgctggagcctgtgcccctgccccggaccaagcccagctcaggtccaggccccatgaaggtcaacctggcctttgacatccccaggacaccctttgctccctccctcctccctgtcctgaccccctcttgtgccctcttgcccccaggaagggcagctggctggcagacaaggacatccgggctttggccggccggactggccaagcccctggagaaaggcctgtgctgccctgtccaggcaggggccctctgcccacagacccccaccaaccagcaggactggggcggcatgtgtcctggtgccctgagggcagggggttctcttgccaactcctgccagcctccttcagctgggggatcccccagagaccgctgcctcaacgggagccacctggaagaaccagaactccagcctggagctgctcgtgggggccagccatcccccctgtccacacactcgtcccagctccatctccgggccccggcgctgaccgtggaggatctcagggcccaggcctccttgtccaaggactccccttggggtccctggctccctgagctcttgggctgcctggggcctccgctgacactccagtgccgagaaggctgcactcccaagcctgctgttcccacggtgtcactggctgagggatggggtgaggggacgtttctccggttcctgtacctcggggcctag

SEQ ID NO: 117830 - DNA, 1267 bp, Homo sapiens
  misc_feature (1)...(1267): n = a,t,c or g
ttttcattttttttttttttttgaccatgcatcgactcttttatttctttaggactcaaattccactcggatggggtcaggcttgggtctggggacccggctggcacggggctggttcgggtcgctgctcgagcccaaggtggcgtttttaattcacgtacagcctcttgctccggcgcttcttgagcccttcgatgtatcgctgcagctccttagtcaggaagtggtccctgccgatccctaactggtagctccggagggctttggtgaggatttccagagcttcattctccatgagttccatcaggggcagtggcagaggctccagcacgcggtattggtccatgatcttctccacgagcttctgcttctcgcggcgcagggcattaagctggtccaggtactcccgctgttcgcggtgcaggtggtcccgactctccaggctgcgctccaggagctccctgttctcccggctcagggcctgaacttcagccagcagctgccggttctcctcttcctgggcacttcgcagctgtgtcaatagctcacactgcgtggtcagccggcaggcgctcaggtccagctgctggttggactcgcgcagctgctggctctgcatctccagctgtgcccgctccagctccagccgcgccagccnnccncgtagctccccgcgttcaccctgcagctcaccccgctcccgagacaactctgccagcagcatctgagccctgtcgtgctcgctctgaagcctccgcagctcctcctccaggccccgctgccgatgcccatcttgcatcaggcgttcacgctctgccagcagggccacctcctgtgcctccacgctggcccgctgggcctgcagctgctcgtgccggccctgcagctcccggtgggccagctccagtgcccgcatgttggccttgaggtctcggtgccgcaccagcagtccctctagctcggcctcctgccgccgctgcagctgtgccagggccttgtggtcccgaagcagggcctgctgctgcccgcgggtctcctcctgggactgccgtgccgcccgcacctcctcctccagcacctccagcttccggtgcagctcctggccctgaatctccagcacagacttctcggcctgcaggcggctgctgtgctcctgcgcccgctggctctgcagcagcagctcctgggcacggccctgcaggctccccagctgcccctccaggtgctgcagctnnnnnngcaaagctgccttctctgccaccagcat

SEQ ID NO: 117831 - DNA, 679 bp, Homo sapiens
atgagggaaaggatgagagaaacgatgagaaaggatgagggaaaggatgagaaaaagaatgagagaaacgatggaaaggatgagagaaacgatgagggaaaggatgagggaaaggatgagagaaaggatgagagaaacgatgagggaaaggatgagggaaacgatgagggaaaggatgattgaaaggatgagggaaaggatgagggaaaggatgagggaaaggatgatggaaaggatgagagaaaggatgagggaaaggatgagggaaaggatgagagaaaggatgagggaaaggatgagggaaacgatgagggaaaggatgagagaaaggatgagagaaaggatgagggaaaggatgagggaaaggatgagggaaaggatgagagaaaggatgagggaaaggatgagggaaaggatgagggaaaggatgcagggaaaggatgagggaaaggatgagggaaaggatgagggaaaggatgagagaaaggatgagggaaaggatgagggaaaggatgagggaaaggatgagggaaaggatgagggaaaggatgagggaaaggatgagagaaaggatgagggaaaggatgagggaaaggatgagggaaaggatgagggaaaggatgagagaaaggatgagggaaaggatgatgctgccttatcatactctcatcaaggttaa

SEQ ID NO: 117832 - DNA, 660 bp, Homo sapiens
atggcaaatacaattgagattgacaaacaaacaaacaaaaatccactttcactagaagctccattttatgacaactgtgttgtgtgtgatgctggtggagaggattgtggaggacgaatggcagagatgaaagggcttgctgaggttactatagaacttctggaacctactggggaagaagagctgggcaggcagctccaggcactagcacaggtgccgactccatgtgaggctgtgtctggaccagatgtactgcatacagcttctgctgcaggcacctgcatccagacaaggggtacacagtggcacccagaagcttggagatgccaggaactgcagagccccaaagagagcgtcacagccctgactctggagcccctaaatccaggttccctgaagggctgcagctcttttctcctcattgcctgcaatgtgagggaggaagtgcatgctgataagtccgtggccatgagtgggcccagaaaaagtaccacaagttctcactgtggtctgtggactccacctgaaactgacagcccagcccccatgcttcaggctgtcactggcttgaagagcctgcagccttctgccatgcctcccctgctgcttctggcatctttgcagcagctgcttcagacaggccgctgctgccatcagtag

SEQ ID NO: 117833 - DNA, 1025 bp, Homo sapiens
caggccactatccttgataaacatacatgcaaacttcctcagcaaaatactagcaaactcaattaaacaatgccttaataggatcatccaccatgatggagtgagatttatctttgagatgtaagaataatttaacatacatagatcaataaatgtgacatactacattaacagaatgaagaataaaaatatgatcatcagatgcagaaaaagcatttgacaatattcaacaccctttcataataaaaattctcatcaaattaggtatagaaggaacatagctcaatacaataaaggccctactgatggcagcagcggcctgtctgaagcagctgctgcaaagatgccagaagcagcaggggaggcatggcagaaggctgcaggctctcggcctcctctgaactttgggcaccaatgagcatgggagggggactgaggtaggcctgagggcagcttggcgcaggcctgcaggcccctttggcacaaacagcctgggtgccatggacattattgatggcaacaggaggcagacaggctcctgggtggaaaggggcacattcctggtgaagccccaccttcaagccagtgacagcctgaagcatgggggctgggctgtcagtttcaggtggagtccacagaccacagtgagaacttgtggtactttttctgggcccactcatggccacggacttatcagcatgcacttcctccctcgtgagtccattcacagggccagagttccaagtgtgcggcgtgggcggggcctgcagaaagggacggggcctgcagaaagggacggggctggcaaaggcctggtctacctcaccgatccgggtcgcgggggctcctagggggttccttccacagtgtccaagacagcgattccgcggctcctctgagaactggcgcttgtgagtgactgaacgggccactggagaggagcggtgctcacgggtatcgttctcgtcagcgggcggtggggacgcggggtcttggaattgggaatcacgcttgagggcgtccat

SEQ ID NO: 117834 - DNA, 1164 bp, Homo sapiens
cgacacccaggctggccgactccggcagcgtgccccacgactctcaggtggctgaaggccccagtgtggacaccaggcccaagaagatggaaaaagagcctgccgccagggggaccccaggaacggggaaggagaggctgaaagccggagcgagtgggtttgcaggaggcatgggccctcggagcgtccccgcgcgcaagaaggcgcagaccgcgccgcccctgcagccgccgccgccgcccccggccctgagcgaggagctgccctggggagacctgtcgctcaacaagtgcctggtgctcgcctcgctggtggcgctgctgggctcggctttccagctgtgccgcgcgttctgccgcctttcccctgcgccctctctggggaccgctcagctcgtgagcgccccccgggggcactcctgcgacccctcccttgctaggggcctcctacagcccgtggtcggggggaagaatgaccaattgaaagagcgagctgactcgggtcccgaccctgtcgctgcagacgccgtccctggggaggcagcactccaagcacgtgtgcccgagccctgggtcccgccaagctcagccccgagggagccatcgtcgcccctgcctaagttcgaggcccagggcgcctccatcagcccggcctgcgccccgggccgaggcagaggtcagacccaagattccccgggagtcgggagcctgcagagaacgcggaagaggagcccggcgaggccaccggagaggccgtccgggaggaccgtgtgaccctcgcagaccggggacccaaggagaggcctcggagagaggggaagccgcggaaggagaagccgcggaaggaggagagacctaagaaagagaggccgcggaaagaggagaggccacgggccgccagggagccccgggaagccctaccccagcgctgggagtcacgcgaagggggccaccggccgtgggcacgggactccagggacgccgagcccaggaagaagcaggcctgggtgtccccgaggcgtcccgacgaggagcagcggcctgggagtcgccagaagctccgcgcaggcaaggggcgggactgagccggccccgcgccggagtccaggggccccttctggacgccccgcgactctggcgaaataaagcgagtgctgcggccaaa

SEQ ID NO: 117835 - DNA, 529 bp, Homo sapiens
cagattcaccaaagttgaaatgaaggaaaaaaatgttaagtgcagccagagagaaaggtcgggttacccacaaagggaagcccatcagcctaaaggctgatctttcagcagaaactctacaagccagaagagagtgggggccaatattcaacattcttaaagaaaagaattttcaacccagaatttcatatccagccaaactaagcttcataagtgaacaagaaataaaatactttacagacaagcaaatgctgagagattttgtcatcaccaggcctgccctaaaggagctcctgaaggaagcattaaacatggaaaggaacaactggtaccagccactgcaaaaacatgccaaattgtaaagaccatcaaggctaggaagaaactgcatcaactaacgagcaaaatagccagctgacatcataatgacaggatcaaattcacacataacgacattaactttgaatgtaaatgggctacacagactggcaaattggataaagagtcaagacccatcagtgtgctgtat

SEQ ID NO: 117836 - DNA, 369 bp, Homo sapiens
ctttacattttggcatgattttgcagcggctggtactggttgttcctttccatgtttagtgcttccttcctggtggtgacaaaatctctcagcatttgcttgtctgtaaaggattttatttctccttcacttatgaagcttagtttggctggatatgaagtgctgggttgaaaattcttttctttaagaatgttgaatattggcccccactctcttctggcttgtagggtttctgccgagagatccgctgttagtctgatgggcttccctttgagggtaacccgacctttctctctggctgcccttagcattttttccttcatttcaactttggtgaatctgacaattatgtgtcttggagttgctctt

SEQ ID NO: 117837 - DNA, 394 bp, Homo sapiens
atagcattgatggtctctaccatttggcatgtttttgcagtggctggtactggttgtttctttccatgtttagtgcttccttcaggagctcttgtaaggcaggcctagtggtgacaaaatctttcagcatttgcttgtctgtaaaggattttatttctccttcacttatgaagcttagtttggctggatatgaaattctgggttgaaaattcttttctttaagaatgttgaatattggtcccccctcttttctggcttgtagggtttctgccgagagatccactgttagtctgatgggcttatggctgcccttaacactttttccttcatttcaaccttggtgaatccaacaattatgtgtcttggggttgctcttcttaaggagtatgtttgt

SEQ ID NO: 117838 - DNA, 1247 bp, Homo sapiens
ttatttcttgccttctgctagcttttgaatgtgtttctcttccttctctagttcttttaattgtgatgttagggtgtcagttttagatcttttctgctttctcttgtgggcatttagtgctataaatttccctctacacactgctttaaatgtgtcccagagattctggtatgttgtatctttgttctcattgttttcaaagaacatctttatttctgccttcatttcattttgtacccagtagtcattcaggagcaggttgttcagtttccatgtagttgtgcagttttgagtgagtttcttaatcctgagttctagtttgattgcactgtggtctgagagacactttgttataatttctgttcttttacatttgctgaggagtgctttacttccaactatgtggtcaattttggaataagtgtgatgtggtgctgagaagaatgtatattctgttgatttggggtggagagttctggagatgtctattaggtctgcttggtgcagagctgaattcaattcctggatatccttgttaactttctgtcttgttgttcggttgttcctttccatgtttagtgcttccttcaggagctcttctagggcagggctagtggtgacaaaatctctcagcatttgcttctctgtaaagtattttatttctccttcacttatgaagcttagttttgctggatatgaaattctgggttgaaaattcttttctttaagaatgttgaatattggcccccactctcttctggcttgcagagtttctgccaagagatctgctgttagtctgatgggcttccctttgtgggtaacccgacctttctctctggctgcccttaacattttttccttcatttcaactttggtgaatctgacaattaggtttcttgtagttgctcttcttgaggagtatctttgtggcattctctgtatttcctgaatttgaatgttggcctgccttgctagattggggaagttctccaggataatgtcctgcagagtgttttccaacttggttccattctccctgtcactttcaggtacatcaatgagacgtagatttggtcttttcacatagtcccacatttcttggaggctttgttcgtttctttttattcttttttctctaaacttctcttctcgcttcatttcattcatttgatcttcagtcactgataccctttcttccagttgatcaaatcggctactgaagcttgtgcattcatcacgtagttctc

SEQ ID NO: 117839 - DNA, 1698 bp, Homo sapiens
atggagctgaaagccaaggctcaagaactacgtgaagaatgcagaagcctcaggagccgatgcaatcaactggaagaaagtgtatcagtgatggaagatgaaatgaatgaaatgaagcgagaagggaagtttagagaaaaaagaataaaaagaaatgaacaaagcctccaagaaatatgggactatgtgaaaagaccaaatctacgtctgactggtgtacatgaaagtgacggggagaatggaaccaagttggaaaacactctgcaggatattatccaggagaacttccccaatctagcaaggcaggccaacattcagattcaggaaatacagagaacgccacaaagatactcctcgagaagagcaactccaagacacataattgtcagattcaccaaagttgaaatgaaggaaaaaatgttaagggcagccagagagaaaggttgggttacccataaagggaagcccatcagactaacagtggatctctcggcagaaactctacaagccagaagagagtgggggccaatattcaacattcttaaagaaaagaattttcaacccagaatttcatatccagccaaactaagcttcataagtgaaggagaaataaaatcctttacagacaagcaaatgctgacagattttgtcaccaccaggcctgccctacaagagctcctgaaggaagcactaaacatggaaaggaaaaaccgagacacacataggctcaaaataaaaggatggaggaagatctaccaagcaaatggaaaacagaaaaaggcaggggttgcaatcctagtctctgataaaacagactttaaaccaacaaagatcctaaaagacaaagaaggccattacataatcgtaaagggattaattcaacaagaagagctaactatcctaaatacatatgcacccagtacaggagcacccagattcataaagcaagtccggagtgacctacaaagagacttagactcccacacattaataatcggagactttaacaccccactgtcaacattagacagatcaacgagacagaaagttaacaaggatacccaggaactgaactcagctctgcaccaagcagacctaatagacatctacagaactctccaccccaaatcaacagaatatacatttttttcagcaccacaccacacctattccaaaattgaccacatagttggtagtaaagctcttctcagcaaatgtaaaagaacagaaattataacaaactatctctcagaccacagtgcaatcaaactagaactcaggattaagaaactcactcaaaaccactcaactacatggaaactgaacaacctgctcctgaatgactactgggtacataacgaaatgaaggcagaaataaagatgttctttgaaaccaacgagaacaaagacacaacataccagaatctctgggacacattcaaagtagtgtgtacagggaaatttatagcactaaatgcccacaagagaaagcaggaaagatccaaaattgacaccctaacatcacaattaaaagaactagagaagcaagagcaaacacattcaaaagctagcagaaggcaagaaataactaaaatccgagcagaactgaaggaaatagagacacaaaaaacccttcaaaaattaatgaatccaggagctggttttttgaaaggatcaacaaaattgatagaccactag

SEQ ID NO: 117840 - DNA, 1539 bp, Homo sapiens
atggaagaagaaatgaatgaaatgaagcgagaagggaagtttagagaaaaaagaataaaaagaaatgagcaaagcctccaagaaatatgggactatgtgaaaagaccaaatctacgtctgattggtgtacctgaaagtgatggggagaatggaaccaagttggaaaacactctgcaggatattatccaggagaacttccccaatctagcaaggcaggccaacattcagattcaggaaatacagagaacgccacaaagatactccttgagaagagcaactccaagacacataattgtcagattcaccaaagttgaaatgaaggaaaaaatgttaagggcagccagagagaaaggtcgggttaccctcaaagggaagcccatcagactaacagcggatctctcggcagaaaccctacaagccagaagagagtgggggccaatattcaacattcttaaaggaaagaattttcaacccagaatttcatatccagccaatctaagcttcataagtgaaggagaaataaaatactttacagacaagcaaatgctgagagattttgtcaccaccaggcctgccttacaagagctcctgaaagaagcactaaacatggaaaggaacaactggtaccagctgttgcaaaatcatgccaaaatagtcacacataggctcaaaataaaaggatggaggaagatctaccaagcaaatggaaaacaaaaaaaggcaggggttgcaaacctagtctctgataaaacagactttaaaccaacaaagatcaaaagagacaaagaaggccattacataatggtaaagggatcaattcaacaagaagagctaactaccctaaatatatatgcacccaatacaggagcacctagattcataaagcaagtcctgagtgacctacaaagagacttagactcccacacattaataatgggagactttaacaccccactgttaacattagacagatcaacgagacagaaagtcaacaaggatacccaggaattgaactcagctctgcaccaagcggacctaatagacatctacagaactctccaccccaaatcaacagaatatacatttttttcagcaccacaccacatctattccaaaactgaccacatacttggaagtaaagctctcctcagcaaatgtaaaagaacagaaattataacaaactatctctcagaccacagtgcaatcaaactagaactcaggattaagaatctcactaaaaaccgctcaactacatggaaactgaacaacctgctcctgaatgactactgggtacataatgaaatgaaggcagaaatgaagatgttctttgaaaccaacgagaacaaagacacaacataccagaatctctgggacacattcaaagcaatgtgtagagggaaatttatagcagtaaatgcccacaagagaaagcaggaaagatccaaaattgacaccctaacatcacaattaaaagaactagaaaagcaagagcaaacacattcaaaagctagcagaaggcaagaaataactaaaatctga

SEQ ID NO: 117841 - DNA, 2673 bp, Homo sapiens
gttccttcggagagcgagcgggagtcggtgctcggcctcctgcggggagcagcccgaggaatctgcagggagaggtcgggaggtgacaacgccagcatgccagtgctatcggaggactctggtttgcatgaaaccctggccctgctgacctcccagctcagacctgactccaaccacaaggaggagatgggcttcctgagggatgttttcagtgaaaaaagcctcagttacttaatgaagattcatgagaagcttcgctattatgaaaggcaaagtccaaccccagttctgcacagcgctgtggccctcgctgaggacgtgatggaggagttgcaggccgcctccgtgcacagtgatgagagggagctgctccagctgctgtccaccccgcacctgagggctgtgctcatggtacatgacacggttgcccagaagaattttgaccccgttctcccgcctctgcctgacaatatcgatgaggattttgatgaggaatcggtgaagatcgtccgcttggtgaagaacaaggaacccctgggtgccaccatccggcgggacgagcactcaggggctgttgtggtggccaggatcatgcgaggaggcgcagcagacaggagcggcctggtccacgttggagatgagctccgagaagtgaacgggatcgcagtcctgcacaagcggcccgacgagatcagccagattctggcccagtcccagggatccatcaccctaaaaatcatcccagccacccaggaggaagatcgcttaaaggagagcaaggtgttcatgcgcgccctcttccactacaaccctcgggaggaccgggccatcccttgccaggaggcgggcctgcccttccagcgcaggcaggtcctggaggtggtgagccaggacgaccccacgtggtggcaggccaagcgagtcggggacaccaaccttcgagccggcctcatcccctccaaggggttccaggagagacttccaggaaggtcagtcttgggtcagagggtggcagttgtgacttccactgtgggttgtagccctcacatcttttggtgtgtggactgtgagacctgtgactgtgagggctacctcaaagggcactatgtggctggtcttcggaggagcttccggctgggctgtagggagagactgggtggctcgcaggaaggaaagatgtcctccggagctgagtctccggagctgctgacttacgaagaggtggccaggtaccaacaccagcccggagagcggccccgcctggtggttctgatcgggtctctgggagcccgactgcacgagctgaagcaaaaggtggtggctgagaacccacagcactttggcgtcgctgttccacgggcaccctgggatgtcaagctccagtgggcagaggatcctggttctgaatgtgataaggaggatgaggaggaggagaatgaaggtgccaggttcctggaacatggtgaatataaggaaaatctgtatggaaccagcctggaggccattcaggctgttatggccaaaaacaaagtttgtttggtggatgtggagccagaagcactgaaacaactgaggacctcagaatttaaaccctatattatatttgtaaagcctgcaattcaggaaaaaagaaaaacgccacctatgtccccagcttgtgaggacacagcagccccatttgatgagcagcagcaagagatggccgcttctgccgccttcatagaccggcattacgggcacctggtagacgccgtgctggtgaaggaggatctccagggtgcctacagccagctcaaagtggtcttagagaagctgagcaaggacactcactggcctccgctggtgatacccaggcaaacagggtctggagtggacctccagcaaactccaacagacctgcagctgagggtcctgactgttagaaggaaaactaagaaacagaaaggacatccacaccaaaaccccacctgtacgtcaccatcatcaaagaccaaagtgggagaaagggtatcagtgattgaagatcaaatgaaggaaatgaagcgagaaaagaagtttagagaaaaaagagtaaaaagaaatgaacaaagcctccaagaaatatgggactatgtgaaaagaccaaacctacgtctgattggtgtacccgaaagtgatggggagaatggaaccaagttggaaaacactcttcaggatattatgcgggagaacttccccaatcgagcaaggcaggccaacattcaaattcaggaaatacagagaatgccacaaagatactcctcgagaagagcaaccccaagacacataattatcagattcaccaaagttgaaatgaaggagaaaatgttaagggcagccagagagaaaggttgggttacccacaaagggaagcccatcagactaacagcggatctcttggcagaaactctacaagccagaagagagtgggagccaatattcaacattcttaaaggaaagaattttcaacccagaatttcatatccagccaaactaaacttcataagtgaaggagaaataaaatcctttacagacaaacaaatgctaagagattttgtcatcaccaggcctgccttacaagagctcctgaaggaagcactaaacctggaaaggaacaactggtaccagccactgcaaaaacatgccaaattgtaa

SEQ ID NO: 117842 - DNA, 1911 bp, Homo sapiens
atggccggagcggcggcggcggtggccgcgggagcagcagctggagccgccgcggcagccgtgtcggtggcggctcccggccgggcctcggcgcctccgccgcccccgcccgtgtactgtgtgtgccggcagccgtacgacgtgaaccgcttcatgatcgagtgcgatatctgcaaggactggttccacggcagaagccagagtggtgcttttaacatctgtgttggagtagaagaacatcatgctgttgacattgacctgtatcactgtcccaactgtgcagttttacatggttcctccttgatgaaaaaaaggaggaactggcacagacatgactacacagaaattgatgatggttccaaaccagtgcaagctggaactagaactttcattaaggaattacgctctcgagtcttcccaagtgccgatgaaataattataaagatgcatggcagccagctgacacaaagatatctggagaaacatggatttgatgtccctattatggtcccaaaattagatgatctaggactcaggctcccttcacctacattttctgtgatggatgtggaacgttatgtaggtggtgacaaagtgatagatgtcattgatgtggcgaggcaggcagacagcaaaatgacacttcacaattatgttaaatacttcatgaatcctaacagaccaaaagtgttaaatgtgatcagccttgaattttcagatacaaagatgtctgaattggtggaggtccctgatatagccaaaaaactttcctgggtggaaaattattggccagatgattcagtctttcccaagccatttgttcagaaatattgcttaatgggagttcaagacagctatacagatttccacattgacttcggtggaacttcagtctggtaccatgtcctctggggtgagaagattttttatttaataaagccaacagatgaaaatttggcacgttatgaatcttggagttcatctgtgacccagagtgaggtgttctttggagataaggtggataaatgctacaaatgtgtggtaaagcagggacataccttatttgttcctacagggtggatccatgctgtgctcacttctcaggactgtatggcttttggggggaacttcctgcacaaccttaacattggcatgcagctcagaataagcagcacagagaaaaccttaaatgacctgatggagctgaaaaccatggcaaaagaactatgtgacgcatgcacaagcttcggtagccgatttgatcaagtggaagaaagggtatcagtgattgaagatcaaatgaatgaaatgaagcaagaagagaagtttagagaaaaaagagtaaaaagaaacaaacaaagcctccaagaaatatgggactatatgaaaagaccaaatgtacgtctgataggtgtacctgaaagtgacggggagaatggaaccaagttggaaaacactcttcaggatattatccaggagaacttccccaacctagcaaggcgggccaacattcaaattcaggaaatacagagaacgccacaaagatacttcttgagaagagcaactccaagacacgtaattgtcagattcaccaaagttgaaatgaaggaaaaaatgttaagggcagccagagagaaaggtcgggttacccacaaagggaagcccatcagactgacagcggatctctcggcagaaactctacaagccagaagagagtgggggccaatattcaacattcttgaagaaaacaattttcaacccagaatttcatatccagccaaactaagcttcataagtgaaggagaaataaaatcctttacagagaagcaaatgctgagagattttgtcaccaccaggcctgccttacaagagctcctgaaggaagcactaaacatggaaaggaacaactga

SEQ ID NO: 117843 - DNA, 1791 bp, Homo sapiens
atgaccggtgtgagcagaggctcagggctgccaattagcatggccgaaaatcgcaggcctctgcccgtttctgcaggctccaagcctgtgattcctatcttacagtctcctctccagatactgaataccactcactatttcttaaaatcacttctcacccccacttcttcctttgcacatgttatttcttctgcagaggatttggtacaacgtagaaatgtgattggcgatgtctattctcaggggcctgcctctccttttgaaataaacaatgggttaggcagtcccctgaagtatacagcttggaggaagcaagagatgggaccttggcaatggttgtggcagcaggactttcacttgtttcttggggctccactccagagatatgcagagccactaccagttggtacaatcagccctggatggggcagctgtgttgtggattcaagccaggagtccctgcccaatgacaagcatctgagggcagcaaaggaagtaccactgcagttacagtggcagaggagttttcagttgcctcttggagcttcacctcaaagaaatacaaggatcctgctaaccggaatgttcagctgggtgtggctgaatattcatccagggaccctgcttggtgaaaagctggggtcctggggcagcaagggcagaaccactgcaggagccatagcggagaggctgttggtttcttctgagagctccatccctgggaacccagagcaactaccaagaaacgcagagctgccactgactgaagtattcaggtgcgggcagtgtagttatgctgcaggcacacctcaaaaagccccctgcccagtgaggagtagcagggccagggacccatgcagaaagccatctgactgtttgttgggcacagacgaacaaaaagacagcagtaacctctgcagacttaaatgtccctgtctgacagctttgaagagagcagtgtttctcccagcacgcagctggagatctgagaacgggcagactgcctcctcaagtgggtccctgagccccgagcagcctaaatgggaggcaccccccagtaggggcagactgacacctcacacggccggaagcctcagaagccaatgcgatcaacgggaagaatgggtatcagcgatggaagatgaaatgaatgaaatgaagcgagaagggaagtttagagaaaaaagaataaaaagaaaagaacaaaccctccaagaaatatgggactatgtgaaaagaccaaatctatgtctgattggtgtacctgaaagtgatggggagaatggaaccaagttggaaaacactctgcaggatattatccaggagaactttcccaatctggcaaggcaggccaacattcagattcaggaaatacagagaacaccacaaagatactcctcgagaagagcaactccaagacacataattatcagattcaccaaagttgaaatgaaggaaaaaatgttaagggcagccagagagaaaggttgggttacccacaaagggaagcacatcagactaacagcggatctctcggcagaaactctacaagccagaagagagtggggatcaatattcaacattcttaaagaaaagaattttcaacccagaatctcatatccagccaaactaagcttcataagtgaaggagaaataaaatactttacagacaagcaaatgctgagagattttgccaccaccaggcctgccctaaaagagctcctgaaggaagcactaaacatggaaaggaacaaacggtaccagccactgcaaaaacatgccaaaatgtaa

SEQ ID NO: 117844 - DNA, 1360 bp, Homo sapiens
aacacttttggtgtcacaaacaggattcaaaaacaaaagtgtgccactttttagcaacaagggcagggcgggaggctcgaggacttcccatatccccggatggaaactcccccagttctctcccttggcaattgaatggtcaaggggaaccggactttgcacgcagctggagcgacgaggacggctttccgcttttggcgcggcctttgtctctagctgcagccggcgtttcaggtctcgtcttcactggtctgtgtcctattctcctggaggcccagcctctgtggccctgtgacctgcagttcttcagacaatcagtaaaaacaaacttctccaagctaaaggaggatgttcgaatccatcataaagaagctggaaaccttgaaaaaagattagatgaatggctaactataatagacagtgtagagaagaccttaaatgacctgatagagctgaaaaccatggcccaaaaactacgtgatgaatgcagaagcttgagtatccaatgtgatcaacaggaagaaaaagtatcagtgattgttaaaatgaatgaaatgaagcaagaagagaagtttagagataaaataataaaaagaaatgaacaaagcctccaagaaatatgggactatgtgaaaagaccaaatctacgtctgattggtgtacctgaaagtgatggggagaatagaaccaagttggaaaacactctgcaggatattatccaggagaacttccccaacctagcaaggcaggccgacattcaaattcaggaaatacagagaacgccacaaagatactcttcgagaagagcaactccaagacacataattgtcagattcaccaaagttgaaatgaaggaaaaaatgttaagggcagccagagagaaaggtcgggttacccacaaagggaagcccatcagactaacagtggatctctcggcagaaactctacaagctagaagagagtgggggccaatattcaacattcttttttttttttttttttttttttttgagacggagtctcgctctgtcgcccaggctggagtgcagtggcgggatctcagctcactgcaagctccgcctcccgggttcacgccattctcctgcctcagcctcccaagtagctgggactacaggcgcccgccactacgcccggctaattttttgtatttttagtagagacggggtttcaccgttttagccgggatggtctcgatctcctgacctcgtgatccgcccgcctcggcctcccaaagtgctgggattacaggcgtcacgaccgcgcccggcctcaacattcttaaagaaaagaattttcaagccagagtttcatatccagccaaactaagcttcataagtga

SEQ ID NO: 117845 - DNA, 3483 bp, Homo sapiens
atgcaggaacaacagcaagcctccagcctgatcaggagcggcaatgggcgcctccctggatcaggagcacagcggacaccctgccatatccggagggatggaagtcagcggcgggtctgcgatgactgcaaacagcagtggtggaaggcaaaatacaacataccatctggcttgcatgcttgcactgcgactctagaagaaacccatattttagactcgggggcacatgtgcaagttttttacaagggtcaactgcatgtcatgagagttccatgtacagattattttgacacccagaagaaccccaacttgtcacacttacatggatctgtcatggcggaaacagcggttatcaatcacaagaaacgtaaaaatagcccgcgaatcgtccagtcaaacgacctcactgaggcggcatatagtctctcccgggatcaaaaacgtatgctgtatctgttcgttgaccagatcagaaaatctgatggcaccctacaggaacatgacggtatctgcgagatccatgttgctaaatatgctgaaatattcggattgacctctgcggaagccagtaaggatatacggcaggcattgaagagtttcgcggggaaggaagtggttttttatcgccctgaagaggatgccggcgatgaaaaaggctatgaatcttttccttggtttatcaaacgtgcgcacagtccatccagagggctttacagtgtacatatcaacccatatctcattcccttctttatcgggttacagaaccggtttacgcagtttcggcttagtgaaacaaaagaaatcaccaatccgtatgccatgcgtttatacgaatccctgtgtcagtatcgtaagcccgatggctcaagcatcgtctctctgaaaatcgactgggacatagaaccgtaccccgctggcctaaaagagcagattaagtctgatgttttcttgttaagttcctgtgtggaagttctccccaatgctgaaattgggttcttaaaatgtctagctattattggattatgggctgtttctctcttcagctacaataattgctttatatgtacaccggcgttcggtcgaagagtatctggtgtcatagaaattgccgatgggagtcgccgtcgtaaagctgctgcacttaccgaaagtgattatcgtgttctggttggcgagctggatgatgagcagatggctgcattatccagattgggtaacgattatcgcccaacaagtgcttatgaacgtggtcagcgttatgcaagccgattgcagaatgaatttgctggaaatatttctgcgctggctgatgcggaaaatatttcacgtaagattattacccgctgtatcaacaccgccaaattgcctaaatcagttgttgctcttttttctcaccccggtgaactatctgcccggtcaggtgatgcacttcaaaaagcctttacagataaagaggaattacttaagcagcaggcatctaaccttcatgagcagaaaaaagctggggccataaacacacaactggttgaaaccctgctctctgactctagaagaatccccgacttcatgtctaaaacaccaaaagcaatggtaacaaaagctaaaattgacaaatgggatctaattaaactaaagagcttctgcacagcaaaagaaactaccatcagagtgaacaggcaacctacagaatgggagaaaattttcgcaacctactcgtctgacaaagggctaatatccagaatctacaaagaactcaaacaaagttacaggaaaaaaacaaccctgtcaacaagtggtggccatgagaagtggagacgaaatctgaaactcaatgttgctctgctgatatggttttgctgtgaccccacccaaatttcatttttaattgtagctgccaaaattcccatgtcatgtgagggatctggtgggagaagaaaccccatgataaccaggcaaacaggatctggagtggacctccagcaaactccagcagacctgcagaagagggactttactggtagaaggaaaactaacaaacagaaaggaatagcaccaacatcaacaaaaattacgtccacatggaaacctcatccaaaggattgcaactcctcaccagcaagggaacaaaactggatggagaatgagtttgacaaattgacagaagtaggcttcagaaggtggacaataacaaactcctccaagctaaaggagcgtgttctaacccaatgcaaggaagcaacgaaccttgcaaaaaggttagagaaattgctaactagaataaccagtttagaaaagaacaaaaatgacctgatggagctgaaaaacacagcacaagaacttcgtgaagcatacaccagtatcagcggccgaatcaatcaagcagaacaaaggacatcagagattgaagatcaacttaatgaaataaagcgcagaggcgtctccgtgtgtccacaaccatcagaagacaccccgaggagtactgccagggtcccaaaggggatggtccccttccggccccgggtccccttggtcactccacccagagagaaaaaagaagctccttggcttgcatgccttcgcactagggctctaaggatcctcatagaccctccgagccaggtgtgggatatagtctcgtgtgatgcggagaatgaaaccaagttggaaaacactctgcaggatattatccaggagaacttccccaatctagcaaggcaggccaacattcaaattcggggaaattacagagaacgcccacaaaggttgcctcctcgagaacagcaactccaagcacacctaattgtcagattcaccaaagttgaaatgaagggaaaaaatattaagggcagcccagagagaaaggtcggggttacctacccacaaaggggaagcccttcagactaacaacagctgatctctcagcagaaacttctacaagccagaagacagagtgggggccaatattcaacattctctaaagaaaagaattttccaacccagaatttccatatccagccaaacctaagcttcataagtgaaggagaaataaaatactttacagacaagccaaatgctgagagatttttgtcaccaccagggcctgcccttaaaagagctcctgaaggaagaagcacttaaacatgggaaagggaaccacccggtacccagccacttgcaaaaattcattgcttaaatttgttaaaggccatttgagggcttggggaggaaacttgcatcaacttaatgggccaaaattaccagctaacattcttaattgacaggatccaaattcacacataacaatattaactttaaatgtaaatggggctaaatgctcccatttaaaagacacagactgggcaaattggataaagagtcaagacccatcagtgtgctgtatttaggagacccatctcatgtgcagagacacatataggctcaaaataaagggatggaggagatcacaagcaatggaagacaaaa

SEQ ID NO: 117846 - DNA, 888 bp, Homo sapiens
atggcccggcctctcccttgggaaaccaaccctaggcttcccttaggaggcccctgcctgcctttagaaggctctcagccccctggccccaacaacaatctcttcagtggactgtggattccgggcctccacaggcatcacgttgctcccccggaccggtgctgcccacggtgctgctggatgagatcgaggcggccgagctggagtgttaacgatgacagcatcgagggcgtgctgtgcggggccgtgaagcagctgaaggtacctaaggcagtaaacccccaactccctggaagggcccactgggcgctcacttcgctccagagcctcgcctggtttccgcttcgggatccggtcacccaacccagctctccagtcgctgctgtttctccctgggggtggaaccgggactggcccccgctctttgaagccaaagggtctgagctcttccccggtagaccaggcgaaaaagcaaagccacagcgccaacggccaccaaacccaacgcaggacacaacacaacaaaaaaggcccggccaggacaagggcccacgccagaaatccccgcccttggaagcccgagggaagtggatcccgaggttgcccatcctggtgcgttcctctctcaacctgagcggaggcgatgtgtacttggttcctccttccctcctggttaccaacagagaagagttgatcccctccctgttttcagttgaaaagcagcagaacagtaaggacatcaacgggggaataaatgcctttaactgtgtgcctagaatcgcccctgcccctctgcgccattttcccaacgaccattctcaaggctccgtgactccctgggagtcgctctggcagctatcgcaccagccccagcaggggatcctctag

SEQ ID NO: 117847 - DNA, 829 bp, Homo sapiens
cggcacgagggccgggtggcggcggcggcgctccggtcgcgatgggccagaggtgacgccgcagccgccgggagccgcgagggacggggcaggatgaaccgggccaagcccaccacggtgcgccggcccagcgccgcggccaaaccctcagggcaccctcccccaggagacttcattgctctgggctcaaagggtcaggccaatgaatcgaaaacggcgtccaccctgctgacaccagccccttccggcctgccttctgagcgcaagcgggatgcggcggctgcgttgtccagtgcctcggccctcaccggtctcaccaaacgccccatactctcctccacaccccctctgagtgccctggggcgcctggctgaggctgcagtggcagaaaaacgagccatttctccgtcgattaaagagccatctgtggtgccaattgaagtgctgcccacggtgctgctggatgagatcgaggcggccgagctggagggcaacgatgacaggatcgagggcgtgctgtgcggggccgtgaagcagctgaaggtcacccgcgccaagcctgacagcaccctctacctgagcctcatgtacctggccaagatcaagcccaacatcttcgccactgagggcgtcattgaggctctgtgtagcctcctgcggcgggacgcctccatcaacttcaaggccaaggggaacagcctggtgtctgtgctggcctgtaacctcctcatggccgcctacgaggaggacgagaactggcccgagatctttgtcaaggtgtacatcgaggactccctgggggagcggatctgggtggacagccctcact

SEQ ID NO: 117848 - DNA, 576 bp, Homo sapiens
ttatgatggcagcagcggaggtctggaccagctgctgccatgctgactgcagtgtggcaggcacagccagggctgcattctccgtggatccgacaagagccaggaacaggtgagaactccgtccccttccaacttggacgggtgggatccctgccctccaaggcacagctgctgccactcagctgcccggtgctttttcaaggcccacccatggccacccatggaccaatcagcatgtacttcctcccttctgaagcccatagaaacgccagactcagttagacttgagtagacatagggataaccttcctgcggagaggatctacccactgggggtttcctctttgctgagagctgtacactcagacaggatgacttgccactactcgccatgttgcgggaaacaagaaagagagcagaactgcagctcttctgggagcccagacctagtggttccctgcatgagggctgtgacaccttctttggcatctccaagcttctgcgtgacactgcattcgccttgtccagacgcagttgcccaaagcagcagttgcccaaagcagcagccacgtgcat

SEQ ID NO: 117849 - DNA, 2052 bp, Homo sapiens
atgggtgcccatcttgatgggtcagacaagagtggcaacttaggtttggagcccaacttcatgttcagctcagccagcatctacaaatggatttctcaggaccacgacagcactttaggctgttgtaggacttcatttcctgcttgtggtagattgcaaatagccccaattcttcacacctctcttactacaccctttgccatggtgtgccctcctgagtcacaacagcttggccatgggacttggtttggccattgggatgttcatggagccaacagaggcttgcatggggcccgtgtgttaagctttcatctctggagccccttctcctgctatgagaaggacatacctggctggcctgctggaggaaaagagacttggggagtagagccacagaaaccattggacttcaaccagaagttcattggagcaaaagaacccaacaaaacaagcatcaggaattctttagatgccttctttgaaaccagaaattgccacagttcttcgctttctggttttctacacaccccagttgccaacagctatagccctaactccaagcaggaagtgaccgctggaaagcagctgaacaaagcaaagcaacttggtcaacactgcatcccccatgagctggctctcatctctgaggttctcataaaaaaggtcccacctcccctgtccagtcccagcttattcacagtcccagtgaatgctggactcagggaaagggaatatgaaccaagcatatttgacttggatttgccactaacaaacaagagtcctgagtgctctgcgaacaaaggcctgctcccttggttctaccacggaaacccctacgaacataaaataaatttgtaccgccaggtccctggtgttcagagcagaccggactccaggccgtgctgcgccgcggagcgaggagggagccgggcttcggcggtgcccgcgatgggcgctagggggcccccgcggagcttggaaggcggctttgctgtaaatcccagccctctgcgctttcttccggttccacaggatttggctctgttgggaagaacacagagcatgcgggctgggggccaatgcacgtgtgctcggcagcaagggtggtgggaaaatcagccaggaattcccttccttctcttgatccacaaacccaaaatccacctgtccacctactcgctgcctcctcaaccaaggcctctggaaacccccaaccccctactgccttcagaaaagctgcagctgatcccagcacatgactcacacagcatctacctgtcacattccaagtgcctcgctgtgtcgtgggcatcaagtggcaaaatgaacaaagatcgaatgtcaggaggccctatccagggtcacatgcttggccgcacttcccctttcaagagctggtgggagaaagattttgagcagggtcaccgaagacagatacccatcaccaaggagctccataagcacatttcacccatccccagctccgttccccaagaaaacaaccacattccagccgttagcaggcagtctggaaagaggggtgccaggacacagagcatcaacagcccggagtgcgcgtccaggcaggaggacgaggcacacgcagagctctcgctgcaggacgaatttcagagcacccagaaaggccctgaagctcccacacgcagggaacttggcgcatccctcatctgccgcgtgtgcagctccccacctcctcccaattcccccccacaaacagttatatcttttggcgcaaatgtgcagctttatggaggagaggggaacaaagaggcaagcttcacctgcttagcctcgtccatcccccaagctgcctccacggctggtcatggcgttgtggtcatctccggagtcctcatgcgtgggagtctgctggatttctcagtttgccgacactccagaagtgtgtttgacatcctcgtaaattcattcttccttcctgttctgttcgagatccctccaaagtcaggagacactggtgatgtggctgcatctttctctgcctctgtgcagccaggtacagaggacaaatga

SEQ ID NO: 117850 - DNA, 1320 bp, Homo sapiens
atgctctctccattgtcagaagaggttgatcatcaccagccctgtgcgagggaacaggaagctgaacctgaggagcccccctcaggaagtaacactcctcagatgtgcgacattgtgctgagggccaccgctctcatctccgtgcatataggaaaactcttcaaggtggagcatggtgcctgggtcattgaaggggcccaggatgtggttgttgaacaggtgaatggagtaccaaaagcctggttctgtgccattagattacctgagtacacgggagggtcatcagtgcgggtgaaggatgaaggaaagacaggtctgaatctgcaagaggagccatcttgtgccacctcagaatcacctccttgttgtgggaaggaagagaagaaggaaggtgactgcagacaaaccttaggaaccctctctcttggtacaagttcaagaattgtcagggaaatggacaaacgaactgtgaaggatatttctccatctgctggtgagcatggtgactgtactactcacagcactgctgccacatcaggattatctctgcaatctgacacctgcctggcagtggttaatgacgtgcctctaccccctggcaaaggtcttgaccttgggttgctggagactcagctgctggcctcccaggattcagtctcaacagatcccaaaccatacatcttctcagatgctcaaaggccttcttcctttgggtccaaaggaacttttccccaccatgacattgctacctctgtggctgccgtttgtatttctctgccagtgagaacagatcacatagcccaggaaattcacagtgctgaaccacgagaccacagccagactgcagggaggactctgacatcaagctccccagacagcaaagtcacagaagagggcagagcacagaccctcttgccagggagaccttcatctggacaaagaatttcagattcggttccactggagtcaactgaaaaaactcatcttgaaataccagcttcaggaccaagttcagctagttcacaccacaaggaagggagacacaagacgttttttccttccagaggccagtatgggtgtggggaaatgactgtcccctgcccctctttaggaagtgacggtaggaaacgtcaggtatctggattaatcactcggaaagattctgtggttccttctaagccagagcagcccatagaaattcctgaagccccttctaaatccctcaagaagaggagtctggaaggaatgagaaagcaaactcgagtagagttcagtgacaccagcagcgacgatgaagaccgattagttatagaaatatga

SEQ ID NO: 117851 - DNA, 4848 bp, Homo sapiens
gggaattgggaggaggtggggagctgcacacgcgttagatgagggatgcgccaagttccctgcgtgtgggagcctggggatggcaacagggtgagggcttggcattcagtccaggtgaccaaggggctgtcccggacccttccctcgctcaaagaggaaggtgttagtcagctgtcatcttgccagcagggatcagctgttactcaaaggcgtcaatttcgcagtgatcacagaacaggctgcagagagcacaaaatgatcatcgtggcagagcagggcctggccccccccactgtgttcctgaaggccctgcccatcccactgtaccacacggtgcctcccgggggcctccagccccgcgccccgctagtgacgggcagcctagatgggggcaacgtgcccttcatactcagccctgtgctgcagcctgaagggcctggccccacccaggtggggaagccggcggcccctacgctgacggtgaacatcgtgggcactctgcctgtcctgtcgccgggcctgggccccacgctgggcagcccaggcaaggtgcggaatgcgggcaagtacctgtgtccgcactgtggtcgcgactgcctgaagcccagtgttctagagaagcacatccggtcccacacgggtgagaggcccttcccgtgtgccacctgcggcatcgcctttaagacccagagcaatctctacaagcacaggcggacgcagacgcacctcaacaactcccggctgtcctcagagtccgagggcgccgggggcggcctcctggaggaaggggacaaggccggagagccccccagaccagagggcaggggcgagagcaggtgccaggggatgcacgaaggcgcctcggagagacccctttctccgggtgcccacgtgcccctacttgccaagaacctggatgtgaggaccgaagctgctccctgtccagggtccgcatttgccgacagagaggctccttgggactctgcccccatggcgtcacctgggctcccagcggccagcacacaaccctggcgtaagttgccagagcagaagtcgccgaccgccgggaagccgtgcgccctgcagcggcagcaggcgacggcagcggagaagccctgggatgccaaggcccccgagggccggctgcggaagtgtgagagcaccgactcggggtacctgtcgcgctccgacagcgcggagcagccgcatgcgccctgcagccccctgcacagcctttcggagcacagcgccgagtccgagggggagggcggcccgggcccggggccaggggtcgcaggggccgagcccggggcgcgagaagccggcctggagctggagaagaagcggctggaggagcgcatcgcccagctcatctcccacaaccaggcggtggtggacgatgcccagctggacaacgtgcggccccggaagaccgggctgtccaaacagggcagcatcgacctgcccacgccctacacctacaaggactccttccactttgacatccgcgcgctggagccaggccgtaggagggccccgggccccgtgcgctccacctggacgcccccagacaagtctcggcccctcttcttccactccgtccccactcagctctccaccaccgtggaatgtgtccccgtcaccaggagcaactcgctgcccttcgtcgagggctccaggacgtggctggagcccagggagccccgggacccctggtccaggacgcagaagcctctgagccccaggcccggcccagcccgcctgggctgccgctcgggactaagctcgactgacgttcccagtgggcatccccgggccctggtcagacaggccgcggtggaggacctgccaggcacccccattggcgatgccctggtgcccgcagaggacacagacgcaaagagaactgctgcgcgggaggccatggccggcaagggcagagcgggcggcaggaagtgcggccagagaaggctgaagatgttctcccaggagaagtggcaggtgtacggggatgagacgttcaaaaggatctaccagaaaatgaaagccagtccccatggaggcaagaaagccagggaggtgggaatgggcagtggggcagaactgggctttcctctgcagaaagaggcagcagggagctcaggcacagtccccacccaagacaggaggacccctgtccatgaggacatatccgcaggggcaacgccagagccttggggaaatccaccagccctggaggcctccttggtgactgaacccactaagcatggggagacggtggccaggagaggagacagtgaccgacccagggtggaagaggctgtgtcatcccctgcactgggtggcagagacagtccctgttcaggcagtaggagccccctggtctctccaaatgggaggctggaactggggtggcagatgcccccagcacctggccccctcaaagggggtgatgtagaggctcccaggccagtttggccggaccccaagctggaaggaggtgcccgaggtgtgggggatgttcaggagacctgcctgtgggcccagactgtcctgagatggcccagcaggggctcaggggaggacaagctcccctcagagaggaagaagctgaaagtggaggacctgcacagctggaagcaaccagagcctgtgagcgcagagaccccaggtgggcccacgcagcctgcctctttgtcatcccagaagcaggatgccgatcccggggaggtgccagggggctcaaaggagagtgccaggcaggtgggcgagcctctggagtcctctggagcctccttggctgctgcttctgttgccctgaagagggtggggccaagggacaaggctaccccactgcatcctgcagccccagcccccgcagagcacccctcgctggccaccccacctcaggctcctagagtgctctctgccctggcagataatgccttttcccccaagtacctcctcaggttacctcaggcagagacccccttaccactgcccattccctggggaccaaggcacagccaggactctctctgcagcagtgggtggcctgaagaacgggcatcatttgttgggtcaggactggggacccctctttctcccagcccagcctcaggcccctccccaggtgaggcggacagcatcctggaggaccccagctgttccaggccacaggatgggagaaaaggggcacagttggggggggacaagggggacaggatggccactagcaggccagcagccagggagttgcccatctcagcaccaggggctcccagggaggctacctcctccccgcccactccaacgtgtgaggcacacttagttcaggacatggagggtgacagccaccgtatccatcgcctctgcatgggcagcactttggcaagggccaggctctctggggatgtcctgaatccctgggtacccaactgggagctgggggagcctcctgggaatgccccagaagatccttcttcagggcccctggtgggccccgacccgtgttcccccctccagcctggctccttcctcactgccctcactcggcctcagggtgtgcccccaggctggccagagctggccttgtcttcccactcagggacgtcccggagccacagcacccgcagtccccacagcacccaaaacccctttccctcactgaaggctgagccgcggctcacgtggtgttgcctgagccgcagtgtccctctgcccgcggagcagaaggcaaaggcggcatctgtgtacttggcggtgcactttcctggtagcagcctccgagatgagggtcccaatggccctcctgggagcaatggaggatggacctggacaagccctggagaaggagggccggcgcagatgtccaagttctcctacccaacagtcccaggggtgatgccccagcaccaggtgtctgagccagaatggaagaaaggcctgccttggagggcaaagatgtctcgtgggaacagcaagcagagaaaactgaagatcaaccctaaaaggtacaaagggaatttcttgcagagctgtgttcagctgagagccagtagacttcgcacaccaacctgggtgcgaagaagaagccgccaccctcccgcacttgagggactgaagccatgcaggacccctgggcagacctcttcagaaatagcagcgaaattgcccattgggctgtgcttgatactgccacgccccatggagggcatctcagggctaaatgctggtctgtaccaccaggacaagaggatgtctcccccatgcaaaggccaggggaccatgcaactctctgctttctcgttgggccgtcctgtgacaggcacaggtgccatcgatatcacctctgtgctctccagagcttggatggaacccctgctgagacgctggcagagagctggtagcccccgctacctgggaggttctgatggtcactggtggaatccaacagaatcagccagagctctgccagttgcccccatggaggagcttaccaccagctctcttcccagcaccttaaggacagccaaatggagctgctcctggaactccccgtcagcctccctgcttagctccccaggcactggactcggcactgtgacagggaggggaactaaggtgacccctggtctcgataaatgtgctcagatgccaccgggaacgacattggcagatctgtttgcttccccgggacatctcgtgtctgtctgtctaggatgtcgacggtctgtcagtgtgagattcaaggtgcagcaatgccttgcagactccagcatggatgaccaagtatcatcatatgctcagcattataaacacatgtgcatgacagttagcacatactga

SEQ ID NO: 117852 - DNA, 1284 bp, Homo sapiens
ttaagtcacttgctcctcaacacaaccttccagggtaagtgctattttcattcccatttcatagatgaggaaataaaggcacaaacgtttaaggagcttgcccaaggctacgtcactaagagtagcagagctggcgttgagacccagctgcttgtcctcagggtctgtgtccccaccaccacaccatggttcacgcagagaacccagaacagtgctggccgcaggaggctctaggccaacgtgagcagctggacgtccttctgtgatgaaggtgatatcaccccattctccgatggtcagttcacttcctaccgaaagcactggcatagctctttgaaatccatgtacagggctttggaaatagccactcataatctgaacatttcttcgattgcctgagtgttcgttccaccttgcatgtaactgccacaactggaatctgagtaagtcacctggaggcccaaaaataaccctcctggacctgctgacaccagtgtcagtgtgcactgcccatgttcccccatcattctgaagcagatggattgatagaatagtggaatggccttttgaagtcacaattacagtgcccaccaggtggcaatattttgtagggatagggcaaagttctccaggaatctgtatatgctcagaatcggcatctaatatatggtactgtttctcccatatccaggactcataggcccctttgttcgcagagcactcaggactcttgtttgttagtggcaaatccaagtcaaatatgcttggttcatattccctttccctgagtccagcattcactgggactgtgaataagctgggactggacaggggaggtgggaccttttttatgagaacctcagagatgagagccagctcatgggggatgcagtgttgaccaagttgtttgtcaggtaatgtgtcgatttcagacaaagaagaatcagacctgattcctgtcctcaaggacccttcggcctgaggtgtcgatgcatccttcatctcccatccagtgaccttgatcacctttgctttgttcagctgctttccagcggtcacttcctgcttggagttagggctatagctgttggcaactggggtgtgtagaaaaccagaaagcgaagaactgtggcaatttctggtttcaaagaaggcatctaaagaattcctgatgcttgttttgttgggttcttttgctccaatgaacttctggttgaagtccaatggtttctgtggcaaagagcctctcagcactgtgctgcccagcagggctgtatgcaacat

SEQ ID NO: 117853 - DNA, 1881 bp, Homo sapiens
tcaagaccctggggatctggtaatggcagtggcagtggcagaacaatcttcttggttttgggctatgcacactggtgttggcaatagcttctgtgggcttgatgggcctatctccaggcccgctgatgttgcgtgcatgtaagtgtcagggtgctttttcaaggcccacccatggccacccatggaccaatcagcatgtacttcctcccttctgaagcccatagaaacgccagactcagttagacttgagtagacatagggataaccttcctgcggagaggatctacccactgggggtttcctctttgctgagagctgtacactcagacaggatgacttgccactactcgccatgttgcgggaaacaagaaagagagcagaactgcagctcttctgggagcccagacctagtggttccctgcatgagggctgtgacaccttctttggcatctccaagcttctgcgtgacactgcattcgccttgtccagacgcagttgcccaaagcagcagttgcccaaagcagcagccacgtgcatctggtccagctggcacaggtgccagctcccagggctccttgcccctctgctctgaacaccagggacctggcggtacaaatttattttatgttcgtaggggtttccgtggtagaaccaagggagcaggcctcccgtgtactcaggtaatctaatggcacagaaccaggcttttggtactccattcacctgttcaacaaccacatcctgggccccttcaatgacccaggcaccatgctccaccttgaagagtcctttgttcgcagagcactcaggactcttgtttgttagtggcaaatccaagtcaaatatgcttggttcatattccctttccctgagtccagcattcactgggactgtgaataagctgggactggacaggggaggtgggaccttttttatgagaacctcagagatgagagccagctcatgggggatgcagtgttgaccaagttgtttgtcaggtaatgtgtcgatttcagacaaagaagaatcagacctgattcctgtcttcaaggacccttcggcctgaggtgtcgatgcatccttcatctcccatccagtgaccttgatcacctttgctttgttcagctgctttccagcggtcacttcctgcttggagttagggctatagctcgagcacccggccacagtcattttctgcttctcttgggagacttttgacccacaggggttctgcttttctctgccaaaagtatctggtacctgcctcatctctctgctgctgcatgcgtttcctttcgttgtaacctctgccccctgcccccaggagtttccccactcaccccacttatgtttccatgttcccccatcattctgaagcagatggattgatagaatagtggaatggccttttgaagtcacaattacagtgcccaccaggtggcaatattttgtagggatagggcaaagttctccaggaatctgtatatgctcagaatcggcatctaatatatggtactgtttctcccatatccaggactcataggccaccaggtcacacatggacagcctgtgaagacgactctttatagagtccatcaatgggaagttgggggatagccctggtgttacccccgcttgtacctgctcctctctggttgaagcctgaccctcccacttgccttcctcctccgcacccatccgcttctcactacagtccagcgaagggcagagcttcctttcacatcctggatttgtttcctgagcctctttgagcgagggaagggtccgggacagcccttggtcacctggactgaatgccaagccctcaccctgttgccatccccaggctcccacacgcagggaacttggcgcatccctcat

SEQ ID NO: 117854 - DNA, 1324 bp, Homo sapiens
cccaggcaaggtgcggaatgcgggcaagtacctgtgtccgcactgtggtcgcgactgcctgaagcccagtgttctagagaagcacatccggtcccacacggagtccgagggcgccgggggcggcctcctggaggaaggggacaaggccggagagccccccagaccagagggcaggggcgagagcaggtgccaggggatgcacgaaggcgcctcggagagacccctttctccgggtgcccacgtgcccctacttgccaagaacctggatgtgaggaccgaagctgctccctgtccagggtccgcatttgccgacagagaggctccttgggactctgcccccatggcgtcacctgggctcccagcggccagcacacaaccctggcgtaagttgccagagcagaagtcgccgaccgccgggaagccgtgcgccctgcagcggcagcaggcgacggcagccgagaagccctgggatgccaaggcccccgagggccggctgcggaagtgtgagagcaccgactcggggtacctgtcgcgctccgacagcgcggagcagccgcatgcgccctgcagccccctgcacagcctttcggagcacagcgccgagtccgagggggagggcggcccgggcccggggccaggggtcgcaggggccgagcccggggcgcgagaagccggcctggagctggagaagaagcggctggaggagcgcatcgcccagctcatctcccacaaccaggcggtggtggacgatgcccagctggacaacgtgcggccccggaagaccgggctgtccaaacagggcagcatcgacctgcccacgccctacacctacaaggactccttccactttgacatccgcgcgctggagccaggccgtaggagggccccgggccccgtgcgctccacctggacgcccccagacaagtctcggcccctcttcttccactccgtccccactcagctctccaccaccgtggaatgtgtccccgtcaccaggagcaactcgctgcccttcgtcgagggctccaggacgtggctggagcccagggagccccgggacccctggtccaggacgcagaagcctctgagccccaggcccggcccagcccgcctgggctgccgctcgggactaagctcgactgacgttcccagtgggcatccccgggccctggtcagacaggccgcggtggaggacctgccaggcacccccattggcgatgccctggtgcccgcagaggacacagacgcaaagagaactgctgcgcgggaggccatggccggcaagggcagagcggcggcaggaagtgcggccagagaaggctga

SEQ ID NO: 117855 - DNA, 1263 bp, Homo sapiens
atgacaaccaatccaacaactctgcaaagacaggaagaaccaaggaatgaaactctcatgaaagcatgtgcagcaagactcttcaaggtggagcatggtgcctgggtcattgaaggggcccaggatgtggttgttgaacaggtgaatggagtaccaaaagcctggttctgtgccattagattacctgagtacacgggaggggcaacagaagcagcagccaaggaggctccagaggactccagaggctcgcccacctgcctggcactctcctttgagccccctggcacctccccgggatcggcatcctgcttctgggatgacaaagaggcaggctgcagaaggcataaagagaagcagaggcagagatgggacgagcagggagaatgctcctgcctcatcggagccaccggttttcgggagagagcggcagcccccacctgcctgtggactgagcacttaaagagccaaatcctgtggaactggacccggagagaacaggaaggagtcaacaagatcttaagcctgctccagaccccttgcctgacttttgagaaggctcaggaaacaaatccaggatgtgaaaggaagctctgcccttcgctggactgtagtgagaagcggatgggtgcggaggaggaaggcaagtgggagggtcaggcttcaaccagagaggagcagtacagccttcctgatcttcctaaaattgcacaggatgagaaggattttctgtttcctaagcaagtcggctccattggggtgggggcaggctccctcagggtccagatcacctttgtcagcttcacaaagtcatggtatcaagggcctgtgttctctccaggtctgtgtagctctgtgttgggtgggccattgccaggcccctgtgtggaacccacagccagatctgagggggactgtgaagagactgtggctggccctggcgaggagactgtggctggccctggcgaggggactgtggccccgacagcactgcagggtccaagccctggaagccctgggcaggagcaggcggccgagggggcccctgagcaccaccgatccaggcgctgcacgtgcttcacctacaaggacaaggagtgtgtctactattgccacctggacatcatttggatcaacactcccgagtctcttctgcaggtcaggggtgtgacccacatcccccctgagggcctggcccaagagaaactcaatcctgagtttgatcctgtggaaggaggagccctccctctgaatgaagtgaactga

SEQ ID NO: 117856 - DNA, 5592 bp, Homo sapiens
atggccccaagatccctgagaatggaagatgccatagaatccttagcagtggtgagctctgagtatgtaggagctggtgtgaactggatgtttcttccccccagctccaaatctacatgtaaaatcctcactccccatgtgatggtattaggagagcagggcctggccccccccactgtgttcctgaaggccctgcccatcccactgtaccacacggtgcctcccgggggcctccagccccgcgccccgctagtgacgggcagcctagatgggggcaacgtgcccttcatactcagccctgtgctgcagcctgaagggcctggccccacccaggtggggaagccggcggcccctacgctgacggtgaacatcgtgggcactctgcctgtcctgtcgccgggcctgggccccacgctgggcagcccaggcaaggtgcggaatgcgggcaagtacctgtgtccgcactgtggtcgcgactgcctgaagcccagtgttctagagaagcacatccggtcccacacgggtgagaggcccttcccgtgtgccacctgcggcatcgcctttaagacccagagcaatctctacaagcacaggcggacgcagacgcacctcaacaactcccggctgtcctcagagtccgagggcgccgggggcggcctcctggaggaaggggacaaggccggagagccccccagaccagagggcaggggcgagagcaggtgccaggggatgcacgaaggcgcctcggagagacccctttctccgggtgcccacgtgcccctacttgccaagaacctggatgtgaggaccgaagctgctccctgtccagggtccgcatttgccgacagagaggctccttgggactctgcccccatggcgtcacctgggctcccagcggccagcacacaaccctggcgtaagttgccagagcagaagtcgccgaccgccgggaagccgtgcgccctgcagcggcagcaggcgacggcagccgagaagccctgggatgccaaggcccccgagggccggctgcggaagtgtgagagcaccgactcggggtacctgtcgcgctccgacagcgcggagcagccgcatgcgccctgcagccccctgcacagcctttcggagcacagcgccgagtccgagggggagggcggcccgggcccggggccaggggtcgcaggggccgagcccggggcgcgagaagccggcctggagctggagaagaagcggctggaggagcgcatcgcccagctcatctcccacaaccaggcggtggtggacgatgcccagctggacaacgtgcggccccggaagaccgggctgtccaaacagggcagcatcgacctgcccacgccctacacctacaaggactccttccactttgacatccgcgcgctggagccaggccgtaggagggccccgggccccgtgcgctccacctggacgcccccagacaagtctcggcccctcttcttccactccgtccccactcagctctccaccaccgtggaatgtgtccccgtcaccaggagcaactcgctgcccttcgtcgagggctccaggacgtggctggagcccagggagccccgggacccctggtccaggacgcagaagcctctgagccccaggcccggcccagcccgcctgggctgccgctcgggactaagctcgactgacgttcccagtgggcatccccgggccctggtcagacaggccgcggtggaggacctgccaggcacccccattggcgatgccctggtgcccgcagaggacacagacgcaaagagaactgctgcgcgggaggccatggccggcaagggcagagcgggcggcaggaagtgcggccagagaaggctgaagatgttctcccaggagaagtggcaggtgtacggggatgagacgttcaaaaggatctaccagaaaatgaaagccagtccccatggaggcaagaaagccagggaggtgggaatgggcagtggggcagaactgggctttcctctgcagaaagaggcagcagggagctcaggcacagtccccacccaagacaggaggacccctgtccatgaggacatatccgcaggggcaacgccagagccttggggaaatccaccagccctggaggcctccttggtgactgaacccactaagcatggggagacggtggccaggagaggagacagtgaccgacccagggtggaagaggctgtgtcatcccctgcactgggtggcagagacagtccctgttcaggcagtaggagccccctggtctctccaaatgggaggctggaactggggtggcagatgcccccagcacctggccccctcaaagggggtgatgtagaggcccccaggccagtttggccggaccccaagctggaaggaggtgcccgaggtgtgggggatgttcaggagacctgcctgtgggcccagactgtcctgagatggcccagcaggggctcaggggaggacaagctcccctcagagaggaagaagctgaaagtggaggacctgcacagctggaagcaaccagagcctgtgagcgcagagaccccacgtggggcccacgcagcctgcctctttgtcatcccagaagcaggatgccgatcccggggaggtgccagggggctcaaaggagagtgccaggcaggtgaggcggacagcatcctggaggaccccagctgttccaggccacaggatgggagaaaaggggcacagttggggggggacaagggggacaggatggccactagcaggccagcagccagggagttgcccatctcagcaccaggggctcccagggaggctacctcctccccgcccactccaacgtgtgaggcacacttagttcaggacatggagggtgacagccaccgtatccatcgcctctgcatgggcagcactttggcaagggccaggctctctggggatgtcctgaatccctgggtacccaactgggagctgggggagcctcctgggaatgccccagaagatccttcttcagggcccctggtgggccccgacccgtgttcccccctccagcctggctccttcctcactgccctcactcggcctcagggtgtgcccccaggctggccagagctggccttgtcttcccactcagggacgtcccggagccacagcacccgcagtccccacagcacccaaaacccctttccctcactgaaggctgagccgcggctcacgtggtgttgcctgagccgcagtgtccctctgcccgcggagcagaaggcaaaggcggcatctgtgtacttggcggtgcactttcctggtagcagcctccgagatgagggtcccaatggccctcctgggagcaatggaggatggacctggacaagccctggagaaggagggccggcgcagatgtccaagttctcctacccaacagtcccaggggtgatgccccagcaccaggtgtctgagccagaatggaagaaaggcctgccttggagggcaaagatgtctcgtgggaacagcaagcagagaaaactgaagatcaaccctaaaaggtacaaagggaatttcttgcagagctgtgttcagctgagagccagtagacttcgcacaccaacctgggtgcgaagaagaagccgccaccctcccgcacttgagggactgaagccatgcaggacccctgggcagacctcttcagaaatagcagcgaaattgcccattgggctgtgcttgatactgccacgccccatggagggcatctcagggctaaatgctggtctgtaccaccaggacaagaggatgtctcccccatgcaaaggccaggggaccatgcaactctctgctttctcgttgggccgtcctgtgacaggcacaggtgccatcgatatcacctctgtgctctccagagcttggatggaacccctgctgagacgctggcagagagctggtagcccccgctacctgggaggttctgatggtcactggtggaatccaacagaatcagccagagctctgccagttgcccccatggaggagcttaccaccagctgtcttcccagcaccttaaggacagccaaatggagctgctcctggaactccccgtcagcctccctgcttagctccccaggcactggactcggcactgtgacagggaggggaactaagaagcacatccggtcccacacgggtgagaggcccttcccgtgtgccacctgcggcatcgcctttaagacccagagcaatctctacaagcacaggcggacgcagacgcacctcaacaactcccggctgtcctcagagtccgagggcgccgggggcggcctcctggaggaaggggacaaggccggagagccccccagaccagagggcaggggcgagagcaggtgccaggggatgcacgaaggcgcctcggagagacccctttctccgggtgcccacgtgcccctacttgccaagaacctggatgtgaggaccgaagctgctccctgtccagggtccgcatttgccgacagagaggctccttgggactctgcccccatggcgtcacctgggctcccagcggccagcacacaaccctggcgtaagttgccagagcagaagtcgccgaccgccgggaagccgtgcgccctgcagcggcagcaggcgacggcagcggagaagccctgggatgccaaggcccccgagggccggctgcggaagtgtgagagcaccgactcggggtacctgtcgcgctccgacagcgcggagcagccgcatgcgccctgcagccccctgcacagcctttcggagcacagcgccgagtccgagggggagggcggcccgggcccggggccaggggtcgcaggggccgagcccggggcgcgagaagccggcctggagctggagaagaagcggctggaggagcgcatcgcccagctcatctcccacaaccaggcggtggtggacgatgcccagctggacaacgtgcggccccggaagaccgggctgtccaaacagggcagcatcgacctgcccacgccctacacctacaaggactccttccactttgacatccgcgcgctggagccaggccgtaggagggccccgggccccgtgcgctccacctggacgcccccagacaagtctcggcccctcttcttccactccgtccccactcagctctccaccaccgtggaatgtgtccccgaaggtgttagtcagctgtcatcttgccagcagggatcagctgttactcaaaggcgtcaatttcgcagtgatcacagaacaggctgcagagagcacaaaatgatcatcgtggcaggacaaggcatgacagcacctgcattggaatatagactgtgctttggagcctttggcatcagcttccacctgctgcatgaggtagttttgtttgaaagaatagtcaatgcagactgcagttttccgaatgaggcttgctcttggcaaaaggaccccgaaggtgcaattccaattccacaggcccaggacatggttttttcttccacggcagagaagtcccaggtgggtgagagctctgaagagccaggacaagctacaaagtcccagtgcggagtgaccacggaaaccctgggtcaaggtaatatggccatccacttctag

SEQ ID NO: 117857 - DNA, 339 bp, Homo sapiens
gcacgagatggcggttggcaagaacaagcgccttacgaaaggcggcaaaaagggagccaagaagaaagtacaatgattgaagctcacgttgatgtcaagactaccgatgggtacttgcttcgtctgttctgtgttggttttactaaaaaacgcaacaatcagatacggaagacctcttatgctcagcaccaacaggtccgccaaatccggaagaagatgatggaaatcatgacccgagaggtgcagacaaatgacttgaaagaagtggtcaataaattgtaagtgtttctttgcttcctcacacaacacaaccttgagtatttgaatattcctgagatg

SEQ ID NO: 117858 - DNA, 517 bp, Homo sapiens
caagggtcttgcttttgaagtgagccttgctgatttgcagaatgatgaagttgcatttagaaaattcaagctgattactgaagatgttcagggcaaaaactgcctgactaacttctatggcatgggtcttacctgtgacaaaatatgttccatggttgaaaaatgttcaacaatgactgaagctcatgttgatgtcaagactaccgatggttatttctttcatctgttttgtgttggttttactaaaaaacacaacaatcagatactgaagacctcttatgctcagcaccaacagtcccccaaatccagaagaagatgatggaaatcatgacctgagaggtgcagacaaatgacttgaaagaagtggtcaataaattgattccagacaacattggaaaagatacagaaaaggttttccaatttatcctctccatgatgtcttcattagaaaagtaaaaatgctggagaaccctgggtttgaaaggcatggagcttcgtggtggaggtagtagttctg

SEQ ID NO: 117859 - DNA, 766 bp, Homo sapiens
cggccgcgtcgacctgaccagcaccatggcggttggcatgtaacaagcgccttacgaaaggcggcaaaaagggagccaagaagaaagggggtgaatcccttttctaaaaaagaatggtatggatggtgaaagcacctgctatgttcaatataagaaatattggaaagacgctcgtcaccaggacccaaggaaccaaaattgcatctgatggtctcaagggtcgtgtgtttgaagtgagtcttgctgatttgcagaatgatgaagttgcatttaggaaaattcaagctgattacttgaagatgttcagggtaaaaactgcctgactaacttccatggcatggatcttacccggtgacaaaatgtgttccatggtcaaaaaaatggcagacaatgattgaagctcacgttgatgtcaagactacccgatggttacttgcttcgtctgttctgtgttggctttactaaaaaacgcaacaatcagatacggaagacctcttatgctcagcaccaacaaggtccgccaaatccggaagaagatgatggaaatcatgaacccgagaggttgcagacaaatgacttgaaagaagtggtcaataaattgtaagtgtttctttgcttcctcacgcaacacaaccttgagtattggattattcctgagatgagagaacgcatatgagacaaggtaaaggtctgtggaaatcctgtctgtgaatccttctagctatatctctttaagtgaaagagtgttaagtactcagtaaatatg

SEQ ID NO: 117860 - DNA, 1173 bp, Homo sapiens
atgttcacagcagcattattcacaatagccaaaagatgggaacaacgcaagtgtccactgacagtccttgcgctcatcacaggagtggcatttgacctggacacccctcctctttcacttctggcccccaggcaaatgtgcaagctcctgcccgtgcctctcatgggcaagcaaaagggtgagggagcctgggtggagcactcggcaagggtcagtcctcagggatgcacgcccttgatgcatgcggtttctggacgtcaagcggacacagtgaagctgctgttgaagatgggagccaatattaacatgcaggatgcttatggccgcacaagtttatgcctggccacctacctgggctggcttgaaggctgtgtgagtctactcagaaacggtgccaagcacaatatcccagataaaaatggccgcctgccactgcatgctgccactgctgagcccgatatgaggctcctcacggtcctgttgcaacagtcgaacatcagcgagattaatcaccaggacaatgaggtgagccacactctcaagcaacaagtggtcattttgcatcctccgctggtgatacccaggcaaacagagtctggagtggacctccagcaaacaccaacagacctgcagctgagggtcatgactgttagaaggaaaactaagaaacagaaaggacatccacaccaaaaccccatctgtatgtcaccatcatcaaagaccaaagaaagggtatcagtgattgaagatcaaatgaatgaaatgaagccagaagagaagtttagagaaaaaagagtaaaaagaaatgaacaaagcctccaagaaatatgggactatgtgaaaagaccaaatctacgtctgattggtgtacctgaaagtgacggggagaatggaaccaagttggaaaacactcttcaggatattatccaggagaacgtccccaacctaggaaggcaggccaacattcaaattcaggaaatacagagaatgccacaaagatactcctcaagaagaccaactccaagacacataattgtcagattcaccaaagttgaaatgaaggaaaaaatgttaagggcagccagagagaaaggtcgggttacccacaaagggaagcccatcaaaccaatagatgatctcttggcagaaactctacaagccagaagagagtga

SEQ ID NO: 117861 - DNA, 1329 bp, Homo sapiens
atggaagaacaggagtggagaagaataaggaaaaggaaagagctcacccagcgtgtggtcacagtttatgggttcctaagctggcacacaaaatatgaaacaagaaataaagaaatagaaggagagaaagacacaaagaaagagaggggggaggaacgggagggacggactggtgacgacgaggaaacagaaggaagcgaacacaacgcggacgggacgacgagcggaggggacgcgacgacgaccagaaccacaccacgaacacgcgacgagaaacgaccaaaacgaaacggacaacgaaccgcacacaacagaaacgagaacagaaacgaaacgaaacgagcaaacgaaacgaaacgaaacgagcaacagaacagaacagacgagaacggacagggacacggagcggacgatcagcgaagcgacagcgaactgaaccggaacgcgaacgggcagcgcgacgggcacgggcaaagcgcacggcatcagctgcacgagatcgtggactcagcagcactttccagctacctacgcggagcggcaacagcgtccatacatctaagaaacccttgtccagaaaatacgaacaagacccttgggctgacagtgttccgaaggcgtttggaagccggtgccgaggcgtttggaagccaaagttatgcgagaatcgcaaggctcctcacggtcctgttgcaacagtcgaacatcagcgagattaatcaccaggacaatgaggtgagccacactctcaagcaacaagtggtcattttgcatgcctgccggcaggtgcctaacagtgacctcgccgtgctgcactccctgcgcgttggtcacaagaaagatgctggttaccttgggcctgtagagcaggtcccgggaattgaccacatgaggcacatttgtgcgtggaaagcaaaagcagtgtgttttcggctgcctggggacctgggcaccaggcacagtgctcagagcagccatcccgaggcagatttcaccgtgcacagcctatggcataagagccatgctgcaagagccgccacccccgggccaccccactacacccgcggccctcacgaccaaaaagcccaaccacacccccccccacgcgccaaaacgccaacaacaaaggccacaacacaacgcacaccaaaccaagggccccaccggagccgcaaacaacacaacacgagcacacaccccaacccccgccagacagccacgcgcaagacaacaataacaaaaacaccccacaacaacccccaaccaagaacgcagaacgaccaccacgccccacagcccacccaccacccgcccacaaaccgttgctag

SEQ ID NO: 117862 - DNA, 585 bp, Homo sapiens
cgaattcccgggtcgacgatttcgtgcggctccagggagccagggcaccgtgagcctggtggttggcagctggatccacgtcggagggggaagtgtcgcagcattctctgcaggcatcacagacctgaggcagtggcctccggagggcactggacagaaacagccatccaagtggctgagtggagggaccctgctcaagtgcagctgcagtggccggggtttccctcaggtagggatcggggcgccttgtcgccgccagccacgtgtggcgtccggtacagtcagcagagtgcagggtgcgggcaccaggaaagggggcgcaggggaactcccgcgggcctcgcgtttgcaaacttctcgcctgggcaggaggcggtcgtgggaaagaaggtggaagagcgagctttttggaactgtgcacgggacagattggacgcacacccctcgggaggcgcgaaggcatggaaaatttgaagcatattatcacccttggccaggtcatccacaaacggtgtgaagagatgaaatactgcaagaaacagtgccggcgcctgggccaccgcgtcctcggcctgatcaagcctc

SEQ ID NO: 117863 - DNA, 1102 bp, Homo sapiens
atgcaagccaagcagatgctggctttggcaaaagtccttggacaaaagcaggaacatagaggtagggatcggggcgccttgtcgccgccagccacgtgtggcgtccggtacagtcagcagagtgcagggtgcgggcaccaggaaagggggcgcaggggaactcccgcgggcctcgcgtttgcaaacttctcgcctgggcaggaggcggtcgtgggaaagaaggtggaagagcgagctttttggaactgtgcacgggacagattggacgcacacccctcgggaggcgcgaagggccgcttcaccccacgcatccagccaaccaagggagagtgtgaggaggcggcacagctgccccagtccgaagtagagcaggtcatccacaaacggtgtgaagagatgaaatactgcaagaaacagtgccggcgcctgggccaccgcgtcctcggcctgatcaagcctctggagatgctccaggaccaaggaaagaggagcgtgccctctgagaagttaaccacagccatgaaccgcttcaaggctgccctggaggaggctaatggggagatagaaaagttcagcaatagatccaatatctgcaggtttctaacagcaagccaggacaaaatactcttcaaggacgtgaacaggaagctgagtgatgtctggaaggagctctcgctgttacttcaggttgagcaacgcatgcctgtttcacccataagccaaggagcgtcctgggcacaggaagatcagcaggatgcagacgaagacaggcgagctttccagatgctaagaagaggcaagctgggtctttggtcagatttaccaccaaaatgcatgcaggagatcccgcaagagcaaatcaaggagatcaagaaggagcagctttcaggatccccgtggattctgctaagggaaaatgaagtcagcacactttataaaggagaataccacagagctccagtggccataaaagtattcaaaaaactccaggctggcagcattgcaatagtgaggcagactttcaataaggagatcaaaaccatgaagaaattcgaatctcccaacatcctgcgtatatttgggatttgcattgatgaaacag

SEQ ID NO: 117864 - DNA, 1547 bp, Homo sapiens
cctcctaaccagcggccagtgggtttcccataccccaggatgtgagcctctttaacctgtaatgctgtggctagcccttggcccctttcctgccatggagaaccaggtgctggtaattcgcatcaagatcccaaatagtggcgcggtggactggacagtgcactccgggccgcagttactcttcagggatgtgctggatgtgataggccaggttctgcctgaagcaacaactacagcatttgaatatgaagatgaagatggtgatcgaattacagtgagaagtgatgaggaaatgaaggcaatgctgtcatattattattccacagtaatggaacagcaagtaaatggacagttaatagagcctctgcagatatttccaagagcctgcaagcctcctggggaacggaacatacatggcctgaaggtgaatactcgggccggaccctctcaacacagcagcccagcagtctcagattcacttccaagcaatagcttaaagaagtcttctgctgaactgaaaaaaatactagccaatggccagatgaatgaacaagacatacgatatcgggacactcttggtcatggcaacggaggcacagtctacaaagcatatcatgtcccgagtgggaaaatattagctgtaaaggtcatactactagatattacactggaacttcagaagcaaattatgtctgaattggaaattctttataagtgcgattcatcatatatcattggattttatggagcattttttgtagaaaacaggatttcaatatgtacagaattcatggatgggggatctttggatgtatataggaaaatgccagaacatgtccttggaagaattgcagtagcagttgttaaaggccttacttatttgtggagtttaaagattttacatagagacgtgaagccctccaatatgctagtaaacacaagaggacaggttaagctgtgtgattttggagttagcactcagctggtgaattctatagccaagacgtatgttggaacaaatgcttatatggcgcctgaaaggatttcaggggagcagtatggaattcattctgatgtctggagcttaggaatctcttttatggagcttgctcttgggaggtttccatatcctcagattcagaaaaaccagggatctttaatgcctctccagcttctgcagtgcattgttgatgaggattcgcccgtccttccagttggagagttctcggagccatttgtacatttcatcactcagtgtatgcgaaaacagccaaaagaaaggccagcacctgaagaattgatgggccacccgttcatcgtgcagttcaatgatggaaatgccgccgtggtgtccatgtgggtgtgccgggcgctggaggagaggcggagccagcaggggcccccgtgaggctgccgcagggcactgaaagcccaggaccagtaaccaaggagaacaacccacccgtcgcccttctccgtatgctgcctgcgccagaagagctttgctgggccctggcttccctgccctcgccttcaccctctgtcag

SEQ ID NO: 117865 - DNA, 1134 bp, Homo sapiens
atgaatgaacaagacatacgatatcgggacactcttggtcatggcaacggaggcacagtctacaagctgggcgcggctgagcactggagcccgggagaagcaggagtaggcggggacacccaaggcggaagggccaggggaagaaccgggctcgaagcgaccaccaacccccaaagccaagaaccccacccaacacaaccgcccaagaagcgagggcgacagagccaaaccagcgaggccgagctaaggaaagggattgcggaagtggaggaggaggaaggtcccacgtggtggagcaggccgaacaggaagccagggggcaagagaccagccagcgcggcagccaaaggggggagaaacaagcggaaatcgcgccagcgaaaagtagaccacgaagtggaagaactgcaaaaagagagacagagaggggcgcaggggagggaaaaaacaaccgaggaacggcaaagaggccgaaaaggaagtggagagccagagccgctgtgtggaaaacccccggaagggaaaccccgggggggcccacgggccctttttatgcccccttttagctctcccacttgcggcctcttcgggtcccaactcaacttttctgtggctcgacaaaacccccacgggttccaaaaatgggccgttacaagtggggtagggaagcacctcacactcaccatcgacacatccctctccacccacagctctctcaacactgtttacctcatccctcaactttcacccacatcaacaccctctattcaaactcaccctctagactatgactctcaacgcgctccactctctcctcacactattgctctacatgctctcacttattatacttgcttgccatctcacatcgcagcgctcacactctcaacactatcccaccgctacatcccagcatctcgcacacagactcaattctactcttctacacaatctctacatccacctactcaacacactactccctatcctcgactactctgcgactcgcagacacgtctgctactacttaccagtacgtgctaccgacacttcacagatcatacgcactcttactaccgcacacaccatctgcagccagctcaaacttctaccaagcaatctcgacactcataa

SEQ ID NO: 117866 - DNA, 2084 bp, Homo sapiens
agcgttcgctcaactccagaaccttccgacctccgctagttcctgcgggcctttgcccgcttcccggtgcaccctccccgggagacacctcagacccccgacagcctgggcaggctcggtgcctgcgggtgcgttcctgatcacccctcccctcttccctccccctcatcctccattcccttgttttcaccctctgtcctctgcccgtcactccccttgtcacctcttggagccccctcctaaccagcggccagtgggtttcccataccccaggatgtgagcctctttaacctgtaatgctgtggctagcccttggcccctttcctgccatggagaaccaggtgctggtaattcgcatcaagatcccaaatagtggcgcggtggactggacagtgcactccgggccgcagttactcttcagggatgtgctggatgtgataggccaggttctgcctgaagcaacaactacagcatttgaatatgaagatgaagatggtgatcgaattacagtgagaagtgatgaggaaatgaaggcaatgctgtcatattattattccacagtaatggaacagcaagtaaatggacagttaatagagcctctgcagatatttccaagagcctgcaagcctcctggggaacggaacatacatggcctgaaggtgaatactcgggccggaccctctcaacacagcagcccagcagtctcagattcacttccaagcaatagcttaaagaagtcttctgctgaactgaaaaaaatactagccaatggccagatgaatgaacaagacatacgatatcgggacactcttggtcatggcaacggaggcacagtctacaaagcatatctatgtcccgagtgggaaaatattatctgtaaaggtcatactactagatattacactggaacttcagaagcaaattatgtctgaattggaaattctttataagtgcgattcatcatatatcattggattttatggagcattttttggagaaaacaggatttcaatatggacagaattcatggatgggggatctttggatgtatataggaaaatgccagaacatgtccttggaagaattgcagtagcagttgttaaaggccttacttatttgtggagtttaaagattttacatagagacgtgaagccctccaatatgctagtaaacacaagaggacaggttaagctgtgtgattttggagttagcactcagctggtgaattctatagccaagacgtatgttggaacaaatgcttatatggcgcctgaaaggatttcaggggagcagtatggaattcattctgatgtctggagcttaggaatctcttttatggagattcagaaaaaccagggatctttaatgcctctccagcttctgcagtgcattgttgatgaggattcgcccgtccttccagttggagagttctcggagccatttgtacatttcatcactcagtgtatgcgaaaacagccaaaagaaaggccagcacctgaagaattgatgggccacccgttcatcgtgcagttcaatgatggaaatgccgccgtggtgtccatgtgggtgtgccgggcgctggaggagaggcggagccagcaggggcccccgtgaggctgccgcagggcactgaaagcccaggaccagtaaccaaggagaacaacccacccgtcgcccttctccgtatgctgcctgcgccagaagagctttgctgggccctggcttccctgccctcgccttcacctctgtcagcaggtggccttgcctggggagccccatgtgtggcccaccccaccaggccatccccataccttctggtttgaaggcgctgacactggcagagaggtaaagggtggggcattgagaatggaggctcccagggtccctgcccacttctgttttcctaatgtttttctctataaagggtcaggcccgtcagcatcactgatgggaataaaagtattaatgctttgtgacagcctctgcctgaaaactggacagaaggacccagaggtgttctttcattttctctcttacctccaatctttcccctttcaagctacaggtaaaggctctaccaccat

SEQ ID NO: 117867 - DNA, 466 bp, Homo sapiens
  misc_feature (1)...(466): n = a,t,c or g
ggctgaagaaaatcgaccgcccactcttcaaggatttctggcagagattccttgacagtttaaaagccttggcagtcaagcaacaacgaactgtctacagactgacgctcgtgaaagcatggaacgtggacgagctccaggcctacgcgcagctcgtgtccctggggaatcctgacttcatcgaagtgaagtttaaaattggtggtgaatggtggacatggatcgattataaccgcttccaggagctcatccaggaatatgaagatagtggtggatcaaaaacgttcagcgcaaaggattatatggccagaactcctcactgggcattatttggtgccagtgaaagaggctttgatcccaaggacacaagacattcagaggaaaggaacaaattcaaagggcttattttctgggtgtttgagatttatctgatttttcaangtactgaagggncaaaaacttagga

SEQ ID NO: 117868 - DNA, 810 bp, Homo sapiens
gctcgacctgtgaatgttagtgtataaaaattttgtagacaaatatttttgtttctcttggacaaacactgtgaggaattgctggatttgtaaacatccatttggacagtttgtcttttttaactggagtaccgggcgtcaaagcagaacgctttgatataaagaatgacggcaaagcactgtgcattgtccctcgtgggagaaccaataatgtacccagagatcaacaggtttttgaagctactccaccagtgtaaaatttccagcttcctggtcacaaacgcacaatttcctgcggaaatcaggaacctcgagccggttactcagctgtatgtcagggtggatgccagtaccaaagacagcctgaagaaaatcgaccgcccactcttcaaggatttctggcagagattccttgacagtgtaaaagccttggcagtcaagtatctgcagaggattggttccaggacccccatggataccaaaatctacagttactgtcctgcagttcaccctgcagaacccacagatatgaaaagttggccttctctattcgaggttcctacatccctcgagtactgccctttctatttgcagttggttgaatctgcagatgctgaaggaacccagaaatatagaaggctaactgcatattacatacctgtgtatacagagccaccactgattactaaagagccttcctgtttgtggaagcaggcagagtttggcgatttgggaaagcacgtgtggcttgtggagcagttcagttccaccagagtccaagagcatggggtcggatggggagtggaatga

SEQ ID NO: 117869 - DNA, 2088 bp, Homo sapiens
atgaacttggtgggggacacaattcagtccatgaaaagtgatgaacaaaagaagtcagacacagaatggcacccgctacatgaccccaccaccaagaagctcacacacaaaacagcacctgctccacaaccccaccaccacgaagctcacacacaaaacagcacccgctacacgaccccatcaccacgaagctcacacacagaacagcacccgctacacgaccccatcaccacgaagctcagacacagaacagcacccgctacacggccccatcaccacgaagctcagacacagaacagcacccgctacacggccccatcatcacgaagctcagacacagaacagcacccgctacacgaccccaccaccacgaagctcacatacagaacagcacccgctacacgaccccaccaccacgaagctcacacacagaacagcacccgctacacgaccccatcaccacgaagctcagacacagaacagcacccgctacacggccccatcaccacgaagctcacacacagaacagcacccgctacacggccccaccaccacgaagctcacacacagaacagcacccgctacacggccccaccaccacgaagctcagacacagaacagcacccgctacacggccccaccaccacgaagctcagacacacaacagcacccgctacacggccccatcaccacgaagctcacacacagaacagcacccgctacacggccccatcaccacgaagctcagacacagaacagcacccgctacacggccccatcaccacgaagctcacacacagaacagcacccgctacacggccccatcaccacgaagctcacacacagaacagcacccgctacacggccccaccaccacgaagctcagacacagaacagcacccgctacacggccccaccaccacgaagctcacacacagaacagcacccgctacacggccccatcaccacgaagctcacacacagaacagcacccgctacacggccccaccaccacgaagctcagacacagaacagcacccgctacacggccccaccaccacgaagctcacacacagaacagcacccgctacacggccccatcaccacgaagctcacacacagaacagcacccgctacactgccccatcaccacgaagctcacacacagaacagcacccgctacacggccccatcaccacgaagctcagacacagaacagcacccgctacacggccccatcaccacgaagctcagacacagaacagcacccgctacacgaccccatcaccacgaagctcacacacagaacagcacccgctccacgaccccatcaccacgaagctcacacacagaacagcacccgctacacggccccatcaccatgaagctcacacacagaacagcacccgctacacggccccatcaccacgaagctcacacacagaacagcacccgctacacggccccatcaccacgaagctcacacacagaacagcacccgctacacggccccatcaccacgaagctcacacacagaacagcacccgctacacggccccatcaccacgaagctcacacacagaacagcacccgctacacggccccatcaccacgaagctcacacacagaacagcacccgctccacgaccccatcaccacgaagctcagacacagaacagcacccgctacacggccccatcaccacgaagctcagacacagaacagcacccgctacacggccccatcaccacgaagttcaggaacaggcaaagccaatcaagtgaccacccaggcccagcccagagaccacccgggcccagcccagagaacctgctgtcaccctcctccccagtggggccctgggacaagcctgtccctgcgatgccactgccggcccacacggaaccacgctgtggcctgcggttccgccaaggtggcagcagcatctcaccagggagctcctgcatcctgtcccaagggcttgcccataacagggacagggacagccattcacagccgggcctgggcgaggctcacacccgtatgaccccacaggagccagcccgaaagggcaaagcagcatcttga

SEQ ID NO: 117870 - DNA, 184 bp, Homo sapiens
ctggcagccactcccagagtccctggaactctggcccaaggctctctgactccttcccagatcttcttggcttagcggctgaagactgacgctgcccgatcgcctcggaagcccccctgacacccattaggctcagcacattacccgggctgtactgccgcaaggcttcacagacagcccccat

SEQ ID NO: 117871 - DNA, 1165 bp, Homo sapiens
atggctgaggaggactcaggaaacttacaaccagaaggtgaaggggaagcaggcacctcttcacatggtggagcaggagagagagtgaaggggaaggtgctacaaacttttaaacaaccagatctcacaaagcagacacgttttatccgtggacccaaaactccggcgccggtcacggactgggaaggcagccttcccttggtgtttaatcattgcagagatgcctctctgattatacacccacatttcaagggtgtcagaccacgcagggacgcctgccttggtccttcacccttagcggcaagtcccgcttttctggggaaggggcaacacgctttaaaaagattaaagcctattatcactcgcctgctacagcatggccttttaaagcctataaactctccttacaattcccccattttacctgtcctaaaaccagacaagccttacaagttagttcaggatctgtgccttatcaaccacattgttttgttgcctatccaccccatggtgccaaacccatatactctcctatcctcaatacctgcctctacaacccattattctgttctagatctcaaacatgctttctttactattcctttgcacccgtcatcccagcctctcttcgctttcacttggactgaccctgacacccatcaagctcagcaaattacctaggctgtacagccgcaaagcttcacagacagcccccattacttgaatcaagcccaaatttcttcttcatctgttacctatctcggcataattcttcatgaaaacacccgtgctctccctgctgaccatgtctgactaatctcccaaaccccaatctcttctacaaaacaacaactcctttccttcctaggcatggttagcgtggtcagaattcttacacaagagccaggaccacaccctgtagcctttctgtgcaaacaatttgaccttactgttttagcctagccctcatgtctgcgtgcagcggctgccactgctttaatacttttagaggccctaaaaatcacaaactatgctcaactcactctctacagttctcataacttccaaaatctattttcttcctcatacctaacgcatatactttctgctccccagctccttcagctgtactcactctttgttgagtctgccacaatcaccattg

SEQ ID NO: 117872 - DNA, 324 bp, Homo sapiens
tcacttcgaagcccgtcgccaagccggacctcccaaacccagcccacagccacctttccgttgacttcctaccgctggcacacagggggcggtggggaaaaagcggctggagggttccgctggggccgctttgctggctggggcagggccctgacccaccaggagcccatggtcagaacccagccagcccctcgcttgattttccgtggggtcctatctgcgcctcccaaggagtcacggaccagtcgccttcgactttccaaggccctctgggggaggcataaaaacccaccgccggagccaaacccggagccggagcaggag

SEQ ID NO: 117873 - DNA, 1391 bp, Homo sapiens
tcgcaccggcatttccgggtcgacgatctcgtcagaggagtcaggtctgagggtttgtagccagaccctcgtcctctagggacaccttggccatcacagtagatgggctggtgccccacatggcatctgctccaaacaggggcttcagagggctctgaggtgacctcactcaagaccacaggtgccctggccccttccccgccagctacaccgaaccctgtcccaacagctgccccagttccaacagccaattcctggggcccagaattgctgtagacaccagcctcgttccagcacctcctgccaattgcctggaatcccatcctggctggaatcaagagggcagcatccgccaggctcccaacaggcaggactcccgcacaccctcctctgagaggccgctgtgttccgcagggccaggccctggacagttcccctcacctgccactagagaaacacctgccattgtcgtccccacctggaaaagaccactcgtggagcccccagccccaggaggccccagagctcagggcgcctggtcggattctgaacagccccgagtcacagtgggtataactggaacgaccaccgtgagaaaaactgtgtccaaaactgactcctggcagcagtcggaggccccgccagagaggggagcagccgccctgaacccatgtcctgccggttcccatgacccccagcacccagagccccacgtgcctctgtgctccctccttctggggaacaccctgtgcagcccctccctgcagcccacacgctggggagaccccaccctgcctcgggccttttctacctgctgcacttgccgcccacccaaacaaccctggacccggccctggtatttccaggacaaaggctcacccaagtcttccccatgcaggcccttgccctcactgcctggttacacgggagcctcctgtgcgcagaagcagggagctcagctcttccacaggcagaaggcactgaaagaaatcggcctccagtgccttgacacacggaggctccgcactccctctaaagatgagggatccaggcagcaacatcacgggagaatgcagggctcccagacagcccagccctctcgcaggcctctcctgggaagagacctgcagccaccactgaacagccacggaggtcgctggatagtaaccgagtcagtgaccgacctggagggcaggggagcagtgaaccggagcccagaccatagggacagagaccagccgctaacatcccgagcccctcactggcggccccagaacaccccgtggaaacagaacagacccacagtcccacctggaacagggcagacactgctgagcccccagcaccagccccaagaaacactaggcaacagcatcagagggggctcctga

SEQ ID NO: 117874 - DNA, 824 bp, Homo sapiens
ttatcgtgctttaacttgagaaacatatcgatgaactacagctttctgatacgcggtacagtagttcatcacactgcactctagcctgcacgacagagcaagactcgtagccgccctcttgggaatggacagtgacacagcagcaaagtggaaatggaaagactggttaggaggcgcaggtgagatccgcctcgcgagtggagcgctaggattcaggtccagatctgactgggaagttccgcagggaattccgccccggacccctggagacccacatcgtccggtgtgttttcctttcacaacacttcccacagccactggattctcaggctccgcactcaggaaaggttcagcgaggtttgtgttcagggaacatggcctacaaggcctctttgggctctgccaccaccctaattcccatttccctctcctgcaccagctgcatttgcttcctgtcagtccctgcctccccacagtccgcagtccccgaggcctggagccgggatttcggtcctcggtctcaagaagctcccgacagttctcagcagcgccaaccaggccatcagtcccttcgcccatggccaatcagggctcgggagatgaccgccaacccccgcccccccaagacacgcccccgcgtcccaacgcagccagtcagagcgcgggacacaactacgcgtccctccccgcaccacgagggcgagtcggagtgggaatcggctttccaggcagcccagcctgtgctggcgggggcatctggcattttcacaccctttccttcccagcattttaggaagcggagttccagtagctttgacgcttag

SEQ ID NO: 117875 - DNA, 1980 bp, Homo sapiens
tcaaggataacgagagacggctgaatacatgcaggtccacacgctcacataagcgcgcgcacactcggaggagcattcgcgcacacagaggctcagcggcagcgccgcctgcagcccaggcacctggatggcgatgggcatcatcttgccctcgggtccaaagtgcagcaggcagaggggggcgcagtggtgctgcttccggccgctgagctccacggtggggatgccctccatgatgcggtagtcggccaggtaaatgttccccttctccagctccgcttgcaagcacgttccctcgcccaggaacggagccaccatgtcgtctgtgacggggaacttgtctgggatccgcgtgcagcggcggatcaggccggggttgacgccgttgaggtactggtacccaaagaaggtgtcctctgcccagtgctcggccacgtactcggagacgacagatttcttgccagggaaaattttcctaatgtccttcagcctcttccacgaatgtttgcagtccaacaggccgcggactttgaaagccagtgccatgggccccaggcggacgaagaaggaggccgtcttgaggaaggagtagcggagatttaagttcaggaacttggtggccttaaagttgatgagaattgggaatcccggaatatagccattccactcaggccggttggggttgcgatgcctccgcaccggagggcggtaactgggaatgtgcacatagctgggcaggccaggaagaaagactcgccagtggtagaagtcctgcttggctctgatctcctcttttctgtgctccaggaggacggggagcgagtcatctgctgttgtctttcccttgagagtctccagcgccttagaccgctcggccactctacctgcacgaaaacttactgtccccgttgtcctcctaagagacggcttgggccggggcggtttggggcgcagatagccgtgcagcgcggagaagagctgggcgcgggcggtcgggctggcgtcgtgcgcgaaggccgccaagcgaagcaggcactcgcggaaaccggacaagtagcagctggcgagcgccttggcgtcctggactggggaccggggaacccccgggggctccacccggcttcgctccctcaagtagcccacggcgaactccaatatctccgctttctccagcttcgggttccggaggttctgggctgggcagaaggcagagggcagcagacagagccaggaccaagccaggcggcgattgagttggcagctgggcaggtaggaggcctccgggaggggcagaagggccttagggtcaaaggaggcccaggccttacgctgtccttcttctttcagggtggccagagtggggaaggaggagggagtctgcagccgagtgtacagctgctcgtacagggaggccccgtaggcttgacgggatgagtgagccccaggcttctgacgagagaagctttgaagcagaacggcgccacggaggcagggggcgagcactggccttcttgtcccccctcccactgactggagcaggtgaacatcctggagctgcagacacactccaggtcgcatcacccgcctaaggccacggaactgctggtaggcaaggcagagccccagctgcccatccagctcatagaggccagcgggctcattcaacacgccagtgactgctcccgaataggataggagtctagaataccggacaagactttctggatccttcttgtcctccgagttgctgggcatggggagtggcttggggtcagcctctaagaggggtccttccagctccagttccagctcctgcacacattctggtttcagcagcaacagacgggaggactgactggtcatccaaacatgctggcgctgaccacggatcttggacactcgcagttctgtcagcacataggctgtaccaggccgaagggctctgtgccacaccagctgggcagggacctggctctccat

SEQ ID NO: 117876 - DNA, 509 bp, Homo sapiens
tgcttcgccatgactacgccaagcttgccacgaggttgacacggacactatgtgaaccccttgtggcgtctctctggatgaaactggggaacacgggggccatgagaaggtgtgtgaagctaacagtcgctcttgagactgctgaatgtgaattcccccctcacctggatgtatatatagaagacccacacttgcctccctcactaggactacttccaggagcccgggtccacttcagccagttggagaaaaggggttccagatctcacaatgtttattgttggttccggtcatccacttatgtgcaggtcctgagttttccccctgagaccaccatcagcggtcccctgccccacatctacctgggctgaacttctgcagggtggtcagtcccccattccagggccactgcctcttgccatatcggctctggtcttcaggcttcagctcttctggggtgtgttgcttattgtaccagcatctgccggcagctttcaaccagggttgag

SEQ ID NO: 117877 - DNA, 728 bp, Homo sapiens
gtttgaggaccagtcgacctgggctgctataggcgcgagtatttcctcctgctccccataggctcctggtggaggatgggactgccgaagccgtggtgacctgtatgaatcaccatgtggcagcagcactagggctgtgtcctatagagtgggcctccctcctagatttcgtccaagtgccaggcagagtggtcttgcagtttgcagggcctggagcccaacttgaggtgtaatgtggctgggagggagggactcggatacccaaattcctgggcttttggcaaagggtttaggagccagttaaccttgaccttctctttctagtcttcagccagggttgacgagcccatgaccatgttcctctggacactttgtactagcccctctgtcctccgtcctattgtgctttcttttgagctggaaaggaaaccgtcgaagatcgtcccattagaacctcctcggctacagcgattccagtgtggagagctccctttcttgactcacgtgaaccccaggctccgattgtcctgcctttctatccgagagtcagagtactccagctctctggggatccttgcttcctcctgttaactgaactgcaaggatggcctgagagtccttccttgctgaaaacctgaaggcctaggtcctggctcctctccctacttgttctgtgattgaaccaaggactccagattcacaaactgctacaccaatataaaaaaaaa

SEQ ID NO: 117878 - DNA, 2114 bp, Homo sapiens
ttcattggtatctcaaagaaattgttcctagatcccctaattgtcgggttgtgatttcggagcactttctggtctcaaggtatatcgatcaaggatctgccttaggccaggcccttgggaaacctacagggctaaccgtagcctggggccctatagcacagtcacccagagtcctcacctgcccctgcttgtgcctggcacttgcctccccctacaccttctttgtgcttgtgaacacctctaggcattcatctttgacttcctgcagggcccagccttactgactgagaccatcatagctatgctctctgccttgccgccaactccccaatttacttcctttacagactgattttggtaccatttcttctgctggacgaaaagctattctcttacaaatcactttccacctttggccctggcggcaaagggctgaaatgatgatgaacgactaggagttcctaatgggacgatcttcgacggtttcctttccagctcaaaagaaagcacaataggacggaggacagaggggctagtacaaagtgtccagaggaacatggtcatgggctcgtcaaccctggctgaagactgccggcagatgctggtacaataagcacacacccagaagagctgaaggctgaagacagagacgatatggcaagaggcagtggcctggaatggggactgaccaccctgcagaagttcagccaggtagatgtggggcaggggaatgctgatggtggtctcagggggaaaactcaggacctgcacataagtggatgaccggaaacaacaataaacattgtgagatttgtcactgagcaggtcggtcagtgaggattcaggcaatgacttgtttgcatccagcacatcttggatatcctgggagctttcaagctccagagtccagttgtcctggacagtgaggcaggatgcacagccagccaactccagaggacgccgagatatgcaggatgaaccatccttttcaaacaacattggtgtagcggggccaggagctatgagtcggtacacctgtcccgggtgcaagaactcaaaccagcggactgaagagccaaagaaaatgaggtgaaccttctgatcattgtcgtcatttccctggggctcgggcagcccccatccagtaccctccttcctctgggtgcccccaagccagctccccaacacatagaaactgagggcgggcttgggcacctctggacttgctcctggggggacacaaaaattacgcttcatgagggcctccttgtggcagagcaagaagagccggctctgtcctaggtggggtccctctgggccggtgggatctgtctgaggtgttgagggtgttgctgaatgaaggcagggtctgggcacaggcaggatcagggcatcagccagaaagaactggacatagactctggcctgctgcttctggatgaagcctggcatgctcagctccttccaggaagggaagctgcttctcacgtccctctctacgatcaactgaaacctctctgcccgcaccaggcagcctatcagccgtgggtcactgaggggttgagagtgcttggccagcagcaggcagggcagggaaccactttggtcccgaagttgcagacaacctttatgagatgaagccaccagaaccccaagtaaaacctgggctgggcagaaggcagagggcagcagacagagccaggaccaagccaggcggcgattgagttggcagctgggcaggtaggaggcctccgggaggggcagaagggccttagggtcaaaggaggcccaggccttacgctgtccttcttctttcagggtggccagagtggggaaggaggagggagtctgcagccgagtgtatttctggaggggacagtgatgtggctcttcaaggatctcattgtgtgcattccgaacagggctgcctggcggagctagaagatccagggtaggagccaggagttgcagtcccaggctggggctcccaggagaggaatgttgcaggaactggtggtgtctcagcacatggggacacagcttgcaggccagctcctccagggcattggtagcccacaggtagaggggacgaaatcgtcgaagcgaagacgaaa

SEQ ID NO: 117879 - DNA, 452 bp, Homo sapiens
tgccacgacattccccagggtgcaggtgcccggtggccgagggtcagtccagtggtagagccttgcctcctaggctcatcctgctggcggtcctcctgcttctgctgtgtggtgtcacagctggttgtgtccggttctgctgcctccggaagcaggcacaggcccagccacatctgccaccagcacggcagccctgcgatgtggcagtcatccctatggacagtgacagccctgtacacagcactgtgacctcctacagctccgtgcagtacccactgggcatgcggttgccctgcctttgggagctggaactggactccgtggctcctcctgcctacagcctgtacaccccggagcctccaacctcctacgatgaagctgtcaagatggccaagcccagagaggaaggaccagcactctcccagaaacccagccctctccttggggcctcg

SEQ ID NO: 117880 - DNA, 457 bp, Homo sapiens
tttcgtccggagtgaaggcggctgggcagggggccaggcccgggatgggtaggaggccaggaggcccagcctgactgtgctctgggtggtgaggcgagcgtctgccctccgcaacactaacccccgtgtgctatgggtcacgccctgcagctttgacccccctggccccctgtcagccggaatgtcctgtgaagtgcttgtcaccttcaagccgatgataaacaaggatctagaaggaaatatctcatttttggctcagacgggcgagttttcagttccactgaaatgttcaacaaagaaatgttcgctgtccctcgacaaggagctcattgacttctgcagctacgtggtaggagagaccacgtctcggaccatcacgctgaccaacgttgggggcttgggcacgactttcaagttcctgccagcttcagagccctgtgagatggacgactcccag

SEQ ID NO: 117881 - DNA, 1047 bp, Homo sapiens
tcagcgcttgagagctgtgattttagggttcagtctctggttcttggagtaagaagctgatggattctgtgtagcttcactacagcctgcgggctgctcctcctcctgctccttgtccagcttctccagctccttccggctctgcatgtccgcctgggaggactccgtgccctctagctgctgctcagagaagctggtggcggctttgtcatacaagcttttatcttcgtaggtcaggagactgcttaatttcagggcagactgggagtcgtccatctcacagggctctgaagctggcaggaacttgaaagtcgtgcccaagcccccaacgttggtcagcgtgatggtccgagacgtggtctctcctaccacgtagctgccgaagtcaatgagctccttgtcgagggacagcatcggcttgaaggtgacaagcacttcacaggacattccggctgacagggggccaggggggtcaaagctgcaggacgtgacccatagcacacgggggttagtgaaggctgtaggcagaggagccatggagtccaggtccagctccccaaagggcaggggcaaccgcatgcccagtgggtactgcacggagctgtaggctgcagggaaccagagtgggttcgtggaggcgggcttggcatttacccccgccatctccaccctcaactggcgggcccctaggcactcacaggtcacagtgctgtgtacagggctgtcactgtccatagggatgactgccacgtcgcagggctgccgtgctggtggcagatgtggctgggcctgtgcctgcttccggaggcagcagaaccggacacaaccagctgtgacaccacacagcagaagcaggaggaccgccagcaggatgagccccacttgccacaggctgctccagcgggcctcgtgcgggcactggtccgaggggtcgcagctgccgtccgcgaagcccagcgccacctgcggcagcggcaggagcggcaggagcggcaggagcggcagcagcagccgcagtccgcgggcggtcagcggcccccgggccat

SEQ ID NO: 117882 - DNA, 462 bp, Homo sapiens
aggccctgtgagcatcggtgaacccgagataggccccccaggccctgtgagcatcggtgaacccgagtaaggccccccaggccctgtgagcatcggtgaacccgaggaaggccccccaggccctgtgggcatcggtgaacccgaggaaggccccccaggccctgtgagcatcggtgaaccctaggaaggccctcccaggccctgtgagcatcactgaacccgagtaaggccccccaggccctgtgagcatcggtgaacccgaggaaggccccccaggccctgtgggcatcggtgaacccgaggaaggccccccaggccctgtgggcatcggtgaacccgaggaaggccccccaggccctgtgagcatcggtgaacccgaggaaggcccaacaggccctgtgagcatcactgaacccgaggaaggccccccaggccctgtgggcaacgaaatgtcgagccggg

SEQ ID NO: 117883 - DNA, 374 bp, Homo sapiens
aatacagggcactggtcttctcttcctccacacagtaggtttctaaaaacttcttatattctggatcatcttcgatgcttccagtcttggcatctttttttctcagcttctttttggctatcttctggaatggagcaaactctgccactgcaggatattctaggcctcaggtcggcggcgaagaactcgaagtagtcgtgtgctggcagcgggcgcagctgctcctccagctgctccttggtgaggcccggaggcaggcggcggatgaccacctgcggggagcgcgcggccgttcccaccggggcggagcgtggacaaggagctcaaaaggcaccgcgtaccgcgctgggaggcccggcccccgccccacgaaa

SEQ ID NO: 117884 - DNA, 619 bp, Homo sapiens
gaaggatgaattatagtttaaatagtaataatgcattgtcgttggtacacttactctttaagtaagttaggtcattattttccgaaatgaatgtagtagaatttcagaatggcttctggaacatgtttcctgttaaaaggcctaaaatatcctgcagtggtagagtttgctccattccagaagatagccaaaaagaagctgagaaaaaaagatgccaagactggaagcatcgaagatgatccagaatataagaagtttttagaaacctactgtgtggaggaagagaagaccagtgccaaccctgagactctgctgggggagatggaggcgaagacaagagagctcattgctagaagaaccacacctcttttggaatatattaaaaatagaaaattagaaaagcagagaattcgagaagagaagcgagaagaacggaggaggagagagttagaaaagaaacgtttgcgggaagaggaaaaaagaagaataagcgttgaggacagatggctttacactatacggatcaaccgaagaaaatcgcagagaaagaagtaaggattaaggtcacacagcggcagtgataaagagcacagggatgtggagagatctcaagaacaag

SEQ ID NO: 117885 - DNA, 751 bp, Homo sapiens
  misc_feature (1)...(751): n = a,t,c or g
ctcttgaggcatccgtctgtgaccactgacttcaactatgtgacacaacatgccttccttgacgctcaggaacagaccatncatgtgtcttctgcactgctcattcggaagcatcataacttaaaatgatcttaactaaaaaaaatcacgtgctctccatcaaccaacgctcagaaatattttcccatgctgccatcttgccattcttttgtcaaaactggaaatcactctacatttctgtcaagcctgtaacaagtttcaacttgttatcacagtcaagaaaaagagaaaaaacgtatatcctctacgagtaaatctctcaataaagaaaagagaagaaatgagcaaaacagaccaatgagctctcttgtcttcgcctccatctcccccagcagagtctcagggttggcactggtcttctcttcctccacacagtaggtttctaaaaacttcttatattctggatctagacattaaaaagtaggaagaaaataaatataatctttcccaactacgggagaattacatttgctcagtgttcttaatttggcagcttcataacgtagcacttggaaagggctcaccatcttcgatgcttccagtcttggcatctttttttctcagcttctttttggctatcttctggaatggagcaaactctaccactgcaggatattctaggccttttaacaggaaacatgttccagaagccattctgaaattctactacattcatttcggaaaataatga

SEQ ID NO: 117886 - DNA, 443 bp, Homo sapiens
ccgtccgagataaaaagatgccaagactggaagcatcgaagatggtgagccctttccaagtgctacgttatgaagctgccaaattaagaacactgagcaaatgtaattctcccgtagttgggaaagattatatttattttcttcctactttttaatgtctagatccagaatataagaagtttttagaaacctactgtgtggaggaagagaagaccagtgccaaccctgagactctgctgggggagatggaggcgaagacaagagagctcattgctagaagaaccacacctcttttggaatatattaaaaatagaaaattagaaaagcagagaattcgagaagagaagcgagaagaacggaggaggagagagttagaaaagaaacgtttgcgggaagaggaaaaaagaagaagaagagaagaagaaagatgcaaaaaaaaaaaa

SEQ ID NO: 117887 - DNA, 572 bp, Homo sapiens
  misc_feature (1)...(572): n = a,t,c or g
aagaagcttaatccttacatctatctcggcaattttcttctgttatcagtctcntttatnagcatcaatcatcttctcttcttcttcttttttcctcttcccgcaaacgtttcttttctaactctctcctcctccgttcttctcgcttctcttctcgaattctctgcttttctaattttctatttttaatatattcccaaaagaggtgtggttcttctagcaatgagctctcttgtcttcgcctccatctcccccagcagagtctcagggttggcactggtcttctcttcctccacacagtaggtttctaaaaacttcttatattctggatctttgctgtcaaggaagatatatccctcaaaacgatctctaaaaagaaggatgtcctcaggattcctaaaattaatgtatgctcttgagtagagatgaggataaagactcaggtcggcggcgaagaactagaagtagtcgtgtgctggcagcgggcgcagctgctcctccagctgctccttggtgaggcccggaggcaggcggcgtatgaccacctgcggggagcgcgcggccgttcccac

SEQ ID NO: 117888 - DNA, 1357 bp, Homo sapiens
tgatgacctcgtgacccgccggaatcccggtcgacgatttcgaaaggagggggccggaggccttcgggcgtgtcgttgccgcgcggggcccgagcgggagggagaagctgtcggccctagaagtgcagttccaccgcgactcgcagcagcaggaggctgagacgccgccaacttcgtcctccggttgcgggggcggtgcgggcaaacctcgcgaggagaagaggacggccctgagcaaggtggtcatccgccgcctgcctccgggcctgaccaaggagcagctggaggagcagctgcgcccgctgccagcacacgactacttcgagttcttcgccgccgacctgagtctttatcctcatctctactcaagagcatacatttatttttaggaatccttgacgacatcccttttttttaggagaatcgctttgatgggatatatcttccttgacagcaaaggcctagaatatcctgcagtggtagagtttgctccattccagaagatagccaaaaagaagctgagaaaaaaagatgccaagactggaagcatcgaagatgatccagaatataagaagtttttagaaacctactgtgtggaggaagagaagaccagtgccaaccctgagactctgctgggggagatggaggcgaagacaagagagctcattgctagaagaaccacacctcttttggaatatattaaaaatagaaaattagaaaagcagagaattcgagaagagaagcgagaagaacggaggaggagagagttagaaaagaaacgtttgcgggaagaggaaaaaagaagaagaagagaagaagaaagatgcaaaaaaataagagacagatgaacagatgaaaattgcagagaaagaagtaaggattaagcttcttatgaaaccagaaaagggagaggaaccaaccacagagaaaccacaagaaagaggagaggagattgatacttggaggttggcaagcaggaatcctgtgcccccggttgcagtcgtaaaagccaggcccatggaaggctcccttggaggagcccccaggagacgtcacacagccggcagttgattaagagccccagggatgtggagagatctcaagaacaagaatctgaagcacaaagataccatgtggatgacggcaggaggcacagagctcaccacgagcctgaacggctttccagaaggagtgaggatgagcagagatggaggcgaagacaagagagctcattgagaattcgagaagagaagcgagaagaacggaggaggagagagttagaaaagaaacgtttgcgggaagaggaaaaaagaagaagaagagaagaagaaagatgcaaaaaaaaagagacagataa

SEQ ID NO: 117889 - DNA, 1863 bp, Homo sapiens
atggcagaaagctggggccttactaacttgcggtgtcagaggactgagctcatggctggcacggcaactgaaaggatagggaagaaacacacaaaggaaaaagaggtaagggccataattttagtaccaactttgccagaatccttggcgatagctaactacacagaaacaggtgtccctaagggcaagaatactgtgaatgctgttgttcctctgggtctagatgcccagtgtggctgccatactctaggctgctgcttggaatgcctgcaaggaatccagagatatggcctgtcctcaagtctcccagcagtgggtaccagtaccagctctgatgggggtggcaggaaagtgacacagactgaacgcagctcctcaccagcaatggaacaaagctggaaggagaatgactttgacgtgttgagagaagaaggcttcagaagatcaaactactctgagctaaaggagaaagttcgaaccaatggcaaagaagttaaaaaccttgaaaaaaaagtagacgaatggctaactagaataaccaatgcagagaagtccttaaaggagctgagaccaagtctacgtctgattggtgtacctgaaagtgatggggagaatggaaccaagttggaaaacactctgcaggatattatccaggagaacttccccaatctagcaaggcaggccaacattcagattcaggaaatacagagaacgccacaaagatgctcctcgagaagagcaactccaacacacgtaattgtcagattcaccaaagttgaaatgaaggacaaaatgttaagggcagccagagagaaagaccacagtgcaatcaaactagaactcaggattaagaaactcactcaaaaccgctccactacatggaaactgaacaacctgctccagaatgactactgggtacataacgaaatgaaggcagaaataaagatgttctctgaaaccaacggaaacaaagacacaacataccagtatctctggcacacattcaaagcagtgtgtagagggaaatttatagcactaaatgcccacaagagaaagcaggaaagatccaaaattgacaccctaacgtcacaattaaaagaactagaaaagcaagagcaaacacattcaaaagctagcagaaggcaagaaataactaaaatcagagcagaactgaaggaaatagagacacaaaataccgttcaaaaaattaatgaatccaggagctggttttttgaaaagatcaacaaaactgatagactgctagcaagactaataaagaagaaaagagagaagaatcaaatagatgcaataaaaaatgataaaggggatatcaccaccgatcccacagaaatacaaactaccatcacagaatactacaaacacctctacgcaaataaactagacaatctagaagaaatggataaattcctcgacacatacaccatcccaagactaaaacaggaagaagttgaatctctgaatagaccaataacagactctgaaattgtggcaataatcaatagcttaccaaccaaaaaaagtccaggagcagatggattcacagccaaattctaccagacgtacaaggaggagctggtaccattccttctgaaactattccaatcaatagaaaaagagggaatcctccctaactcactttatgaggccagcatcatcctgataccaaagcctggcagagacacaacaaaaaaagagagttttagaccaatatccttgatgaacgctgatgcaaaaatcctcaatacaatactggcaaaccgaatccagcagcacatcaaaaagcttatctaccatgatcaagtgggcttcatccctgggatgcaaggctggtttaacatatga

SEQ ID NO: 117890 - DNA, 1989 bp, Homo sapiens
atgaagcgagaagagaagtttagagaaaaaagagtaaaaagaaatgaacaaagcctccaagaaatatgggactatgagaaaagaccaagtctgcctctgattggtgtacctgaaagtgacggggagaatggaaccaagttggaaaacactcttcaggatattatccaggacaacttccccaatctaggaaggcaggccaacattcaaattcaggaaatacagataatgccacaaagatactcctcaaggagagcaactccaagacacataattgtcagattcaccaaagttaaaatgaaggaaaaaatattaagggcagccagagagaaagaaatacagactaccatcagcgaatactataaacatctctacgcaaataaactagaaaatctagaagaaatgggtaaattactggacacatacaccctcccaagacaaaaccaggaagaagttgaatccctgaatagaccaatagcaggctctgaaattgaggcaataattaatagcctgccaaccaaaaaaagtccaggaccagacggattcacagccaaattctaccagaggcacaaagaggagctggtaccattccttctgaaacaattccaatcaatggaaaaagaggtaatcctcccaaactcattttatgaagccagcatcatcctgataccaaagcctggcagagacacaacagaaaaagagaattttacaccgatatccctgatgatcattgatgcaaaaatcctcaataaaatactggcaaaccgaatccagcagcacatcaaaaagcttatccaccaagatcaagttggcttcatctctgggatgcaaggctggttcaacgaacacaaatcagtaaacgtaattcatcatataaacagaaccaaagacagaaaccacatgattatctcagtagatgcagaaaaggccttcaacaaaattcagcagcccttcatgctaaaaactctcaataaactaggaatccaacttacaagggatgtgaaggaccccttcaaggagaactacaaaccactgctcaatgaaataaaagaggatacaaacaaatggaagaacattccatactcatggataggaagaatcaatatcgtggaaatagccatactgcccaaggtttccctagaaagagaacgacaacatgatcaaacacatgttcagagccaacttgaaaaattggatcttcttgaacaggagtataacaaacttaccacaatgcaggcccttgcagaaaaaaaaatgcaagagttggaagcaaaactccatgaagaagaacaggaaaggaaacgcatgcaagctaaggcagctgagcatccacgtttgtgtttgtatttggcagccatattttctgctcttaagaatcttcaagataagattcgacgcttggaacttgagaggattcaggcagaagaaagtgtgaaaaccttgtctagagaaacaattgaatataagaaagtactggatgaacagatacaagaaagggagaattcaaagaatgaggaatcaaagcacaatcaagaactgacatctcagttgttagctgcagaaaataaatgcaatctattagaaaaacaattggaatacatgcgaaatatgataaagcatgccgaaatggagaggacatctgtcttagagaaacaaactccgctgctgatacccaggcaaagagggtctagagtggacctccagcaaactccaacagacctgcagctgagggtcctgactgttagaaggaaaactaacaaacagaaaggacatccacaccaaaaccccatctgtatgtcaccatcatcaaagaccaaagaggaacgcagctcctcaccaacaacggaacgaagctggacagagaatgactttgacgagttgagagaagaaggcttcagacgatcaaactactctgagctaaaggaggaacttcaaacccatggcaaagaagttaaaaaccttgaaaaaaaaattagacgaatggctaactag

SEQ ID NO: 117891 - DNA, 1119 bp, Homo sapiens
atggggagaagacagagcagaaaaaccggaaactctaaaaatcagagcggctctcctcctccaaaggaacgcagctcctcaccagcaatggaacaaagctggacggagaatgacttcaatgagttgagagacgaaggcttcagaagatcaaactactctgagctaaaggaggaagttcaaacccatggcaaagaagttaaaaactgtgaaaaaaaattagacaaatggttaactggaataatcaatgcagagaagtccttaaaggacctgatggagctgaaaaccaaggcacgagaactacgtgatgaatgcacaagcctcggtaaccgatgtgatcaactggaagaaagggtatcagtgatggaagacgaaatgaatgagatgaagcgtgaagagaagtttagagaaaaaagaataaaaagaaatgaacaaagcctccaagaaatatgggactatgtgaaaagaccaaatctacgtctaattggtgtacgtgaaagtgacgaggagaatggaaccaagttggaaaacactctgcaggatattatcgaggagaactttcccaatctagcaaggcaggccaacattcaaattcaggaaatacagagaacgccacaaagatactcctcgagaagagcaactccaagacacataattgtcagattcaccaaaggtgaaatgaaggaaaaaatgttaagggcagccagagagaaagtgttggaagttctggccagggcaatcaggcaggagaaggaaataaagggcattcaattaggaaaagaggaagtcaaattgtccctgtttgcagatgacatgattgtatatctagaaaaccccatcatctcagccaaaaatctcctcaagctgataagcaacttcagcaaagtctcaggatacaaaatcaatgtacaaaaatcacaagcattcttatacactaataatggacaaacagacagccaaatcatgagtgaactaccattcacaattgcttcaaagagaataaaatacctaggaatccaccttacaagggatgtgaaggacctctttaaggagaactacaaaccactgctcaatgaaataaaggaggatacaaacaaatggaagaacattccacgctcatag

SEQ ID NO: 117892 - DNA, 583 bp, Homo sapiens
gaacgcagctcctcaccagcagcggaacaaagctggatggagaatgactttgatgagttgagagaagaaggcttcagacgatcaaacttctccgagctaaaggaggaagttcgaacccatggcaaagaagtcaaaaaccttgaaaaaagattagacaaatggctaactagaataactaatacacagaagtccttaaaggacctgatggagctgaaaaccacggcacgagaactacatgatgaatgcacaagcctcactaaccaattcgatcaactggaagaaaggctgataagcaacttcagcaaagtctcaggatacaaaatcaatgtgcaaaaatcacaagcattcttatacaccaataacagacaaacagagagccaaatcatgagtgaactcccattcacaattgcttcaaagagaataaaatacctgggaatccaacttacaatggatgtgaaggacctcttcaaggaaaactacaaaccactgctcaaggaaataagaggatacaaacaaatgggagaacattccatgctcatgggtaggaagaatcaatatagtgaaaatggccatactgcccaag

SEQ ID NO: 117893 - DNA, 990 bp, Homo sapiens
atggggagaaaccagatcagaaaagctgaaaattctaaaaaccagagcacctcttctcctccaaaggattgcagctcctcactagcaatgaaacaaagctggatggagaatgactttgacgagttgacaggagcaggttttagaaggttggtaattacagacttctcagagctaaaggaggatgttcaaacccatcacaaggaagctaaaaaccttgaaaaaagattagaaaaatgggtaactagaataaacagtgaagagaagaccttaaattacctgatggagctgaaaaccatggcacaagaactatgtgatgcatgcacaagcttcagtagccaatttgatcaagtggaagaaagggtatcagtgattgaagatcaaattaacaaaatgaagctagtagagaagttcagagaaaaaagagtaaaaagaaacgaacaaagcctccaagaaatacagaactatgtgaaaagaccaaatctacatttgattggtgtacctgaaagtgatggggagaatcaaaccaagctggaaaacactctgcaggatattatccaggagaacttccccaacctagcaaggcaggccaacattcaaattcaggaaatacagagaacaccacaaagatgctcctcaagaagagcaactccaagacacataattatcaggttcaccaaggttgaaatgaaggaaaaaatgttaagggcagccagagagaaaggtcgggaacgcagctcctcaccagcaatggaacaaagctcgacggagaatgactttgacaagttgagagaagaaggcttcagacgatcaaactactctgagctaaaggaggaagtgcgaacccatggcaaagaagataaaaaccttgaaaaaagattagatgaatggcgaactacaacaaccaatgcagagaagtccttaaaggacctgatggagctgaaaaccatggcacaagaactatgtgacgaatgcacaagccttagtagctga

SEQ ID NO: 117894 - DNA, 1593 bp, Homo sapiens; identical to SEQ ID NO: 115456

SEQ ID NO: 117895 - DNA, 1479 bp, Homo sapiens
atgggggaaaaacagagcagaaaaactggaaactctaaaaatcagagcgcctctcctcctccaaaggaacgcagctcctcaccagcaagggaacaaagctggacagagaatgactttgatgagttgagagaagaaggcttcagacgatcaaactactccgagctaaaggaggaagttcgaacccatggcagagaagttaaaaaccttgaaaaaaaattagacgaatggctaactagaataaccaatgctgagaattcttttacaaagcttcctcatctggcaggaacagaacaaaatttcttgcttgccaagaaaatccaaacccagtggaagaaatttggactagattcagccaagttggttcattatgatgtcctcttatcttaccccaatgagacaaatgccaactatatatcgattgtggatgaacatgaaactgagattttcaaaacatcataccttgaaccaccaccagatggctatgagaatgttacaaatattgtgccaccatataatgctttctcagcccaaggcatgccagaggttaaaaatgccatgttagcaggagccataggaatcatcttgtactcagatccagctgactactttgctcctgaggtacagccatatcccaaaggatggaatcttcctggaactgcagcccagagaggaaatgtgttaaatttgaatggtgctggtgacccactcactccaggctatccagcaaaagccggtagccgcctcagtcgtcagaccggtgctagcgacacgggagtggcaaacgcatcctcttgccgttcccggtgtttgggccttgcctgtgacggtgggaaaagaaaatggccttgctgtgctacaaccggggctgcggtcagcgcttcgatcctgagaccaattccgacgggctgtacaaaaggtagacataatagtgagaagccacctgagccagtcaaacctgaagtcaagactactgagaagaaggagctatgtgaattaaaacccaaatttcaggaacacatcattcaagcccctaagccagtagaagcaataaaaagaccaaggaaggttagaatgcatgtttataacatcaataaaattacaaggatttacaatgtagttggaactatcagaggatctgtggaacctgacaggtatgttattctgggaggtcaccgggactcctgggtatttggagctattgacccaaccagtggggttgctgttttgcaagaaattgcccggagttttggaaaactgatgagtaaaggctggagacctagaagaactatcatttttgccagctgggatgcagaagaatttggacttctgggttccacagaatgggctgaggcatttcttctgcctccaggatggaggtacagaatcttggccttgggccacgcactggggaccatgctgggctgccgtggtcagcgacagactcaggttctcaccaggagccccaggataagcccctga

SEQ ID NO: 117896 - DNA, 651 bp, Homo sapiens
ctttctctctggctgcccttaacattttgtccttcatttcaactttggtgaatctgacaattacgtgtgttggagttgctcttctcgaggagcatctttgtggcgttctctgtatttcctgaatctgaatgttggcctgccttgctagattggggaagttctcctggataatatcctgcagagtgttttccaacttggttccattctccccatcactttcaggtacaccaatcagacgtagacttggtctcagctcctttaaggacttctctgcattggttattctagttagccattcgtctacttttttttcaaggtttttaacttctttgccattggttcgaactttctcctttagctcagagtagtttgatcttctgaagccttcttctctcaacacgtcaaagtcattctccttccagctttgttccattgctggtgaggagctgcgttcagtctgtgtcactttcctgccacccccatcagagctggtactggtacccactgctgggagacttgaggacaggccatatctctggattccttgcaggcattccaagcagcagcctagagtatggcagccacactgggcatctagacccagaggaacaacagcattcacagtattcttgcccttagggacacctgttt

SEQ ID NO: 117897 - DNA, 1884 bp, Homo sapiens
atggatgaagctggaaaccacattctcagcaaactaacacagaacagaaaaccaaacaccacatgttctcactcggatggccctatatttgtcactgagagcagaagggttgagaacttagatcctgacaggaggcccacctttattggagaaatggctctgcaacttaggccacagaacttcttaccacttggaagcaaaatagttgctttaatggtaaccaaatgccctccttcaagacagtatttcaagaaggaggagtatacgtatattatacaaacatatccaatccctttagaagataattatcaatatcatgcagggaagctggaacacacacacaaaatcgagtactatctagaagatcaagccacaaatctcaagagaagcaagacttttgttggaaaacaaaacaaaatcttgagacatgaaggatctgtaatggacacctgtcgattgtgtctgttcagcagctcctctcccacctgtcttccagtacaacaccttatttcattggagagaaaggttctacctcttctccttaaggttttagtggacagccaaaccagtcttcagtctacagggggcagactgacacctcacacggccgggtacccctctgagacgaaacttccagaggaacgatcagacagcaacatttgctgttcagcaatattcgctgttctgcagcctctgctgctgatacccaggcaaacagagtctggagtagacctccagcaaactccaacagacctgcagctgagggtcctgactgttagaaggaaaacaaacagaaaggacatccacaccaaaaccccatctgtacgtcaccatcatcaaagaccaaaggtagataaaaccacaaagatggggaaaaaacagagcagaaaaactgaaaattctaaaaatcagagcgcctctcctcctccaaaggaacgcagctcctcaccagcaatggaacaaagctggacggagaatgactttgacgagttgagagaagaaggcttcagacgatcaaacttctctgagctaaaggaggaagttcgaacccattgcaaagaagctgaaaaccttgataaaaaattagacgaatggctaactagaataaccaatgtagagaaggccttaaatgacctgatggagctaaaaaccatggcacgagaactatgtgacgaatgcacaagcttcagtagccaattcgatcagctggaagaaacggtatcagtgattgaagatcaaatgaatgaaattaagcgagaagagaagtttagagaaaaaagaatgaaaacaaatgaacaacgcctccaagaaatatgggactatgtgaaaagaccaaatctacgtctgattggtgtacctgaaagtgacagggagaatggaaccaagttggaaaacactctgcaggatattatccaggagaacttccccaacctagcaaggcaggccaacattcaaatacaggaaatacagagaatgccacaaagatactcctcgagaagagcaactccaagacacataactgtcacattcactaaagttgaaatgaaggaaaacatgtcaagggcacccagagagaaaggtcaggttacccacaaagggaagcccatcagactaacagctgatctctcagcagaaactctaaaagccagaagagagtgggggccaatattcagtattcttaaagaaaagaattttcaacccagaatttcatatccagccaaactaagcttcataagtgatggagaaataaaatcctttacagacaagcaaatgctgagagattttgtcaccaccaggcctgccctacaagagctcctgaaggaagcactaaacatggaaaggaacaaccggtaccagccactgcaaaaacatgccaaattgtaa

SEQ ID NO: 117898 - DNA, 471 bp, Homo sapiens
atgatttgtgacaaagagtggcactactatgtcatcaatgtggagtttcctgtggtaaccttatacatggatggagcaacatatgaaccatacctggtgaccaacgactggcccattcatccatctcacatagccatgcaactcacagtcggcgcttgttggcaaggaggagaagtcaccaaaccacagtttgctcagttctttcatggaagcctggccagtctcaccatccgccctggcaaaatggaaagccagaaggtgatctcctgcctgcaggcctgcaaggaagggctggacattaattccttggaaagccttggccaaggaataaagtgttattacaactataaagctacttggaagcccttaagagggaaagctctggatgctgacatacatcacttaattcactacatgcaaagatgtacacacgtgcccaatggtttcatcagtgcccttgctggatactag

SEQ ID NO: 117899 - DNA, 675 bp, Homo sapiens
atgagccgctatgagcaggtgctacatcacatccgctaccgcaactggcgtccggcttcccttgaggcccggcgtttccggattaagtgctcagaactcaatgggcgctacactagcaatgagttcaacttggaggtcagcatccttcatgaagaccaagtctcagataaggagcatgtcaatcatctgattgtgcagcctcccttcctccagtctgtccatcatcctgagtcccggagtagcatccagcacagttcagtggtcccaagcattgccacagtggtcatcatcatctccgtgtgcatgcttgtgtttgtcgtggccatgggtgtgtaccgggtccggatcgcccaccagcacttcatccaggagactgaggctgccaaggaatctgagatggactgggacgattctgcgctgactatcacagtcaaccccatggaggtgatcctcatgcacggctgggagttctggaaacatgaaggaccagggcatggggaagatgagactgagggagaagaggaggaagaagccgaggaagaaatgagctccagcagtggctctgacgacagcgaagaggaggaggaggaggaagggatgggcagaggcagacatgggcagaatggagccaggcaagcccagctggagtgggatgactccaccctcccctactag

SEQ ID NO: 117900 - DNA, 980 bp, Homo sapiens
atggccgggtacttctctgagataaaacttccagaggaacgatcaggcagcaacatttgctgttcaccaatatctactgttctgcagactccgctgctgatacccaggcaaagagggtctagagtggacctccagcaaactccaacagacctgcagctgagggtcctgactgttagaaggaaaactaacaaacagaaaggacatccacaccaaaaccccatctgtatgtcaccatcatcaaagaccaaagaggaacgcagctcctcaccaacaacggaacgaagctggacagagaatgactttgacgagttgagagaagaaggcttcagacgatcaaactactctgagctaaaggaggaacttcaaacccatggcaaagaagttaaaaaccttgaaaaaaaaattagatgaatggctaactagaataaccaatgcagagaagtccttaaaggacctgatggagctgaaaaccacagcaagagaaatatgtgacgaatgcacaagtctcagtagccgatgtgatcaacttccacgaccagatggattcacagccgaattctacgagaggtacaaggaggagatggtaccattccttctgaaactattccaatcaatagaaaaagagggaatcctccctaactcactttatgaggccagcatcatcctgataccaaagcctggcagagacacaacaaaaaaagagaattttagaccaatatccctgatgaacattgatgcaaaaatcctcaataaaatactggcaaaccgaatccagcagcacatcaaaaagcttatccaccataatcaagtgggcttcatccctgggatgcaaggctggttcaacatatgcaaatcaataaacataatccagcatataaacagaaacaacggcaaaaaccacatgattacctcaatagatgcagaaaaggcctttgacaaaattcaacaacgcttcatgctaaaaactctcaataaattag

SEQ ID NO: 117901 - DNA, 1035 bp, Homo sapiens
  misc_feature (1)...(1035): n = a,t,c or g
gtgtggtctcttggcacaggtgtgggctccatgagccgctatgagcaggtgctacatcacatccgctaccgcaactggcgtccggcttcccttgaggcccggcgtttccggattaagtgctcagaactcaatgggcgctacactagcaatgagttcaacttggaggtcagcatccttcatgaagaccaagtctcagataaggagcatgtcaatcatctgaaaaagcagcctccttctaacatgttnngaggagaagtcaccaaaccacagtttgctcagttctttcatggaagcctggccagtctcaccatccgccctggcaaaatggaaagccagaaggtgatctcctgcctgcaggcctgcaaggaagggctggacattaattccttggaaagccttggccaaggaataaagtatcacttcaacccctcgcagtccatcctggtgatggaaggagacgacattgggaacattaaccgtgctcttcagaaagtcttctacatcaactccaggcagttcccaacggcgggtgtgcggcgcctcaaagtatcctccaaagtccagtgctttggggaagacgtatgcatcagtatccctgaggtagatgcctatgtgatggtcctccaggccatcgagccccggatcaccctccggggcacagaccacttctggagacctgctgcccagtttgaaagtgccaggggagtgaccctcttccctgatatcaagattgtgagcaccttcgccaaaaccgaagcccccggggacgtgaaaaccacaggtccaaaactcagaattttctctctaggctttcgagaatcctgtttcatgccaaataagcaactctggacatgtgcccaacttccaattcagggtttgaaggaacacagctcctcaccagcaatggaacaaagctggacggagaatgattttgatgagttcagaggagaaggcttcagacgatcaaactactctgagctaaaggaggaagttcgaacccatggcaaagaagttaaaaaccttgaaaaaaaataa

SEQ ID NO: 117902 - DNA, 4891 bp, Homo sapiens
atgctcatgaaactcccggcgaccattctgctgctgcagttgcaactcaaggctggtgctgcaaacagcaaactagaagattgtatcccacctggctcggagggtcctacgcccatggagcctcgctcattgctagcacagcagtctgagatcaaactgcaaggcagcagcaaggctgggggaggggagcccaccattcctctgctgctgatacccaggcaaaaagggtctggagtggacctccagaaaactccaatagacctgcagctgagggtcctgactgttagaaggaaaactaacaaacagaaaggacatccacaccaaaaccccatctgtacgtcactatcatcaaagaccaaaggtagataaaaccacaaagatggggaaaaaaacagagcagaaaaactgaaaattcttaaaaatccagagtgcttctcctcctccaaaaggaacacagctcctcaccagcaacagaacaaacctggacggagaatgacatttgacgagttgagagaagaaggcttcagaagatcaaactactccgagctaaaggaggaagttcgaacccatggcaaagaagttaaaaaccttgaaaaaagattagatgaatggctaactagaatggatgaatggctaactagaataaccaatgcagagaagtccttaaaggacctgatggagctgaaaaccaaggcacgagaactacatgacgaatgcacaagcctcaggagccgattcgatcaactggaagaaagggtatcagtgatggaagatgaaatgaatgaaatgaagcgagaagagaagtttagagaaaaaagaataaaaagaaacgaacaaagcctccaagaaatatgggactatgtgaaaagaccaaatctacgtcggataggcgtacctgaaagtaacggggagaagggaaccaagttggaaaacactctgcaggatattatccaggagaacttccccaaatctagcaaggcaggccaacattcaaattcaggaaatacagagaacaccacaaagatactccttgagaggagcaactccaagacacctaattgtcagattcaacaaagttgaaatgaaggaaaaaatgttaagagcagccagagagaaaggtcgggttacccacaaagggaagcccatcagactaacagctgatctcttggcagaaactctaaaagccagaagagagtgggggccaatattcaacattcttaaagaaaagaattttcaacccagaatttcatatccagccaaaataagcttcatagacagatcaacgagacagaaagttaacaaggatacccaggaattgaactcagctctgcaccaagcggacctaatagacatctacagaactctccaccccaaatcaacagaatatacattcttttcagcaccacaccacacctattccaaaattgaccacatagttggaagtaaagcactcctcagcaaatgtaaaagaacagaaattataacaaactgtctctcagaccacagcgcaatcaaactagaactcaggattaagaaactcactcgaaaccactcaactacatggaaactgaacaacctgcttctgaatgactactgggtacataatgaaatgaaggcagaaataaagatgttctttgaaaccaacgagaacaaagacaaaacataccagaatctctgggacacattcaaaacagtgtgtagagggaaatttatagcactaaatgcccacaagagaaagcaggaaagatctaaaattgacaccctaacatcacaattaaaaggacttgagaagcaagagcaaacacattcaaaagctagcagaaggcaagaaataactaagatcagagcagaactgaaggaaatagagacacaaaaaacccttcaaaaaatcaacgaatccaggagctggttttttgaaaagatcaacaaaattgatagaccgctagcaagactaataaagaataaaagagaggagaatcaaatagacgcaataaaaaatgataaaggggatatcaccactgatcccacagaaatacaaactgccatcagcgaatactataaacacctctacgcaaataaactggaaaatctagaagaaatggataaattcctcgacacctacaccctcccaagactaaaccaggaagaagttgaatctctgaatagaccaataacaggctctgaaattgaggcaataattaatagcttaccaaccaaaaaaagtccaggaccagatggattcatggccgaattctaccagagggacaaggaggagctggtaccattccttctgaaactgttccaatcaatagaaaaagagggaatcctccctaactcattttatgaggccagcatcatgctgataccaaagcctggcagagacacaacaaaaaaagagaattttagaccaatatccctgatgaacatcgatgcaaaaatcctcaataaaatactggcaaaccgaatccagcagcacatcaaaaagcttatccaccatgatcaagtgggcttcatccctgggatgcaaggctggttcaacttacgcaaatcactaaacgtaatccagcatataaacagaaccaatgacaaaaaccacatgattatctcaatagatgcagaaaaggcctttgacaaaattcaacagcccttcatgctaaaaactctcaataaattaggtattgatgggatgtatctcaaaataataagagctatctatgacagacccacagccaatatcatactgaatgggcaaaaactggaagcattccctttgaaaactggcacaagacagggatgccctctctcaccactcctattcaatatagtgttggaagttctggccagggcaatcaggcaggagaaggaaataaagggtattcaattaggaaaagaggaagtcaaattgtccctgtttgcagatgacatgactgtatatttagaaaacgccatcgtctcagccccaaatctccttaagctgataggcaacttcagcaaagtctcaggatacaaaatcaatgtgcaaaaatcacaagcattcttatacactaataacagacaaacagagagccaaatcatgagtgaactcccattcagaattgcttcaaagagaataaaatacctaggaatccaacttacaagggatgtgaaggacctcttcaagcagaactacaaaccactgctcaatgaaataaaagaggatacaaacaaatggaagaacattccatgctcatgggtaggaagaatcaatatcgtgaaaatggccatactgcccaaggtaatttacagattcaatgccatccccatcaagctaccaatgactttcttcacagaattggaaaaaactactttaaagttcatatggaaccaaaaaagagcccgcatcgccaagtcaatcctaagccaaaagaacaaagctggaggcatcacactacctgacttcaaactatattacaaggctacagtaaccaaaacagcatggtactggtaccaaaacagagatatagatgaatggaacagaacagagccctcagaaataatgccgcatatctacaactatctgatctttgacaaacctgagaaaaacaagcaatggggaaaggattccctatttaataaatggtgctgggaaaactggctagccatatgtagaaagctgaaactggatccctttcttacaccttatacaaaaatcaattcaagatggattaaagatttaaacgttagacctaaaaccataaaaaccctagaagaaaacctagacattaccattcaggacataggcgtgggcaaggacttcatgtccaaaacaccaaaagcaatggcaacaaaagacaaaattgacaaatgggatctaattaaactaaagagcttctgcacagcaaaagaaactaccatcagagtgaacaggcaacctacaacatgggagaaaattttcgcaacctactcatctgacaaagggctaatatccagaatctacaatgaactcaaacaaatttacaagaaaaaaacaaacaaccccatcaaaaagtgggtgaaggacatgaacagacacttctcaagagaagacatttatgcagccaaaaaacacatgaaaaaatgctcatcatcactggccatcagagaaatgcaaatcaaaaccactatgaggttttactgggatttaataatgcttataatgatggttggaaatctagtcatcataccagttggaatcacattctttacagagcaaacaacaacaccatggattattttcaatgtggcatcagatacagttttcctattggacctgatcatgaattttaggactgggactgtcaatgaagacagttctgaaatcatcctggaccccaaagtgatcaagatgaattatttaaaaagctggtttgtggttgacttcatctcatccatcccagtggattatatctttcttattgtagaaaaaggaatggattctgaagtttacaagacagccagggcacttcgcattgtgaggtttacaaaaattctcagtctcttgcgtttattacgactttcaaggttaattagatacatacatcaatgggaagaggaacgcagctcctcaccagcaacagaacaaagctggacggagaatgactttgataagttgagagaaggcttcagacgatcaaactactctgagctaaaggaggaagttcgaacccttggcaaagaagttaaaaaccttgaaaaaaaattagacgaatggctaactagaataatcaatgcagagaagtccttaaaggacctgatggagctgaaaaccatggcacgagaactacatgaccaatgcacaagcctcagtagccgatttgatgaactggaagaaagagtatcagtgatggaagatcaaatgaatgaaatgaagtga

SEQ ID NO: 117903 - DNA, 1516 bp, Homo sapiens
atgtatgcacagcccccaaattgtaagagagaaaaagcgagcggtgatgtctccctctactggtggaagttagcaaagggatgtttgcaaatggaagtctccgaaggtgcacccaactctgcatcaaccccaacagggaacacagtctctcaggagcttaaccgaccactgccgacagccaccttatccgagaaggttctcgtgggtgtgcaggagctctttgcaggcttaggtggcagagagtgcgaccaagaccagtgcattcagagcaccaaattcgttttgcaggctgcagccacgcccctgctgcagagcgagcccagcctcaccagcgacgagctgcacctgcccgggaagcctggcctgggcacgccctgcgccagcctcacactgggcccgcccacaccgcccgcctccatgcccaacctcgccgaggccacgctcgcggacgtgatgccccggaaagatgagcacatgggccaccagttcctgacgcccgatgaggcgccctcgccccccaggctactggcggcgggcagccccctggcgcacagccgcaccatgcacgtgctgggcctggccagcccaggactcccctgcatgaggactctgtgcgcggcctggtgaacctcagctccgtgtgaccccacatggcccccaggccgggggaacacccagaggctccctcccatgggcaagccaggagtgagcggaggggtgtgtccccacagcgactttccccagccaatgcccacggtggagatgacaggccccaggtctggggtacagagacccacttaggatggcacagggtggctggccccggatgctgagagcttggtttcatttgaattttcttccccaacctgagtgctttgacaacaatggaaatagagaagtggctgctttcttttggtgaccctccaggggtggaatcggagtgtgtctgcccgcccttgtgacagacacacggaaggcttctgaccgcttgtggccagaactgcaattgcacttatgtgttatgctactaatatttgaaaccagacctgcccattccatttgttaattaaaaaaaaaaaaaaaatcctaaaagggaaaaaaaccgaccaggtgtggatctgccatgcccacgctgccgtcctgtgttacagtggtgttgcctaatttcccaaggaagtgcctgctttctttttctttttttaattttgtgaattttcaagtgctgttttgttggaagacagtgcaacgatactgagacttaatggacagtgtcatcactcagcttactgggctgaggcgtctgtggagaggtggcaccggggctgcagagggcaggctggggttccgtcgtgtcgggtgtcacttcaccttctgtttggccgctcgatgaggtctcgtgttgagatattgtgtgccacaacccccacagttttcacctccgtgtgtgatgaaacttcccgtggacagccaataaaatgacgtcctctgttattttggaaaaaaaaaaaaaaaaaaa

SEQ ID NO: 117904 - DNA, 447 bp, Homo sapiens
  misc_feature (1)...(447): n = a,t,c or g
aaatcccgcgtcgacccacgcgtgcggtgatacaggcctaggttattggaattgtaagtggaagtgaaatagagattttatttgtgtgtgcatttatttaacaaacattaattatctccttgattaataaagcactgttcctgccctcaagtagttcatggggggctagtccaagaacaattaaatatagtatgactatacatttatgtaggaatctaatgtgtcatttcttgcagagaatgggaacaattctcctttgcccaaatatgcaacctcaccaaaacctaacaacagttatatgttcaaaagggaacctcctgagggctgtgaaagggtcaaagtctttgaggaatgctcgtaagtatcccttccaccatccgcccnnggnggaaccccccaatggggggcaaacaaggnnggggggggcgcggtttaaacaacccacga

SEQ ID NO: 117905 - DNA, 909 bp, Homo sapiens
atggtggaaggcaaagggggaaagacacaggtcacatggccaagcaggagcaagagagagaagtgggaggcgctacacacctttaaacaaccagatttcgctcctgttccaaagagtgcacttattcctgtaattcccatcaccaaatcaacaggctcccggttccggaatagcgtggaaggattgaatcaggagattgaaataataattaaagagactggggaaaaggaagagcaacttataccgcaagatattccagatggccatcgtgctccacccccccttgtacagagaagtagcagcacgcgcagcattgacacacagacgcctggtggggcagacaggggaagcaacaacagcagccgttcccagtccgtgtccccaacatcgttcctcaccatttccaatgaaggtagcgaggagagtccttgctcagcggatgacctgcttgttgatcccagagataaagagaatgggaacaattctcctttgcccaaatatgcaacctcaccaaaacctaacaacagttatatgttcaaaagggaacctcctgagggctgtgaaagggtcaaagtctttgaggaatgctcgccaaaacagcttcatgaaatcccagccttttattgtcctgacaaaaacaaggtgaatttcattcctaaaagtggatctgctttctgcctcgtcagcatcctcaagccactccttcctaccccggatcttacactcaagggctctggccacagcctgacagtcaccactggcatgacaaccactctgctgcagcctattgctgtggcctccctgtctacaaacacagagcaagaccgagtctctcgaggaacaagtacagtcatgccatcagcttctctactcccaccaccagaaccaattgaggaagctgaaggatag

SEQ ID NO: 117906 - DNA, 454 bp, Homo sapiens
acggccttgagatgggccctatcgaggtgttgccatggtcgtgtacctcggtaaactaagcaaaaataagtcagttgtacactattagtctgtaaaagggctctccaaatggctcaaggttcaggcctcacaaaccctgcattcgcccgtgccagtccactctggtagaggtaaaaggagaaaaatagctatggaagcgctttaactcgtggacctctttgcgacacccctatcaaccctatcaggcagaacaaattgctccgcaaacctgcggctcgcagagcgatggtggactaccgagctcatcgggtccggcacctcttcaccacgcaggcctcgggtacggaactgaagggagtcctggtgctcggaggagggtggaaggccaagatccctaggtcctggagcaggcagccgggcccacgccgccgaggtatcttgtccgtccacgaaa

SEQ ID NO: 117907 - DNA, 561 bp, Homo sapiens
tcaattaatgaattgaattcccggaagctggcgccagaagatgccggttccgccagctgctcgccgcgcatgcgcaggggagacccggggccttgcagtcaccgggctcaagcacgccggcgcagccaggctcgcgatgggaggtgggggggccggcagccccgtggggctcattgcgacacccttaacaaccctatcaggcagaacaaattgctccgcaaacctgcggcttgcagagcgatggtggactcccgagctcatcgggtccggcacctcttcaccacggaggcctcgggtacggaactggagggagtcctggtgctcggaggagggtggaaggccaagatccctaggtcctggagcagggagccgggcccacgccgccgaggtatcttttccgtccgggccaccgtcgcgggggctcactggcagcggcttctgcgcatgctcggaagagcgggcagggttcccacgtgagctcatggtgataaagaatacagtgactccaacacgtgaggccactaccttgattcttacaaaggcaccagcaattttacccat

SEQ ID NO: 117908 - DNA, 540 bp, Homo sapiens
tttttccagcccatcttttgggggaaagaccctcaaagtgggaccccgccccacccccacctggccccgccccctctggtccggagccttccatctccatggttacgcggcggtggctgcgagcgcccaactgctccgaccgtcgcggtgagggccccaggacagaagcagacagacacggctcctgctgtcgattccgatccagagctggaacagcggtccattcctgccggaggcgccaccccagggctgcagggctgccctctagcctttgcgcggaagccggacctcgggagacttagtaattggagggtgggtgcagggaaggtgctgagccgcgtccctagcgacccggcagcggcgcgcatgcgcacacagatccggagcgcgcacacagatccggagcgcgcacacagatccggagcgcgcacacagatccggagcgcgcacacagatccggagcgcgcacacagatccggagcgcgcacacagatccggagcgcgcacacagatccggagcgcgacggactctcccactga

SEQ ID NO: 117909 - DNA, 2412 bp, Homo sapiens
atggggtttcaccatgttggccaggctggtctcgaactcctgacctcagcagaatcagaaagtctggtaaatgggaaccacaccccacagactgcaacacggggaccctctgcctgtgccagccacagttccctggtgagctctattgagaaggacctgcaagagatcatggactcactggtgctagaggagcctggagctgctggcaagaagcctgccgcaacctctccactgtcaccgatggctaatggtgggcgctacctgctgtctcccccaaccagccccggcgccatgtctgtgggctccagctatgagaacacctctccagccttctctccactctcttcaccagccagcagtggaagctgtgccagtcactcacccagtgggcaagagccaggaccttctgtgcccccgctggtacctgcccgttcctccagctaccatctggccctacagcccccacagtcccgcccaagtggtgctcgctccgagagtcctcggctgagcaggaaagggggccatgagaggcctcccagccctggcctccggggtctgctgacagacagccctgcagctactgtcttggcggaggcccggagagccactgagagcccccggctgggtgggcagctgcctgtggtggccatcagcctgagtgaatacccagcttctggtgctctcagtcaacccaccagcattcctggcagccccaagtttcagcctccagtccctgctccccgaaacaagattggcacactccaggaccgccctcccagccctttccgtgagcctccaggcagtgagcgggtgctaacaaccagcccctcacgccaactggtgggccgaacattttcagatgggttagccacccgtaccctgcagcctcctgagagtccccgcctgggccggcggggcctggacagtatgcgagaactaccccccttaagtccatctctgtcccggcgagctctctccccgctgcccacccggaccaccccagatcccaagctaaacagggaagtggcagagagtcctcggccccggcgctgggcagcccatggggcttcaccagaggacttctccctgacgctgggggcacggggccgtaggacacggagcccctcacccacactgggtgagtctctggcaccccacaagggcagcttcagtggcaggctgagcccagcctacagtctgggctctcttactggggcttcaccctgccagagtccctgtgtccagaggaagctctccagcggggacttgcgggtgcctgtcacaagggagcggaaaaatagcatcacagagatcagtgacaatgaggacgacctcctggagtaccaccggcgacagcgccaagagcggctccgggagcaggagatggagaggctggaacgccagcgcctggagaccatcctgaacctgtgtgccgaatacagccgggctgatgggggacctgaggctggggagcttcccagcattggggaggccaccgcagcattggcactggcaggccggaggccctcacgaggccttgcaggggcctctgggcggagcagcgaggagcctggcgttgccacccaacgcctatgggagagtatggagcgctcagatgaggaaaatctcaaggaggagtgcagcagcactgagagcacccagcaggaggtgctagccctggaagaagagcgggctcaggtgctggggcacgtggagcagctcaaggtccgtgtgaaggagctagagcagcagctgcaggagtcagcccgagaggccgaaatggagcgggcactgctgcagggagagagggaggcagagcgggcactgctgcagaaggagcagaaggcagtggatcagctgcaggagaagctggtggccttggagacaggcatccagaaggagagggacaaggacctccagcgtcaatgttgtgggatgatgggtgacagagccaaagcatcgccatcttggacaagcacggtcattctgaagttccccttgatcaaaaactgcctaaacccaaaggatatcagcctgatggctaaggagctctggagccttaggaccatggacgctctcaataggaaccaaataggccctggatgccagacccagaccatggtgcagaaaggacccttggacctgatcgagacaggcaaagggctgaaagtgcaaacggacaaaccccacctggtgagcctgggcagtgggcgactcagcacagccatcaccctcctgccgctggaggaagactgcctgccttccttggtagatgatctggttccacgactgggcttaaagatcagcttagaaacaaggaggagaggccagttgatgttatgcacaccaaagtttgagaaccagtggcctacaactgataagatgcctgaaacctccacgggctcccactga

SEQ ID NO: 117910 - DNA, 642 bp, Homo sapiens
  misc_feature (1)...(642): n = a,t,c or g
atgggccctgtggtcccactccnggtgttcacnnnnctgtgtaacctcctcccctggagcgcnngaaaacatcctactaaagccctgggaaaagagacaaatggtgaagaggagaatgaaaggttgcaggagggagctcctgttttagccctgccacctacctgggggccctctggctaccagtgtccttggaggggcttccttgctgcttctcccactaaggagctctggagccttaggaccatggacgctctcaataggaaccaaataggccctggatgccagacccagaccatggtgcagaaaggacccttggacctgatcgagacaggcaaagggctgaaagtgcaaacggacaaaccccacctggtgagcctgggcagtgggcgactcagcacagccatcaccctcctgccgctggaggaagggaggacggtgattggctctgcagccagagacatctcactacagggcccaggcctggctccagagcactgctacatcgagaacctgcggggcaccctcaccctctacccctgtggcaatgcctgcactattgatgggctccctgtccggcagcctacccggctcactcagggcctttcaatgtcacttccttcacagctgatccaggagacctga

SEQ ID NO: 117911 - DNA, 1761 bp, Homo sapiens
atggccctgctccccactgttttgtgtctatgggcacaggcacaggtgggtgtccagagacataatcacatcttctggaatgagaaggagcatggccatgggaagagcgggagctgccacaacggggcgagctgcagcgccgaggacggggcctgccactgcacccctggctggactggactcttctgcacacagcgtaagccccacctcctggcctcccagccacttagaataccatgctgcggcctactggccactgtgggcattgtccagaccagcagggagggaggaatgcaggcagccccaggactggtggtacctgactcctgccccacgagaactgaggagctctgcaggggcagctccagacctgactggattcaggggattgacaagcccaaagtcctgcaaggctgcccagcagcattttttgggaaggactgtgggcgcgtatgccagtgtcagaatggcgccagctgtgaccacatcagtggcaagtgcacctgccgcacaggcttcaccgggcaacactgtgaacagagatgtgccccaggaacctttggctatgggtgtcagcagctatgtgagtgcatgaacaactccacctgtgaccatgtcaccggcacctgttactgcagccctggcttcaaaggaatcaggtgtgaccaaggcatcatgctcctgttattcctcattgtggtgctgctgggcctatttgcctggcatcggcggcggcagaaagagaagggccgagacctggctccccgtgtctcctacacacctgccatgaggatgaccagcaccgactactccctctcaggatctaacagatcactatctccgtttttcaatgcccatcatggtcctcacctcctccaaggagcctttcctggttccccagggagacacagggtgaacttgggctcctctttgtggcatgaatgtaaaccgccctggaacgcagagttgggctgcgacagcgaccactgggggccccactgcagcaaccggtgccagtgccagaacggcgccctgtgtaaccccatcacaggcgcctgcgtgtgcgccgccggcttccgtggatggcgctgcgaggagctctgcgcacctggcacccacggcaagggatgccagctgccgtgccagtgccgacacggtgccagctgcgacccccgcgccggcgagtgcctctgcgcacctggctacaccggcgtctactgccacccagtaactggagcttgtacctgccagccaggctggtctggtcaccactgcaatgaatcctgccctgttggctactatggcgatggctgccagctgccttgcacctgtcagaatggcgccgactgccacagcatcactgggggctgcacttgtgctccgggcttcatgggagaggtctgtgccgtttcctgtgcagcagggacctatggccccaactgctcgtccatctgtagctgtaacaatggtggcacctgctccccaatagatggctcctgtacctgcaaggaaggtaatgtgccctctctcccaagcccatccctgacatatgagcacattccccaggtggtgctgccagctgaggggtctcaggatggcacatttgggctgaactgcagtgaacactgtgactgcagccatgctgatggatgtgaccccgtcacaggccactgctgctgcctggccggatggacagacatccaagaaggcttcctggagaaggagggccctaaacggaccctgaaggatatgggctgctga

SEQ ID NO: 117912 - DNA, 2416 bp, Homo sapiens
tgagtttgagtcaagctccgagtcctcgccctcatcctcggaggatgaggaggaggtagtggccagggaagaggaggaagaagaggaggaggaggagatggtggccgaggaaagcatggcttctgcaggccctgaggactttgagcaggacggggaggaagcggctctggccccgggggcacctgcagtggactcgttgggcatggaagaggaggtggacatcgagactgaggctgtggcccctgaggagcggccctccatgctggacgagccccccttgcctgtgggtgttgaagagccagcggactccagggagccgcctgaggaaccaggcctgagccaggaaggggccatgttgctgtctccagagccccctgccaaggaggtggaggctcgacccccattgtcccctgagcgagctccagaacatgacctggaagtggagccggagccccctatgatgctccccttgccgctgcaaccaccattgccgcccccacgaccaccccggccacccagcccaccgccggagcctgagaccacagatgcctcacacccatctgtccctccggagccccttgccgaggaccaccccccgcatactccaggcctctgtggcagcctggccaagtcgcagagcacagagacggtgccagccacaccaggcggggagcccccgctatcagggggcagcagtggcctgtccctgagctctccgcaagtgcccggcagccccttctcctacccagccccgtcccctagcttgagcagtgggggcctccctcggacacctggccgggacttcagcttcacacccaccttctccgagcccagcgggcccttgctcctgcccgtctgcccactccccactggccgacgcgatgaacgctccgggcccctggcctccccggtgctcctggagacgggcctgcccctccctctgccccttcccctgcccttgcccttggcattgcccgccgtcttgcgggcccaggctcgtgcgcccaccccgctgccacccctgctgcccgcccccctggcctcttgccctcccccaatgaagaggaagccgggccggccccggcgatccccaccatctatgctctccttggatgggcccttggtccgaccaccagcaggggccgcccttggaagggaactcctgctcctgccgggccagccacagacccccgtcttccccagcacccatgacccccggacggtgaccctggacttccggaacgcggggatcccagcccctccaccaccccttcccccccagccacccccacccccacctcccccacctgtagagcccaccaagctgccctttaaggagctagacaaccagtggccctccgaggccattcctccgggcccccgtgggcgcgatgaggtcactgaggaatacatggagttggccaagagccgggggccgtggcgccggccacctaagaagcgccatgaggacctggtgccacctgcaggctcgcccgaactctcgccaccccagcccctcttccggccccgctcggagtttgaggagatgaccatcctgtatgacatctggaacggtggcatcgatgaggaggacatccgcttcctgtgtgtcacctacgagcgactgctacagcaggacaatggcatggactggcttaacgacacgctctgggtctaccatccctccaccagcctctcttcagctaagaagaagaaacgggacgatggcatccgcgagcacgtgacgggctgtgcccgcagtgagggcttctacaccatcgacaagaaggacaagctcagatacctcaacagcagccgtgccagcaccgatgagccccccgcagacacccagggcatgagcatcccagcacagccccacgcctccacccgggcaggctcggagcggcgttcggagcagcgccgcctgctgtcctccttcactggcagctgtgacagtgacctgctcaagttcaaccagctcaagttccggaagaaaaagctcaagttctgcaagagccacattcacgactggggcttgttcgccatggagcccatcgcggctgacgagatggtcatcgagtacgtgggccagaatatccgtcaggtgatcgcagacatgcgggagaagcgttatgaggacgagggcatcgggagcagctacatgttccgggtggaccatgacaccatcatcgacgccaccaagtgcggcaacttcgcgcgcttcatcaaccacagctgcaaccccaactgctatgccaaggtgatcacggtggagtcacagaagaagatagtcatctactcgaagcagcacattaacgtcaatgaggagattacctatgactataagttccccatcgaggacgtcaagatcccctgcctctgtggctccgagaactgccgggggaccctcaactag

SEQ ID NO: 117913 - DNA, 852 bp, Homo sapiens
gatgaggaggaggtagtggccagggaagaggaggaagaagaggaggaggaggagatggtgcccgaggaaagcatggcttctgcaggccctgaggactttgagcaggacggggaggaagcggctctggcccggggggcacctgcagtggactcgttgggcatggaagaggaggtggacatcgagactgagcctgtggcccatgagaagcggccctccatgctggacgagccccccttgcctgtgggtgttgaagagccagcggactccagggagccgcctgaggaaccaggcctgagccaggaaggggccatgttgctgtctccagagccccctgccaaggggttggcccaccccaatggatcgcagaaagttatattccgtgtgcccctgcgtgtcatccacggcccaaaagcggtggaactgcaggtttttccaggactccataaacaaccaaccaaccaaccaaaaaagaaccatgtgacccgcattcctggtttaagtcttgctaccacctacttttcattccagtgggaatcagcagacctcccccaacccaaccattacagctaccatcttcgcttccactgcttctgtgctttggctgtcttagatacttgcatgtcatctaattctgggtatttcaaggctgtgttggaatcatacagctctaaggtcttgtcagtaacacagtatggaaatccgagggccacggggtcggcggggcttcgaggccgccccgggtcccaccggctcctccggaagccgcggaccggcctggccctgaccccaggccgccccccgctgcccacccagctctgggcgcccaggtccgacctcccagtcgccctctga

SEQ ID NO: 117914 - DNA, 1999 bp, Homo sapiens
gagcacagggatcagttgtccctggtttattttgggcttttcttcaattggaggtaaactgcttattggagtccccaatcattcaggggaaattccatttccgtttggagcgtatatccgttgtggagcctcaagaaagaaaaagactaagcttcaggaaatcagagatttagccctagaaataatctctggtcaagaagttgtaagagagattgaaaaccagaaaacagatgcagctagcaaaccgtttgcggaggtacggatactcagttgtggagagctgattcccaaatctaaaggtgagctcatctgtatcgacaactccaactaccacttatataccaatgactcacaaagccatcttcagctcatacttcctctgggatggcagatcagcatttctgaccatctacaagatgatgtcctcacacccacaggaagaggaagaagaggaagaagaagaaggaggagaaggagaagagaggaagaggaggaaaaaggaagaagaaagaggaaagaggaggaagaggaggaggaggatgaagtagagaaggaggaggacgaggaagagaaggaagaggaggaagatgaagtagagaaggaggaggaggagaaggaacatgaggaagaagaggaaagaaggaaaaaatatgaagaaaaagatgctgaggaaataaagcgacagaatgcattatatgaaattgaaatgagaaaaaaactagaaaagaaaagagaagagatgcatgaaagcaggagacggtttcttgcgcctctcttctctagcccgaccgccaactgcagcacctcccttgttcctcggctacggctggcgtcacttccggcggcgttgccaagcaaccgcgtggtacgagtaacaactccaccggctggcgtccgcggcgcttggcgccacagtcacttttccagatctaggagcatcatggacacctcgtcagagatgctggtacggtttggacggcgctgtggacgggcgaaggaaagtacaggcagagattggaacagtttgaagagctcagaagaagacaggaaaatgtgggaaagtttggaacttcctagagacttgttgaatgcctttgaccaaaatgctgatagcgacatggacaataaaatgcaggctgagatggtctcagatggagatgaggaactttctggaaactggagtaaaggtgattcttgctatgttttagcaaaaagactagcgtcattttacctctgccctagagatttgtggaactttgagaaagatgatttagggtacctcgcagaagaaatttctaagcagcaaagcattcaagaggcccagagatccaggaggaaaaaatggttttatgggccaggaccagggtccctgtgctgtgtgcagcctatagacttggtgccctgtgtcccagctgctccagccatggctgaaaggggccaatgtagagctcatgctgtggcttcagagggtggaagccccaagccttggcagcttccacatggtgttgagcctgtaggtgcacagaagtcaagaattgaggtttgggaacctccacctagatttcagaagatgtatggaaatgcctggatgtccaggcaaaagtttgctgcagaggcagggcctcatggagaacctctgctagggcaatgcagaagggaattgtggggccggagctcccacgtagagtccctaatggggcattatctagtggagctattaagtattggagccatgggaataaaggttcaacgtcctcgatgtttttttgacattgccattaacaatcaacctggtgaaaaggggaccgggaaatcaactcagaaaccattacattataagagttgtctctttcacagagttgtcaaggattttatggttcaaggtggtgacttcagtgaaggaaatggacgaggaggggaatctatctatggaggattttttgaaggtcctgcaatgggtcccaatgctacaaacaattttacaaagctagcaggatga

SEQ ID NO: 117915 - DNA, 1238 bp, Homo sapiens
ggcacgaggaagttgggaagcactatggattaggaacctttctgtaaaataatgtcaccatttcttcttactgtcatcccattaactggttctttctaaaggaaaagaacacttacttggaataaaggaacatgaggaagaagaggaaagaaggaaaaaatatgaataaaaagacgctgaggaaataaagcgacagaatgcattatatgaaattgaaatgagaataaaactagaaaagaaaagagaagagatgcatgaaagcaggagacggtttcttgaacatatgcaggataaacatattatcaaagctgtagaacagcagcagcagccagaggaagaagatgaaaagatgagaaaattcatcaaagcaaaaaaagcgtcttatacaaatggggaaagaaaaagaggctgaaacacacaggcttatggagaaacgaagagaaagaatacataacttcctgagtgaactgttgaaagagaaacttgacaatgaagatatgattattgctagagatattgcagaagctgaggctgaatgggaaaaaagagaaagagaaaaagatgaaaaaaaccaagccgaattaaaaacaattgcagaatatcgagccattgtgatgaaaaataaagaggaagaagaaagacaaagaaaaatagaggctaaagaacaattgctggctgtcatgaaagcagatcagattttctgggaacatgaaaaggagaaaaaatgcaaagctgataaagaacatcaagaggttcaagatgcccatattcagcaaatggccaaaaataagtttaatgcaaagcaagcaaaacaagcagaattagattattgcagacttactgaagctcttgtggctgaaaaggagaaagaatttcaggactatgccagagaggtaattgaacttgaatcggaaacaccaaataaatatatttaccctcttgtaaaagctgtacaggaaggacctggaggtggccgtggaccagtgtttgtggacagaggtggattaagacccagctatcaggcaaatgatgttactggagtccagctccctttttataactctcagggaccaaaatataattttcaaaagtcaaagagaaggctaggttttacatggtagaaaaaaattatttttaacattgagaagactaagttgtagcatatatgagcttcaaatataaatggatttcagttaataaagctgttcttcatttaagtaaaaaaaaaaaaaaaaaaa

SEQ ID NO: 117916 - DNA, 2808 bp, Homo sapiens
atggagtactattcagccatcaaaaagaatgagatcccatcatttgcaaggacatggatggcactggaggccattatgttaagtgaaataagccagaatctcaagcaatatttccaggcacgtttcctgcatttcatagatgaagaaacaggctccaagaagtcaagcaacaaaaggattctgcagtccagaaacacacaggacaccttcaagaactcagtgaataagactattgagagacacacaaaacagcaagctatttctctcttcaaacatgatgccacgggctggctcctcatggaccccgttggcctccagctcggcaacaagaacctgtggagctgtcttgtgaggctgctcaccaaagacccagaatggctgaacgccaagatgaagttcttcctccccaacacggacctggattccaggaacgagaccttggaccctgaacagagagtcatcctgcaactcaacaagctgcatgtccagggttcggacacctggcagtctttcattcattgtgtgtgcatgcagctggaggtgcctctggacctggaggtgctgctgctgagtacttttggctatgatgatgggttcaccagccagctgggagctgaggggaaaagccaacctgaatctcagctccaccatggcctgaagcgcccacatcagagctgtgggtcctcaccccgccggaagcagtgcaagaagcagcagctagagttggccaagaagtacctgcagctcctgcggacctctgcccagcagcgctacaggagccaaatccctgggtcagggcagccccacgccttccaccaggtctatgtccctccaatcctgcgccgggccacagcatccttagacactccggagggggccattatgggggacgtcaaggtggaagatggtgctgacgtgagcatctcggacctcttcaacaccagggttaacaagggcccgagggtgaccgtgcttttggggaaggctggcatgggcaagaccacgctggcccaccggctctgccagaagtgggcagagggccatctgaactgtttccaggccctgttcctttttgaattccgccagctcaacttgatcacgaggttcctgacaccgtccgagctcctttttgatctgtacctgagccctgaatcggaccacgacactgtcttccagtacctggagaagaacgctgaccaagtcctgctgatctttgatgggctagatgaggccctccagcctatgggtcctgatggcccaggcccagtcctcacccttttctcccatctctgcaatgggaccctcctgcctggctgccgggtgatggctacctcccgtccagggaagctgcctgcctgcctgcctgcagaggcagccatggtccacatgttgggctttgatgggccacgggtggaagaatatgtgaatcacttcttcagcgcccagccatcgcgggagggggccctggtggagttacagacaaatggacgtctccgaagcctgtgtgcggtgcccgcactgtgccaagtcgcctgtctctgcctccaccatctgcttcctgaccacgccccaggccagtctgtggccctcctgcccaacatgactcagctctatatgcagatggtgctcgccctcagcccccctgggcacttgcccacctcgtccctactggacctgggggaggtggccctgaggggcctggagacagggaaggttatcttctatgcaaaagatattgctccacccttgatagcttttggggccactcacagcctgctgacttccttctgcgtctgcacaggccctgggcaccagcagacaggctatgctttcacccacctcagcctgcaggagtttcttgctgccctgcacctgatggccagccccaaggtgaacaaagacacacttacccagtatgttaccctccattcccgctgggtacagcggaccaaagctagactgggcctctcagaccacctccccaccttcctggcgggcctggcatcctgcacctgccgccccttccttagccacctggcgcagggcaatgaggactgtgtgggtgccaagcaggctgctgtagtgcaggtgttgaagaagttggccacccgcaagctcacagggccaaaggttgtagagctgtgtcactgtgtggatgagacacaggagcctgagctggccagtctcaccgcacaaagcctcccctatcaactgcccttccacaatttcccactgacctgcaccgacctggccaccctgaccaacatcctagagcacagggaggcccccatccacctggattttgatggctgtcccctggagccccactgccctgaggctctggtaggctgtgggcagatagagaatctcagctttaagagcaggaagtgtggggatgcctttgcagaagccctctccaggagcttgccgacaatggggaggctgcagatgctggggttagcaggaagtaaaatcactgcccgaggcatcagccacctggtgaaagctttgcctctctgtccacagctgaaagaagtcagttttcgggacaaccagctcagtgaccaggtggtgctgaacattgtggaggttctccctcacctaccacggctccggaagcttgagcaaggaaggtctggggcccctggggtaggggattccactcctgacacctttgccacaatcttgcagcctgagcagcaacagcatctgcgtgtcaaccctactctgcttggcaagggtggcagtcacgtgtcctaccgtcaggatgcttcaggccagggcaaaggtctctttctggacagctag

SEQ ID NO: 117917 - DNA, 2787 bp, Homo sapiens
atgcaaactaccatcagagaatactataagcaactctatgcaaataaactagaaaatctagaagaaatggataaattcctcgacacatacaccctcccaagactaaaccaggaagaagttgaatctctgaatagaccaataacaggctctgaaattgtggcaataatcaatagcttaccaaccaaaaaaagtccagcaccagatggattcacaaccaaattctaccagagaaccgaagacaaaaaccacatgattatctcaatagatgcagaaaagacctttgacaaaattcaacaactcatgctaaaaactctcaataaattaggtattgatgggatgtatctcaaaataataagagctatctatgacaaacccacagccaatatcatactgaatgggcaaatactggaagcattctctttgaaaactggcacaagacagggatgccctctctcaccactcctattcaacatagtgttggaagttctggccagggcaatcaggcaggagaaggaaataaagggtgttcaattaggaaaagaggaagtcaaattgtccctgtttgcagatgacatgattacatatctagaaaaccccattgtctcagcccaaaatctccttaagctgataagcaacttcagcaaagtctcaggatacaaaatcaatgtacaaaaatcacaagcattcttatacaccaataacagagaaacagagaaccaaatcatgagtgaactcccattcacaattgcttcaaagagaatacaatacctaggaatccaacttacaagggatgtgaaggacctcttcaaggagaactacaaaccactgctcaatgaaataaaagaggatacaaacaaatggaataacattccatgctcatggataggaagaatcaatatcatgaaaatggccatactgcccaaggtaatttatagattcaatgacatccccatcaagctaccattgactttcttcacagaattggaaaaaactattttaaagttcatatggaaacaaaaaagagcccgcatagccaagtcaatcctaagcaaaaagaacaaagctggaggcatcatggtacctgacttcaaactatactacaagactacagtaaccaaaacagcatggtactggtaccaaaacagagatataaaccaatggaacagaacagagccctcagaaataatgccacatatctgtaactatctgatctttgacaaacctgacaaaaacaagaaatggggaaaggattccctatttaataaatggtgctgggaaaactggctagctacatgtagaaagctgaaactggatcccttctttacaccttatacaaaaattaattcaaggtggattaaagacttaaatgttacatctaaaaccataaaaaccctagaagaaaacctaggcaataccattgaggacataggcatgggcaaggacttcatgtttaaaacaccaaaagcaatggcaacaaaagccaaaattgacaaatgggatctaattaaactaaagagcttctgcacagcaaaagaaactaccatcagagtgaacaggcaacctacagaatgggagaaaatttttgcaacctactcatctgacaaagggctaatatccagaatctacaatgaactcaaacaaatttacaagaaaaaaacaaagaaccccatcaaaaagtgggcgaaggacatgaacagacacttctctaaagaagacatttatgcagccaaaggacacgtgaaaaaatgctcatcatcaatggcaatcagagaaatgcaaatcaaacccacaatgagataccatctcacaccagttagaatggcaatcattaaaaagtcaggaaaccacaggtgctggagaggatgtggagaaatgggaacatttttacactgttggtgtgactgtaaactagttcaaccattgtggaagtcagtgtggcgattcctcaaggatctagaactagaaataccatttgacccagccatcccattgctgagtatatacccaaaggactataaatcatgctgctataaagacacatgcacacgtagcccaggcaggcagtacctgctagagctgcaggcacagtggtattgcttctgtgtgaactcacctgcagagtgcatcttcctgttgtccctggaaacttggaaacacctggacagcaggatctttgcaaccctcagatcaagagatcccctcatgagcccacaccaccagggccttgagcctgagacagagctgtgtggaatctcagcagagcagctgctcaggcatgcagagacccaggagctttacataccctggccccgatatccccagcaaggtgggagccattccagcctgcaggctttggagagtccaagcagtccagatgaggaagggtcccccaagctcagcacagctgctttgccagaatgtgtccagattgcttctttaaacgagaccccatccattcctcctcactgggtaaataatgaaattaaggcacaaatcaagaagttctttgaaactaatgagagcaaagatacaatgtgccagaatctccaggatgcagctaaagcagtgttaagagggaaatttataccactaaatgcccacatcaaaaagctagaaagatctgaagttaacaacctaacgttgcaacaaaaagaactagagaaccaagagcaaacaaactccaaagctagcagaagacaagaaataaccaagattagagctgaactgaaagagatggggacacataaaccccttcaaaaatcaatgaatgtaggagctgttttctga

SEQ ID NO: 117918 - DNA, 1787 bp, Homo sapiens
aaccactgattacgcctagcttggcacgagggcaggtgctggcactttcctccatccaagtttagttttttttcacgtaaattagttggtatcacgcattgtttgtgttggggtgggagttttgattgagaatttttgtcatgatcttttgttggggacgaagactgacctgtaaattaagaacagaaaagaaggcacagagccagtgtcacaacttgcctgcaggagcctgagcctacccctctccactaggtataccacaggttttttgtaatccatcaccttgattcttatctcctgtttcctgacttggctttcttgcatattatttcaattccctttagcagatttgctgcttttaaactcgttagcttaaaagcagcagcctggactcacattcctaatttctgttttataaaggccattgcttttgatattctcactctcaggctgtggcccaactacgggtctcttcagcaccccagctctgtagaaaggaaatgagacttgtttctgacaaggtcacccataacgacataagaatcctcaagtttggaagtgtaaaaaaaatcgactcaaaggatgagaaagagctgaaatacatgtgtacaaatagcattaggacacctgaagctaatcagatctgcacctggtattcagcaaactctagtgatggtgagcatggaagtgcttttataaataaggaaagtcttcctgagaaagtgatatttgagcaaaggcttgaaggaggtgagggaaggaagcctgcagatacctggggaaatcattccgggaagaaagaagctgatgcaaatgctctcagaaaagacactgtaaagccaacaccactattgaaaaggatttctacaaagacagatacatcagaaaatgatagctcatttggtggagcagagaaacaaggattgcatgtttctgcaaataatgccagcagccacaagctgaaagaaatacaagctaccatcagagactactataaacacctctatgcaaatgaactagaaaatccagaagaaatggataaattcctcgacacatacaccctccaaagactaaaccaggaagaagttgaatctctgaatagaccaataacaggctctgaagttgaggcaataattaatagcctaccaaccaaaaaaagtccaggaccagacggactcacagccgaattctatcagaggtacaaggaggagctgcaaagccttgcagggatacaacaaaaaaaagagaattttagaccaatatccctgatgaacatcgatgcaaaaatcctcaataaaatactggcaaaccgaatccagcagcacatcaaaaagcttatccaccatgatcaagtgggcttcatccctgggatgcaaggctggttcaacatatgcaaatcaataaacgtaatccagcatataaacagaaccaaagacaaaaaccacgtgattttctcaatagatgcagaaaaggcctttgacaaaattcaacagcccttcatgctaaaaactctcaataaattagagaataaaatacccaggaatccaacttacaagggatgtgaaggacctcttcaaggagaactacaaaccactgctaagcaaaataaaagaagatacaaagaaatggaagaccattctatgctcatgggtaggaagaatcaatatcgtgaaaatggccatactgcccaaggctccacttccccttccgccatgattgtaactttcctggaaccctcatcagaagcagatgctggagccatgcttgtgcagcctgcagaaccatga

SEQ ID NO: 117919 - DNA, 2400 bp, Homo sapiens
atgggagactttaacaccccactgtcaacattagacagatcaacgagacagaaagtcaacaaggatacccaggaattgaactcagctctgcaccaagcggacctaatagacatctacagaactctccaccccaaatcaacagaatatacattttttgcagcaccacaccacacctattccaaaattgaccacatacttggaagtaaagctctcctcagcaaatgtaaaataacagagattataacaaactatctctcagaccacagtgtaatcaaactagaactcagaattaagaatctcactcaaaaccgctcaactacatggaaactgaacaacctgctcctgaatgactactggatacataacgaaatgaatgcagaaataaagatgttctttgaaaccaacgagaacaaagacacaacataccagaatctctgggacacatttaaagcagtgtgtagagggaaatttatagcactaaatgcccacaagagaaagcaggaaagatccaaaattgacaccctaacatcacaattaaaagaactagaaaagcaagagcaaacacattcaaaagctagcagaaggcaagaaataactaaaatcagaacagaactaaaggaaatagagacacaaaaaacccttcaaaaaattaatgaatccaggagctggttttttgaaaggatcaacaaaagtgatagaatgctagcaagactaataaagaaaaaaagagagaagaatcaaatagacacaataaaaaatgataaaggggatatcaccaccgatcccacagaaatacagactaccatcagagaatactacaaacacctctacgcaaataaactagaaaatctagaagaaatggataaattcctcgacacatacactctcccaagactaaaccaggaagaagttgaatctctgaatagaccaataacaggagctgaaattgtggcaataatcaatagtttaccaaccaaaaagagtccaggaccagatggattcacagccgaattctaccagaggtacaaggaggaactgcatcattctgataccaaagccgggcagagacacaaccaaaaaaagaattttagaccaatatccttgatgaacattgatgcaaaaatcctcaataaaatactggcaaaacgaatccagcagcacatcaaaaagctcatccaccatgatcaagtgggcttcatccctgggatgcaagtctggttcaatatacacaaatcaataaatgtaatccagcatataaacagagccaaagacaaaaaccacatgattatctcaatagatgcagaaaaggcctttgacaaaattcaacagcccttcatgctaaaaactctcaataaattagtgttggaagttctggccagggcaattaggcaggagaaggaaataaagggtattcaattaggaaaagaggaagtcaaattgtccctgtttgcagacgacatgattgtatatctagaaaaccccatcgtctcagcccaaaatctccttaagctgataagcaacttcagcaaagtctcaggatacaaaatcaatgtacaaaagtcacaagcattcttatacaccaacaacagacaaacagagagccaaatcatgagtgaactcccattcacaattgcttcaaagagaataaaatacctaggaatccaacttacaagggatgtgaaggacctcttcaaggagaactacaaaccactgctcaaggaaataaaagaggatacaaacaaatggaagaacattccatgctcatgggtaggaagaatcaatatcgtgaaaatggccatacttgcccaaggtaatttacagattcaatgccatccccatcaagctaccaatgactttcttcacagaattggaaaaaaactactttaaagttcatatggaaccaaaaaagagcccgcattgccaagtcaatcctaagacaaaagaacaaagctggaggcatcacactacctgacttcaaactatactacaaggctacagtaaccaaaacagcatcggtactggtaccaaaacagagatatagaccaatggaacagaacagaggcctcagaaataatgccgcatatctacactattctgatcctttggacaaacctgagaaaaacaagcatgggggaaaggcatccctaatttataaaatggctgctggggaaaactggctagcccatatgcagaaaactgaaactggaccccttccttacagaaacttatataaatattaactcaagatggattaaagacttaaatgtaagatttaaaatcataaaaaccctagaagaaaacctaggcaataccattcagaacataggcatgggaaaagacttcatggctaaaacaccaaaagcaatggcaacaaaagccaaattgacaaatgggatctaa

SEQ ID NO: 117920 - DNA, 1658 bp, Homo sapiens
agaatactataaacacctctacgcaaataaactagacaatctagaagaaatggataaattccaggacacatacaccctcccaagactaaaccaggaagaagttgaatctctaaatagaccaatatcaggctctgaaattgaggcaataattaatagcctaccaaccaaaaaaagtccaggatcagacacattcacagccgaattctaccagaggtacaaagaggagctggtaccattccttctgaaactattccaatcaatagaaaaacagggaatcctccctaactcattttatgaggccagcatcatcctgataccaaagcctggcagaggcacaacaaaaaaaaagagaattttagaccaatatccctgatgaacatcgatgcaaaaatcctcaataaaatgctggcaaaccggaatccagcagcacatcaaaaagcttatccaccatggatcaagtgggcttcatccctggggatgcaaggcttgttcaacatatgcaaatcaataaacgtaatccatcatataaacagaaccaaagacaaaaactacatgattatctccaataggatgcagaaaaggcctttgacaaaattcaacagcccttcatgctaaaaactctcaataaattaggaataaaatacctaggaatccaacttacaagggatgtgaaggacctcttcaaggagaactacaaaccactgctcaaggaaataaaagaggatacaaacaaatggaataacattccatgctcatgggtaggaagaatcaatatcgtgaaaacggccatactgcccaaggtaatttatagattcaatgccatccccatcaagctaccaatgcctttcttcacagaattggaaaaaactactttaaagttcatatggaaccaaaaaagagcctgcatcaccaactcaatcctaagccaaaagaacaaagctggaggcatcacactacctgacttcaaactatactacaaggctacagtaaccaaaacagcatggtactggtaccaaaacagaaatatagatcaatggaacagaacagagccctcagaaataacgccgcatatctacaactatgtgatctttgacaaacctgacaaaaacaagaaatggggaaaggattccctatttaataaatggtgctgggaaaactggctagccatatgtagaaagctgaaactagatcccttccttacaccttatacaaaaatcaattcaagatggattaaagacttaaacgttagacctaaaaccataaaaaccctagaagaaaacccaggcagtaccattcaggacataggcatgggcaaggacttcatgtctaaaacaccaaaagcaatggcaacaaaagacaaaattgacaaatgggatctaattaaactaaagagcttctgtacagcaaaagaaactaccatcagagtgaacaggcaacctacagaatgggagaaaatttttgcaacctactcatctgacaaagggctaataatatccagaacctacaatgaactcaaacaaatttacaagaaagaaacaaacaactccatcaaaaagtgggtgaaggatatgaacagacacttctcaaaagaagacatttatgcagccaaaaaacacatgaaaaatttctcatcatcactggccatcagagaaatgtaa

SEQ ID NO: 117921 - DNA, 475 bp, Homo sapiens
gggaattccctcagcgcggctcacgtttcggaacacgtctgcctttcatgcctcccgaagagcctccccgcatcccgtgccccctgctcgctgctgccgctgacccttgggcgctgcgctggtccagagcgtgttgtcctctgacgccgtcagaacctgagctccctgcgagctgggactccgccgtgtcttcattgcctccagtgcaaagcaactgcttgcaagagaacaaaagtgtgttcaggtgcacagagtagaaaattcaaggagcctgaaagggtatttggtgaagacttgatgtgtttttcccagtcctaacctccaaggcccagttctcccctggggcagagggaaacccgtttcttacgggtctgcaaagaaagtctatgcaggaacatctacgtgcgtttctgcaaaagggcagttactttacttggggctcttatacttaacgtagctcggagagcgccccatg

SEQ ID NO: 117922 - DNA, 978 bp, Homo sapiens
ttattcacggatgacctttgccaacctgtggaagccacctccggacaggccatggtccagtccaggggggccaccacgcacggtggggggcgggggggcagctgcaagctcctgggggacagaggacaaggttccaccagccaggtgggaaggtggggcagcagctgccaccctccaaccggaggacacagcgaggtcaccctgctggccgactgcaaggaagcccctgcgtggggtcctgcagggagcatctctggggtccacggcatccatgctaggagctgcttcagggacaccaaggcctcctccatcctggctggtgtctgtcccgtcacccagggccccgtgctggggtgtaccaggagcaggtgacacagggtggaccagagactcagcccccaggcgcccgtgaatatccacagcccgcagggagggaggggcggccccaaatacttcgatttccaaaatcctcttcatcacagtgtcttgtggaattttgttctcttgcaagcagttgctttgcactggaggcaatgaagacacggcggagtcccagctcgcagggagctcaggttctgacggcgtcagaggacaacacgctctggaccagcgcagcgcccaagggtcagcggcagcagcgagcagggggcacgggatgcggggaggctcttcgggaggcatgaaaggcagacgtgttccgaaacgtgagccgcgcaccgaggccgcctcttcgtccacagcctgacgccagccaccgccgccgccgtctccactgccgcacgcacgccgccacttccgcttccgtccgtgctgcggccccgcacgtgacgcagcgccttctcgcgcccagactgaagcaccgccccccctcaggacccagagtgcgctgtcctggcccctctgcagtaggactgacgggaagctgtcgagggggcagtcccgcgatggcagcagggcccccacgcctggcgtcctcat

SEQ ID NO: 117923 - DNA, 2132 bp, Homo sapiens
acgccggtcagcgacgaggaggaaggaagcctccatcacacgacctggcggaacctgagaattggcgtgagaatcgcctgccccgcgggagaaaatgcccagtcctccgagagtccagtgagggcttgccagccagggaccaagacccagtatggcctaaaccaggcctggtcaccaggggtcaggcgggaccttatacagggctcagcagagagacctgcccgctaccctgctccaggggagatgggggtgggggccttcatcccactcgggcatgacaagaggagagcagccagccagcatctgcacgtctcaggcagggaagggcctgaagccctgggaagcagaggctccgccctcaggaaacaggtcccggcctggctccctcacagccttcggacttgccccgtggaccgaaacccccaggcaccttgcgccaggactggcctgatggtggagacgccacaccatgagcagtgggtccgaggagagcactacaggtacaagttcagccgtcctgggggaaggcacgccgccgagggcaagtggtgggtgcggaagaggatcggagcctacttccctccgctcagcctggaggagctgaggccctacttcagggacccccacactctgatgctggggcagcgggtgaccgagcgggagcttgatggagagcctcgggggcctgtcactgtggaaggcaggtctgctaccacctctgggtaccccaccaaggtcacaaaaataggggggcccctggacccagctgggggcctcgagggcccactccatggagcccttggctctgaccccttggaggtctcagactgcccaggtcctcatctgagcaggaaggtttgggagaatggcagctttggagcttcagatcagcaacacacaagaataccacagacggcagcagctggcccacagtggcagaaaagaaagctccctcgtcaaaacagtatcacagcagcatggagacctagagataaacggggcacagtaaccacccgagaaatcgtcccacatgcggccaggtaccgcccaatgagaacaacacgagaaatcgtcccacacacacggccaggtaccttccgacaagaacaacccgagaaatcattccacacatgcaaccaggtaccttctgacaacaacaaccacagaaatcatcccccacgcggccaggtaccgtccaacgagaacgaccaggtaccttccgacaagaacaaccaggtaccttccgacgaaaatgacccgagaaattgtcccacatgcagccacgtaccttccaatgagaacaacccgagaaatcatcccacacacggccacataccttccaacgagaacaaccagtaccttccgatgagaacaaccagccaggtaccttccaacgaggacaacccagggtgtcttccgacaagaacaaccaggcaccttccaacgagaacaaccaggtaccttccgacgagaatgacccaagaaattgtcccacacgtggcctggtaccttccgacaaaggctctgagaccattcaatgggaagaggacagccttttcagcaaatgccgcaaagaggagcgaggccccgacgctcagatgagccttgagaacctgatgcccagtgaacccgccagacacagagggcaccggtcctgcgatgccgtctctggaatgtccagaacagggaaacccacagagacgctgggcagggagaagaaggtccagtggggctcaggatgccgggcagggaacgcgcttcactccttctctgtggcgtgcatggggctggagccgcttaagaccaaggctcagtgcacctggatgctggttaacccgaaagtgccgtacggagccaccagtggtcccacaagctctgatgatggccgcagtcacggacatgcaaactttgattcactgaggaccacgcgagcaaatgacaggtggggccatctcctctgcctcatctttttcctaacctggaagttgttccttaaacacctgcccacggtgggctactgtgaagcccttcacccgcagccatgtggacatgctggaggaacatcaacagactctcatctgaacaacaaaaaagaggaaagaacactcagcaaaggaaagaagaggcactga

SEQ ID NO: 117924 - DNA, 457 bp, Homo sapiens
tctaataactaaaagcttattgttattaattttattgtgctatttagaacctgaaagaagcataattctggaccctgtgcttcttgcaaggtttaggggatgaaggggtggtttttacctggccttggtgtctctgagaaccgggttggcatggaggaatcattaatcagccagtggggatgagaaagctggtccagtctgttagcatatttaaaagcctctccggtgtaaaatccctttcttgtaaataaaatcgccaaaacgtccccacatgggggtatcaagatgccgtgaaccccgttcttgctttcagggcttgtacagcctataaatcagactttaatcatctccgtttcatttcagtgtagtccttcttatagggcggcgtttgggagcaaaatatatctggacaagactttctccagagggtcatattataccaaggaaatgaattccc

SEQ ID NO: 117925 - DNA, 1268 bp, Homo sapiens
tcagccagtggggatagaaagctggtccagtctgttagcatatttaaaagcctctccggtgtaaatccctttcttgtaaataaaatcgccaaaacgtccccacatgggggtataagatgccgtgaaccccgttcttgctttcagggcttgtacagcccgggcatgtgggattccaaggaactgaacattccgccagtgctctggggtttggtgaagagggaaagtcgagggacaaatcttgggtaagcacagtgttcggtgagcttcctccttcccacgaccaacatacagatagggtaatgaagttaaaatgccagcaagagaaacaacaccgcacagagttcctactggggcacaacctagtgaagctggagaaaaaggccaccatcctccagaccgcagaatggtagatccactgacgcttgcactgtgcacctggaaaagctgcagacactcaatgccagattgtaaggcagccgggagagaggctgtaccttgcaaagtcacaggggcagagcgcccaagacctcgggcacctacttcagcatgacccagtggtaaactggaagggctaagtttgtggtgcacacagtcttgcagctgcatgctccatagggcaggggtcatatctgtcttctttaccatggaagatgtggcacccacacgtggccttttacactgaagagctgctataggtatcattagtccaataactatttcggtaacaaagaccagcaacaactgcaggtggtgcagggtcgggggctgtgctaactgacttaggggagcattagaggcaggtggaggctccagaaccaaaaaggccgggatgccttcaacaagaggttgaggggagggatggacaagcctggagcgggtggaacctgcggcagcggacgcagaaaccggccgctgagagaccgaagcgaccggaagtgaagggcgggaccggaaccggctgaaaaaccggaagtggtggtttgaaacggaaatatgttggggacggaacaactgcttcctttgaatctcttcgggtgctaatcaaatggccgctgtaagggatctccacaaagccacgaagaagccaggcctttccgagactgtaaccgctgtgcagatagcgcgatccctgggtggccgctctctcgttctgcgcgtgcgctcgttgagatctgatggtttaaaggggcaggttcccctgtgtgcacgctctctctctctcctgctgccattaagacatgccttgcttcctcttcaccttcttccat

SEQ ID NO: 117926 - DNA, 961 bp, Homo sapiens
atggcggcgcggactctggcgagcgccttggtcctcacgctctgggtttgggcgctggctccggcgggggccgtggacgctatgggccctcacgcagccgtccgtctggccgagctgctgaccccggaggagtgcggccatttccggtcgctcctagaggcgcccgagcccgacgtggaggccgagttgtcccggctttctgaagaccggctggcgcggcctgagccgctcaacaccacgtcgttgtctccgagccggcggcggcggcgagaggcggcggaggacccggcgggcagggtagccgggcctggagaggtgtccgacggctgccgggaggcgctggcggcctggctggccccccaggccgcgtccctgtcctgggaccgcctggctcgggccctgcggcgcagcggccgcccggacgtggccagggagctgggcaagaacctccaccagcaggcgacgctgcagctgcgcaagttcgggcagcgcttcctgccgcggcccggcgccgccgcccgcgtgccctttgccccggccccgcgcccccggcgcgccgcggtccccgcgccggactgggacgccctgcagctgatcgtggagcgcctgccgcagcccctgtacgagcggagccccatgggttgggcggggccgctggcgctcggcctcctcaccggcttcgtgggggcgctgggcacccggggccctggtcgtcctgctcacgctatggatcactggcggcggcggcgacggcgaccgggcgtcgcccggcagccccggcccgctcgccacagtgcagggctggtgggaaacaaagctgctccttcctaaagagcggcgcgcgcccccgggggcctgggctgcagatgggccagattctccctcacctcacagtgcccttgccctcagctgtaaaatgggagcacagtcttggggcagtggtgctttggacggtttataa

SEQ ID NO: 117927 - DNA, 485 bp, Homo sapiens
tactccatggaggagaaagagcacagagtagcccacacttggtgttagaaggcccgtacccagaaatgccatgcctcatcactgttcatttttcactggacggacggtgccctccatggctacacctggctacaatgaaggctgggacaagttccggatgaaatgccacctctgtgtcaactacatcgagatgcagacggaccccgccaactgcgactacgtgatcgtgagtggcgcccagcgcaaggaggagcgctgggacatggcggacaatgagcaggtgctgaccacagagcatgagaagaagcagaagctggagacggacgccatgttccggctggagcatggcgaggccgaccgcagcacactcaagaaggcgctggcgcacactgagccacatccaggaggcccagagcgcctggaaggacgacttcgccctcaacagcatgctgcggagaaggttccgggtaccatccaagccctag

SEQ ID NO: 117928 - DNA, 534 bp, Homo sapiens
atggaagaaaaagaagtaagaggatggaaaagggagagcgtggagaaccctactcgctttctctgcgaaatcaccaaggcagctgggagcctgaacacatgtcctgaaaaccggagggcgggtgttctagcatttaagggtgatgatggattctctgtgtgggagagcaatgctattgccacctatgtgagcaatgaggagctgtggggaagtgctccagaggcagcagcccaggctgtgcagtgggtgaactttgctgatgatagccagtaccagggtgttcccaccttgggcaaaatgcaccatgacaaacaggccacccaggatgcaggggaagaggtgagccccagttccaggctgtcttgggtggaaatgaaactgtgtgagaacatggcccactttgatgctaaaatatttgcagagagccagcctaaaaaggacactccacggaaagagaaaggttcacgggaagagaagcagaagccccaggctgagcggaaggaggagaaaaaggtggccacccctgctccttaa

SEQ ID NO: 117929 - DNA, 1388 bp, Homo sapiens
caccatggcggctgggaccctgtacacgtatcctgaaaactggagggccttcaaggctctcatcgctgctcagtacagcggggctcaggtccgcgtgctctccgcaccaccccacttccattttggccaaaccaaccgcacccctgaatttctccgcaaatttcctgccggcaaggtcccagcatttgagggtgatgatggattctgtgtgtttgagagcaacgccattgcctactatgtgagcaatgaggagctgcggggaagtactccagaggcagcagcccagtgtggtgcagtgggtgagctttgctgattccgatatagtgcccccagccagtacctgggtgttccccaccttgggcatcatgcaccacaaacaaacaggccactgagaatgcaaaggaggaagtgaggcgaattctggggctgctggatgcttacttgaagacgaggacttttctggtgggcgaacgagtgacattggctgacatcacagttgtctgcaccctgttgtggctctataagcaggttctagagccttctttccgccaggcctttcccaataccaccccgctggttcctcacctgcattaaccagccccagttccgggcgtgtcttgggcgaagtgaaactgtgtgagaagatggcccagtttgatgctaaaaagtttgcagagacccagcctaaaaagggcacaccacggaaagagaagggttcacgggaagagaagcagaagccccaggctgagcggaaggaggagaaaaaaggcggctgcccctgctcctgaggaggagatggatgaatgtgagcaggcgctggctgcttgagcccaaggccaaggaccccttcgctcacctgcccaagagtacctttgtgttggatgaatttaagcgcaagtactccaatgaggacacactctctgtggcactgcccatatttctgggagcactttgataaggacggctggtccctgktggtactcagagtatcgcttccctgaggaacctcactcagcccttcatgagctgcaatctcatcactggaatgctccagcgactggacaagctgaggaagaatgccttcgccagtgtcatcctttttggaaccaacaatagcagctccatttctggagtctgggtcttccgaggccaggagcttgcctttccgctgagtccagattggcaggtggactacgagtcatacacatggcggaaactggatcctggcagagaggagacccagacgctggttcgagagtacttttcctgggagggggccttccagcatgtgggcaaagccttcaatcacggcaagatcttcaagtgaacatctcttgccatcacctagctgcctgcacctgcccttcagggagatgggggtcattaaa

SEQ ID NO: 117930 - DNA, 489 bp, Homo sapiens
  misc_feature (1)...(489): n = a,t,c or g
ttttttttttttttttttttnagatggagtctcactctgtggccaggctggagtgcaatggcncagtcttggctcactgcaacctctgcctcctgggttcaagcgattctcctgcctcagcctcccaagcagctgggactacaggcgtgcaccaccacgccagctaatctttgtatatttattagagacggggtttcaccatgttggccaggatggtcttgatctcttgatcttgtgatctgtctgcctcagcctcccaaagtgctgggattacaggcgtgacatccngcacctggccggtagactgaattttattccctcatctggtttgcaggtgggaccattgcaaacgtggtccccagagactcagctaatgagcttctgtcctttcaagtctgcacctttcctttgaaactggggccaaaggtgatgtcctaacccatggcagaccttactcccattaaaatcctggaattccaccacactgga

SEQ ID NO: 117931 - DNA, 547 bp, Homo sapiens
aatgatctctcgcagcacccaagtctgcaccctgcttcactcactcagcaatctgtccaggagctccttcaatgtcaagacatccagaaagatctgtcttcctccttttccaggcccctgtgcaggaaccccctgcacctggtcccccgtgatgggtgctcagaacgttcagcagtttatcgatgaaggcaattatacatccggcgacaaccatacgctgagagaccctcactacgttgaagacaaaggccataaataccttgtattcgaagccaacacgggaacagaaaacggataccaaggcgaagaatctttatttaacaaagcgtactacggcggcggcacgaacttcttccgtaaagaaagccagaagcttcagcagagcgctaaaaaacgcgatgctgagttagcgaacggcgccctcggtatcatagagttaaataatgattacacattgaaaaaagtaatgaagccgctgatcacttcaaacacggtaactgatgaaatcgagcgcgcgaatgttttcaaaatgaacggcaaatggtag

SEQ ID NO: 117932 - DNA, 900 bp, Homo sapiens
atgtcccccatgggagctgatattggatcagttcaggaaaagcctcggaatctctccagcaaacactggaccactctgcccggctcctcccagctgcatgtatccacccagcccccagatgccagcaaaggctccactgaccaccccccagaggggcggccaggaaccacacctgagccatttccaagggtgacatgtgtcacagaactgtggggaaggggctatccagagattcccagtaggagacacggggagacctgcaggaatgatctctcgcagcacccaagtctgcaccctgcttcactcactcagcaatctgtccaggagctccttcaatgtcaagacatccagaaagatctgtcttcctccttttccaggcccctgtgcaggaaccccctgcacctggtcccccgtgatgggtgctcagggagcctgattttggcactggtgtatttccagaaccaagctggtgaaaggccgcagacttcgaacctctgggcctttgtccaggacgttccctcagcgctcagtgcccttcctggtggcctcctacatcttcagatcccggctgagctctgcttaaatccgggaccggaacaccgacagtcgctcccaggcaaccagcacctgctgcgccccgtttccagcgacctccccaaccgcgtggactcgcatccacgtgcccggcggggccgcagcagaaaggctcggaccccccaggacgatcggccggatctgaagcagtgtttccggaaagtctctcaaaccctgtttgtcctctcctctcataccaccaccacaatcatcaacacagaagaaagcttctgtggccaaatttgtggagttttccccatacaccaagcagaagagccagttgagcgtcccctagtccagttctga

SEQ ID NO: 117933 - DNA, 399 bp, Homo sapiens
atggcaaaagctgtagagaaacctgagtctacattggaagccacaaagagcaaagagtcagtgatgtctagggtagaatggattggcacagcccacatgtgggtagatgatgaaactggtgacaatgcaagcaagacccagcagaccttggagcctgctgaattagccaccaagtacgcaaacttttcagagggagcttgcaagcctggctatgcttcagccttgatgacggccatcttcccccggtttttgcaagcctatacgactcagtccttagcccagacacttggcacactggtgcaagaagtgggcccccaagatcttgggcagctccgcccctgtggctttgcagggtgcagcccctgtggctgctctcatgggctggcgttgagtgcctga

SEQ ID NO: 117934 - DNA, 478 bp, Homo sapiens
  misc_feature (1)...(478): n = a,t,c or g
caaaaatcacaagcattcttatacaccagtaacagacaaacagagagccaaatcatgagtgaactcccattcacaattgcttcaaacagaataaaatacctaggaatccaacttacaagggacgtgaaggacctcttcaaggagaactacaaaccactggtcaaggaaataaaagaggatacaaacaaatggaagaacattccatgctcatggctaggaagaatcaatatcgtgaaaatggccatactgcccaaggtaaggcagaaaccctacaagccagaagagagtgggggccaatattcaacattcttaaagaaaagaattttcaacccagaatttcatatccangccaaacttaagcttcataagtganggagnaataaaatcctttacacacaagctaatgcttgagagntttttgtcaccagcaggcctgcccctaaaaagangctccctggtngggangcacttngacatt

SEQ ID NO: 117935 - DNA, 474 bp, Homo sapiens
gcattctgaagagtgggcctaaaagtactttaccatctcatagagaagagttctttcctagcagggtgtattgccaagccctctctgctttgtccttccctccatggtttgttaaccagcaggaatgcttttttttattattatactttaagttttagggcacatgtgcacaatgtaccggttagttacatatgtatacctgtgcaatgctggtgtgctgcacccattaactcgtcatttagcattaggtatatctcctaattgttttagcagtcttatacaccaataacagacaaacagagagccaaatcatgagtgaactcccgttcacaattgcttcaaagagaataaaatacctaggaatccaacttaacaagggatgtgaaggacctcttcaaggacaactacataccactgctcaaggaaatatgagaggacacaagcaaatggaagagcattccatgctcatggata

SEQ ID NO: 117936 - DNA, 479 bp, Homo sapiens
cgcccgctctgtgccaagccctgagttatacagcttcctattccatcctcaccacggtcctgcgaaggagggtccagccttggcaagaggagtgtggcccttcctggaatccctctaggaaagatgcggcagctcaaagggaagcccaagaaggagacctccaaggacaagaaggagcggaagcaagccatgcaggaggcccggcagcagatcactacagtggtgctgcccacactggccgtggtcgtgctcttgatcgtggtgtttgtgtacgtggccacgcgccccaccatcaccgagtgagccccgcagccggccgcggaccccatcggcagggagaggaggcgcgggagggggacgcaaacaaaaaatggctttcatattcagagatgttcatgttgctgagctgtaagcaggagcaccctgtcttctctggtctttgacttgattaaagtatctccgctttcttgggagggaaa

SEQ ID NO: 117937 - DNA, 2238 bp, Homo sapiens
atggggaaaaaacagaacagaaaaactgaaaactctaaaacgcagagcgcctctcctcctccaaaggaacacagttcctcaccagcaacggaacaaagctggatggagaatgactttgacgagctgagagaagaaggcttcagacggtcaaattactctgagctacaggaggacattcaaaccaaaggcaaagaagttgaaaactttgaaaaaaatttagaagaatgtataactagaataaccaatagagagaagtgcttaaaggagctgatggagctgaaaaccaaggctcgagaactacgtgaagaatgcagaagcctcaggagccgatgcgatcaactggaagaaagggtatcagcaatggaagatgaaatgaatgaaatgaaaccaaatctacgtctgattggtgtacctgaaagtgatgtggagaatggaaccaagttggaaaacactctgcaggatattatccaggagaacttccccaatctagcaaggaaggccaacattcagattcaggaaatacagagaacgccacaaagatactccttgagaagagcaactccaagacacataattgccagattcaccaaagttgaaatgaaggaaaaaatgttaagggcagccagagagaaagaaatacaaactaccatcagagaatactacaaacacctctatgcaaataaactagaaaatctagaagaaatggataaattcctcgacacatacactctcccaagactaaaccaggaaaaagttgaatctctgaatagaccaataacaggagctgaaattgtggcaataatcaatagcttaccaaccaaaaagggtccaggaccagatggattcacagccgaattctaccagaggtacaaggaggaactgtatataaacagagccaaagacaaaaaccacatgattatctcaatagatgcagaaaaagcctttgacaaaattcaacaacccttcatgctaaaaactctcaataaattaggtattgatgggacgtatttcaaaataataagagctatctatgacaaacccacagccaatatcatactgaatgggcaaaaactggaagcattccctttgaaaactggcacaagacagggataccctctctcaccactcctattcaacatagtgttggaagttctggccagggcaatcaggcaggagaaggaaataaagggtattcaattaggaaaagaggaagtcagattgtccctgtttgcagacgacatgattgtatatctagaaaaccccattgtctcagcccgaaatctccttaagctgataagcaacttcagcaaagtctcaggatacaaaatcaacgtacaaaaatcacaagcattcttatacaccaacaacagacaaacagagagccaaatcatgagtgaactcccattcacaattgcttcaaagagaataaaatacctaggaatccaacttacaagggatgtgaaggacctcttcaaggagaactacaaaccactgctcaaggaaataaaagaggatacaaacaaatggaagaacattccatgctcatgggtaggaagaatcaatattgtgaaaatggccatactgcccaaggtaatttatagattcaatgccatccccatcaagctaccaatgcctttcttcacagaattggaaaaaactactttaaagttcatatggaaccaaaaaagagcccgcatcaccaagtcaatcctaagccaaaagaacaaagctggaggcatcacactacctgacttcaaactatactacaaggctacagtaaccaaaacagcatggtactggtaccaaaacagagatatagatcaatggaacagaacagagccctcagaaataacaccgcatatctacaactatctgatctttgacaaacctgagaaaaacaagcaatggggaaaggattccctattcaataaatggtgctgggaaaactggctagccatatgtagaaagctgaaactggatcccttccttacaccttatacaaaaatgaattcaagatggattaaagacttaaacgttagacctaaaaccataaaaaccctagaagaaaacctaggcattaccattcaggacataggcatgggcaaggacttcatgtctaaaacaccaaaagcaatggcaacaaaagccaaaattgacaaatgggatctaattaaactaaagagcttctgcacagcaaaagaaactaccatcagagtgaacaggcaacctacaaaatga

SEQ ID NO: 117938 - DNA, 2724 bp, Homo sapiens
atgggtggaatggtggaaagcagcagacataattggagtgggttggataagcaaagtgatattcaaaatttaaatgaagagagaatcttagctttacagctttgtgggtggataaagaaaggaacggatgtagacgtggggccatttttgaactcccttgtacaagaaggggaatgggaaagagctgctgctgtggcattgttcaacttggatattcgccgagcaatccaaatcctgaatgaaggggcatcttctgaaaaaggagatctgaatctcaatgtggtagcaatggctttatcgggttatacggatgagaagaactccctttggagagaaatgtgtagcacactgcgattacagctaaataacccgtatttgtgtgtcatgtttgcatttctgacaagtgaaacaggatcttacgatggagttttgtatgaaaacaaagttgcagtacgtgacagagtggcatttgcttgtaaattccttagtgatactcagttaaatagatacatcgaaaagttgaccaatgaaatgaaagaggctggaaatttggaaggaattttgcttacaggccttactaaagatggagtggacttaatggagagttatgttgatagaactggagatgttcaaacagcaagttactgtatgttacagggttcacctttagatgttcttaaagatgaaagggttcagtactggattgagaattatagaaatttattagatgcctggaggttttggcataaacgagctgaatttgatattcacaggagtaagttggatcccagttccaagcctttagcacaagtttttgtgagttgcaatttctgtggcaagtcaatctcctacagctgttcagctgtgcctcatcagggcagaggttttagtcagtatggtgtgagtggctcaccaacgaaatctaaagtcacaagttgtcctggctgtcgaaaaccacttcctcgatgtgcgctttgtctcattaatatgggaacaccagtttctagctgtcctgacagatcaacgaggcagaaagtgaacaaggatatccaggaattgaactccgctctgcaccaagcggacctaatagacatctacagaactctccaccccaaatcaacagcatatacattcttttcagcaccacaccacaccttttccaaaattgaccacatagttggaagtaaagcactcctcagcaaatgtaaaagaacagaaattataacaaactgtctctcagaccacagtgcaatcaaactagaactcaggattaagacattcactccaaaccgctcaactacatggaaactgaacaacgtgctcctgaatgactactgggtacataacgaaatgaaggcagaaataaagatgttctttgaaaccaacgagaacaaagacacaacataccagaatctctgggacacattcaaagcagtgtttagagggaaatttatagcactaaatgcccacgagaaaatacaaactaccatcagagaataccataaacacctctatgcaaataaactagaaaatctagaagaaatggataaattcctggacacatacaccctcccaagactaaaccaggaagaagttgaatctctgaatagaccaataacaggatctgaaattgaggcaatccttaatagcttaccaaccaaaaaaagtccaggaccagatggattcacagccgaactctaccagaggtacaaggaggagctggtaccattccttctgaaactattccaatcaatagaaaaagagggaatcctccccaactcattttatgaggccagcatcatcctgataccaaagactggcagagacacaacaaaaaaagagaattttaggccaatatccttgatgaacattgatgcaaaaatcctcaataaaatactggcaaaccaaatccagcaacacatcaaaaagcttatccaccatgatcaagtgggcttcatccctgggatgcaaggctggttcaacatacgaaaatcaataaatgtaatccagcacataaacagaaccaaagacaaaaaccacatgattatctcaatagatgcagaaaaggcctttgacaaaattcaacaacccttcatgctaaaaactctcaataaattagtgttggaagttctggccagggcaatcagacaggagaaggaaataaagggcattcatttaggaaaagaggaagtcaaattgtccctgtttgcagatgacatgattgtatacctagaaatccccattgtctcagcccaaaatctccttaagctgataagcaacttcagcaaagtctcaggatacaaaatcaatgtgcagaaatcacaagcattcttatacaccaataacagacaaacagagagccaaatcatgagtgaactcccattcacaattgcttcaaagagaataaaatacctaggaatccaacttacaagggatgtgaaggacctcttcaaggagaactacaaactactgctcaaggaaataaaagaggatacaaacaaatggaagaacattccatgctcatgggtgggaagaatcaatatcatgaaaatggccatactgcccaaggtaatttatagattcagtgccatccccatcaagctaccaatgactttcttcacagaattgaaaaaaactaaagttcatatggaaccaaaaaagagcccgcattgccaagtcaatcccaagccaaaagaacaaagccggaggcatcacactacctga

SEQ ID NO: 117939 - DNA, 1971 bp, Homo sapiens
atgggtggtttcagcagccacgtcgccacccacccagcctccatccctaccctggaaatctatcgtgtaactctgctgctaaagccctttctctcctatcctctcttgcccactgccactggaccacccctgtatcctccagctttgggacttccaaattacactaaaccttttaccttgtttgtccatgaatgtaacaatcaggaattaggagctcttatccaagaacgtagaggaaaacataggcccattgcatattatagccctcaattagacctagtagtgaagcctccactgctgatacccaggcaaacagggtctggagtggacctccagcaaactccaacagacctgcagctgagggtcctgactattagaaagaaaactaacaaacagaaaggacatccaccccaaaatccaatctgtacatcaccatcatcaaagaccaaagttggaagtaaagctctcctcagcaaatgtaaaagaagagaaattataacaaactatctctcagaccacagtgcaatcaaactagaactcaggattaagaaactcactcaaaaccgctcaactacatggaaactgaacaacctgctcctgaatgactactgggtacataacgaaatgaaggcagaaataaagatgttctttgaaaccaaggagaacagagacacaacataccagaatctctgggacaccttcaaagcagtgtgtagagggaaatttatagcactaaatgcccacaagagaaagcaggaaagatctaaaattgacaccctaacatcacaattaaaagaacttgaaaagcaagagcaaacacattcaaaagctagcagaaggagctggttttttgaaaagatcaacaaaattgatagactgctagcaagacgaataaagaagaaaagagagaagaatccaatagatgcaataaaaagtgataaaggagatatcaccactgatcccacagaaatacaaactaccatcagagaatactataaatgcctctccgcaaataaactagaaaatctagaggaaatggataaattccttgacacatacaccctcccaagactaaaccaggaagaatttgaatctctgtatagaccaataacaggctctgaaattgaggcaataattaatggcttacccaccaaaaaaaggttggaagttctggccagggcaatcaggcaggagaaggaaataaagggtattcaattaggaaaagaggaagtcaaattgtccctgtttgcagatgacatgattgtatatctagaaaaccccatcatctcagcccaaaatctccttaagctgataggcaacttcagcaaagtctcaggatacaaaatcaatgtgcaaaaatcacaagcattcttatacaccaataacagacaaacagagagccaaatcatgagtgaactcccattcacaattgcttcaaagagaataaaatacctaagaatccaacttacaagggacgtgaaggacctcttcaaggagaactacaaaccattgctcaatgaaataaaagaggatacaaacaaatggaagaatattccatgctcatgggtaggaagaatcaatattgtgaaaatggccatactgcccaaggtagtttatagattcaatgccatccccatcaagctacaaatgactttcttcacagaattggaaaaaactactttaaagttcatatggaaccaaaaaagagtccacatcgccaagtcaatcctaagccaaaagaacaaagctggaggcatcacgctacctgacttcaaactatactacaagcctacagtaaccaaaacagcatggtactggtaccaaaacagagatatagaccaatggaacagaacagagccctcagaaataatgccacatatctacaactatctgaactttgacaaacctgacaaaaacaagcaatggggaaggattccctatttaataaatggtgctgggaaaactggctag

SEQ ID NO: 117940 - DNA, 1149 bp, Homo sapiens
atggagacacgtcccagtaggggcccactgacacctcacacagccaggtgccagtctgagactaagcttccagaggaaggatcaggcagcaatatttgctgttctgcaatatttgctattctgcagcctccactggtgatacctaggcaaacagggtctggagtggacctccagcaaactccaacagacctggagctgagggacctgactgttagaaggaaaactaacaaatggaaaggaatagcatcaacatcaacaaaaaggacatccacaccaaaacgccatctgagctggttttttgaaaagatcaacaaaattgatagaccgctagcaaaactaataaagaagaaaagagagaagaatcaaatagacacaataaaaaatgataaaggagatatcaccaccaatcccacagaaatacaaaccaccatcagagaatactataaacacctctatgcaaataaactagaaaatctagaagaaatggataaattcctggacacatataccctcacaagactaaaccaggaagaagttgaatctctgaatataccaataacagtctctgaaattgaggcaataattaagagcttaccaaccaaaaaaagtccaggaccagatggattcacagccgaattctaccagagccagtatcatactgaatgggcaaaaactggaagaattccctttgaaaactggtacaagacagggatgccctctctcaccactcctattcaacacagtgttggaacttctgaccaggacaatcaggcaagagaaagaaacaaagggtattcattaggaaaagaggaggtcaaattgtccctgtttgcagatgacatgattgtatatttagaaaaccccattgtctcagccctaaatcttcttaagctgataagcaacttcagcaaaatctcaggatacaaaatcaatgtgcaaaaatcacacgcattcctagaaaccaataacagacaaacagagagccaaattgtgagtgaactcccattcacaattactacaaagagaataaaatacctaggaatccaacttacaagggatttgaaggacctcttcaaggagaactacaaaccactgctcaatgaaataaaagaggacacaaacaaatggaagaacattctatgctcatag

SEQ ID NO: 117941 - DNA, 1392 bp, Homo sapiens
atgtatattaacatgtgtgtgcatgtgtgtgtacatgcatgcacacatctgtactgctctcctgacaggtactgctgtcctttggcacacctctagtgctgaccacaaaaagagagaagaatcaaatagatgcaataaaaaatgataaaggggatatcaccaccgatcccacagaaatacaaattaccagcatagaatactataaacacctctacgcaaataaactagaaaatctagaagaaatggataaactcctcgacacatacaccctcccaagactaaaccaggaaggagttgaatctctgaatagaccaataacaggatctgaaattgaggcaataattaatagcttacgaccaatatccctgatgaacatccatgcaaaaattctcaataaaatactgggaaactgaatccagcagcacatcaaaaagcttatccaccatgatcaagtgggcttcatccctgggatgcaaggctggttcaacatacgcaaatcaataaacgtaatcgagcatataaacagaaccaaggacaaaaaccacatgattatcttaatagatgcagaaaaggcctttgacaaaattcaacaacccttcatgctaaaaactctcaataaattaggtattgatgggacgtatctcaaaataataagagctatctatggcaaacccacagtcaatatcatactgaataggcaaaaactggaagcattccctttgaaaactggcacaagacagggatgccctctctcaccactcctattcaacatagtgttggaagttctggccaaggcaattaggcaggagaaggaaataaagggtattcaattaggaaaagaggaagtcaaattgtccctgtttgcggacgacatgattgtatatctagaaaaccccatcatctcagcccaaaatctccttaagctgacaggcaacttcagcaaagtctcaggatacaaaatcaatgtgcaaaaatcacaagcattcttatacaccaataacagacaaacagagagccaaatcatgagtgaactcccattcacaattgcttcaaagagaataaaatacctaggaatccaacttacaagggatgtgaaggacctcgtaaaggagaactacaaaccactgctcaaggaaataaaagaggatacaaacaaatggaagaacattccatgctcatgggtaggaagaatcaatatcctgaaaatggccatactgcccaaggtaatttatagattcaatgccatccccatcaagctaccaatgactttcttcacagaattggaaaaaactactttaaagttcatatggaaccaaaaaagagcctgcattgccaagtcaatcctaagccaaaagaacaaagctggaggcatcacgctacctgacttcaagc

SEQ ID NO: 117942 - DNA, 2868 bp, Homo sapiens
atgagcgacgcagaagacgaacgatttctgcagttccaactgaggtaccgggtgtatctcactggggattgtcggacagtgggtgcaggacagtgggtccagcgcaccgagcgtgagccgaagcagggcgaggcattgcctcacccaggaagtgcaaggggttggggagttccctttcctagggatgacggatggcacctggaaaatcgggtcactcccaccctaatactgcgcttttctcacagtcttagcaaacagcacaccaggagaccatattccgcgcctggctcagagggtcctacacccacggagccgtgctcattgctagcacagcagtctgagatcaaactgcaagatggcagcgaggctgggggagggcctctgctgctgatacccaggcaaacagggtctggagtggacctccggcaaactccaacagacatgcagctgagggtcctgactgttagaaggaaaactaacaaacagaaaggacagccacaccaaaaccccatctgtacgtcaccatcatcaaagaccaaagcaccacaccacacctattccaaaactgaccacatagttggaagtaaagcactcctcagcaaatgtaaaagatcagaaattataaccaactgcctctcagaccacagtgcaatcaaactagaactcaggattaagaaacgcattcaaaaccgctcaactacatggaaactgaacaacctgctcctgaatgactactgtgtacataacgaaataaaggcagaaataaagatgttctttgaaaccaacgagaacaaagacacaacataccagaatctctgggacacattcaaagcagtgtgtagagggaaatttagagcactaagggcccacaagagaaagcaggaaagatctaaaattgacaccctaacatcacaattaaaagaactagagaagcaagagcaaacacattcaaaagctagcagaaggcaagaagtaactaagatcagagcagaactgaaggaaacagagacacaaaaaaaaaccttcaaaaaatcaatgaatccaggagctgaaatacaaactaccatcagagaatactataaacacctctatgcaaataaactagaaaatctggaagaaatggataaattcctcgacatatacactctcccaagactaaaccaggaagaagttgaatctctgaatagtccaataacaggctctgaaattgaggcaataattaatagcttaacaaccaaaaagattccaggaccagatggattcacagccgaattctaccagaggtacaaggaggagcagcagcacatcaacaagcttatccaccatgatcaagtgggcttcatccctgggatgcaagactggttcaacatacgcaaatcaataaatgcaatccagcatataaacagaaccaatgacaaaaaccacatgattatctcaatagatgcagaaaaggcctttgacaaaattcaacaacccttcatgctaaaacctctcaataaattaggtattgatgggacgtatctcaaaataataagagctatttatgacaaacgcacagccaatatcatactgaatgggcaaaaactggaagcattccctttgaaaactggcacaagacagggatgccctctctcaccactcctattcaacatagtgttggaagttctggccagggcaattaggcaggagaaggaaataaagggtattcaattaggaaaagaggaagtcaaattgtccctgtttgcagacgacatgattgtatatctagaaaaccccactgtctcagcccaaaatctccttaagctgataagcaacttcagcaaagtctcaggatacaaaatcaatgtacaaaaatcacaagcattcttatacaccaacaacagacaaagagagagccaaatcatgagtgaactcccattcacaactgcttcaaagagaataaaatacttaggaatccaacttacaagggatgtgaaggacctcttcaaggcgaactacaaaccactgctcaaggaaataaaagaggatacaaacaaatggaagaacattccatgctcatgggtaggaagaatcaatattgtgaaaatggccatactgcccaaggtaatttatagattcagtgccatccccatcaagctaccaatgactttcttcacagaattggaaaaaactactttaaagttcatatggaaccaaaaaagagcccgcatcgccaagtcaatcctaagccaaaagaacaaagctggaggtgtcacactacctgacttcaaactatactacaaggctacagtaaccaaaacagcatggtactggtaccaaaacagagatacagaccaatggaacagaacagagccctcagaaataatgccacatatctacaactatctgatctttgacaaatctgacaaaaacaagcaatggggaaaggattccctatttaataaatggtgctgggaaaactggctagccatatgtagaaagctgaaactggatcccttccttacaccttatacaaaaatcaattcaagatggattaaagatttaaacgttagacctaaaaccataaaaatcctagaagaaaacctaggcaataccattcaggacatagtcgtgggcaaggacttcatgtctaaaacaccaaaagcaatggcagcaaaagccaaaattgacaaatgggatctaatgaaactaaagagcttctgcacagccaaagaaattaccatcagagtgaacaggcaacctacaaaatgggagaaaatttttgcaatctactcatctgacaaagggctaatatccagaatctacaatgaactcaaacaaatttacaagaaaaaaacaaccccatcaacaagtgggcgaaggatatga

SEQ ID NO: 117943 - DNA, 1221 bp, Homo sapiens
ttcccttacaaggtccctgaccttgaagtaagtaaagaatctcacttttggacagacccaggaacctcaatgtattttgaggaccttgagaagaaaggtattcaccgaagttttcgtacagacataataaaaaatgatgaaggggatatcagcactgattccacagagatacaaactaccatcagagaatactataaagacctctacacaaataaactagaaaacctagaagaaatggataaattcctggacacatacatcctcccaagactaaaccaggaagaagttgaatccctgaatagaccaaaaacaggctctgatattgatgcaataattaatagcctaccaaccaaaaaaagtccaggaccagagagattcacagccgaattctaccagagagccaaagacaaaaaccacatgattatctcaatagatgcagaagaggctttcaacaaaattcaacagcccttcatgctaaaaactctcaaactaggtattgatgtgacatatctcaaaataataagagctatttatgacaaacccacagccaatatcatactgaatgggcaaaaactggaagcattccctttgaaaactggcacaagaaagggatgccctctctcaccactcctattcaacataatgctggaagttctggccggggcaatcaggcaggagaaagaaataaagggtattcaattaggaaaagaggaagtcaaattgtccctgtttacagatgacatgattgtatatctagaaaaccccatcgtctcagcccaaaatccctgtaagctgataagcaacttcagcaaagtctcaggatacaaattcaatgtgcaaaaatcacaagcattcctctacaccaataacagacaaacagagagccaaatgatgagtgaactcccattcacaattgcttcaaagagaatgaaatacatagaaatccaatttacaagggatgtgaaggacctcttcaagcagaattacaaaccactgctcaatgaaatacaagaggacacaaacaaatggaagaacattccatgctcatcagtaggaagaatcaacatcgtgaaaatggccatactgcccaaggtaatttatagattcaatgccatccccatcaagctaccaatgactttctttacagaattggaaaaaactactttaaagttcatatggaaccaaaaaagagcccgcattgccaagtcaatcctaagctaa

SEQ ID NO: 117944 - DNA, 1896 bp, Homo sapiens
atgaaggagatagagacacaaaaaacccttcaaaaaatcaatgaatccaggagctggttttttgaaaagatcaacaaagttgatagaccgctagcaagactaataaagaagaaaagagagaagaatcaaatagatgcaataaaaaatgataaaagggatgtcagcactgatcccgcagtaatacaaactaccatcagagaatactataaacatctctatgcaaataaactagaaaatctagaagaaatggataaattcctggacacatacaccctcccaagactaaacaaggaagaagtagaatctctgaatagaccaataacaggctctgaaattgaggcaataattaatagcttaccaatcaaaaaaagtccaggaccagacggattcacagctgatttctaccagaggtacaagcaagagctggtaccattccttctaaaactattccaatccatagaaaaagagggaatcctccctggctcagtttatgaggccagcatcatcctgataccaaagcctggcagagacacaaccaaaaaagagaattttagaccaatatccctgaccaacattgatgcaaaaatcctcaataaaatactggcaaaccgaatccagcagcacatcaaaaagctaatcccccacgatcaagtgggcttcatccctaggatgcaaagctgtgttggaagttctggccagggcaatcaggcaggagaaagaaataaagggtatcaattaggaaaagaggaagtcaaattgtccctgtttgcagatgacatgattatatatctagaaaaccccatcatctcagcccaaaatctccttaagctgataagcaacttcagcaaagtctcaggttacaaaatcaatgtgcaaaaatcacaagcattcttatacatcaataacagacaaaaagagagccaaatcatgagtgaactcccattcacaattgcttcaaagagaataaaatacctaggaatccaacttacaaggcatgtgaaggagcacttcaaggagaactacaagccactggtcaacaaaataaaagaggatacaaacaaatggaagaacatgccatgctcatgggtaggaagaatcaatatcgtgaaaatgaccatactgcccaagatagaaagaatagggaagaccaaaggtacagagacacaaagaggaaaatcctgtaagccaacccatcctgtctctgtcatcagcttggctgagagcatcgccagggatttctgcttacaacttaacagagcaaggtcatgtgaccaatccagctataatgaagtcttagaagctgacaatagagctttcagcctctgcaaaggaatgccttttgacagactttcccccatatctcaaactccaggtccatcctggtaccagtccagcccctatcaacccatgtttctggctgctcctatagacataggctccaggcctgcctccatggacccaatacacagcagaacttggcattatgtcactgttgtcattttagccagatccaggaaacaccaggaattgatattgtctgaatccaaacagtttgaagaggcccctccagagctaagatccagagctccaggaggattttcaaagcctgctgcaggtcagataaaggtgggcctcagagaaaacctgacggcatcaatgcagatttcccctgcagatgcaaatctcatcctgcaagacagctttttggctatctttttattccaagcccttatcgttacaatttataaagaaaatgagaaggaagaaggacaggaacgaagagaggaagctcttcgaagcacagggaaaaataacgtatggaaaaacacagatatagacaggccagaatcaatatctgattccgaatctgcagggtgtgactatggagaccgttag

SEQ ID NO: 117945 - DNA, 1964 bp, Homo sapiens
  misc_feature (1)...(1964): n = a,t,c or g
atggggagaaatcagagcagaaaagctgaaaattccaaaaactggagcacctcttttcctccaaaggattgcagctcctcgccagcaaaggaacaaaactggacagagaatgagtttgacaagttgacagaagtaggcttcagaaggtcggtaataacaaacttctccaagctaaaggagcatgttctaacccactgcaaggaagttaaaaaccttgaaaaaagagcactagcaaaactaataaagaagaaaagagagaagaatcaaatagatgcaataaaaaatgataaaagggatatcaccaccgatcccacagaaatacaaactaccatcagagaatactataaacacctctacgcaaataaactagaaactctagaagaaatggataaattcctggacacatacaccctcccaagactaaaccaggaagaagttgaatctctgaatagaccaataacaggttctgaaattgaggaaataattaatagcctaccaaccaaaaaaagtccgggaccagacggattcacagctgaattctaccagaggtataaagaggagctgctgataagcaacttcagcaaagtctcaggatacaaaatcaatgtgcaaaaatcacaagcattcctatacaccagtaacagacaaacagagagccaaatcatgagtgaactcccattcccaattactacaaagagaatgaaatacctaggaatccaacttacaagggatgtgaaggacctcttcaaggagaactacaaaccactgctcaacgaaataagaggacacaaacaaatggaagaacattccatgctcatggataggaagaagcaatattgtgaaaatggccatactgcccaagggagcactgattttggtgaagtccagagattaagactctggcaggaagatgatgtggctgaagaagtttcaggcttctttgaagaggataacctgaaaagtgtggcccaagaccctttctgggagtcccgccaggtcaaaactatcttcaactgtgttgacacttacattgctggtgcaaaagcaatagcaggaataactcaagtcacctgtactggaaatcagtttgctgaaattaatcaacgattcttgaagttgaagaaaagttggtctctctacaggaggttccagccttggcaagaggagtgtggcccttcctggaatccctcgtggacacacccgtccgtagcatcctctaggaaagatgcggcagctcaaagggaagcccaagaaggagacctccaaggacaagaaggagcggaagcaagccatgcaggaggcccggcagcagatcactacagtggtactgcccacgctggccgtggtcgtgctcttgatcgtggtgtttgtgtacgaggccacgcgcccccacccatcaccgagttgagccgcccagccggctgcggaccccatcggcagggagaggaagcgcgggagggggacgcaaacaaaaaaaatggctttcatattcagagatgttcatgttgcctgagctgtaagcaggagcaccctgttcttcctctggtctttggacttgattaaaagtatctccgcctttccttgggagggaatagggggatgttttatcagtgaatgtgcccatacatcttatggtccaacttcatgtgcctttcagacttcagaagcgcgcgcgcatgtgtgtgtgtgtgtgtgtgtgtgtgtgtgtgtgtgtgtgtgtgcttctttttctctcctaaaaatcgataagtagctccacctgaagagggatggaacctctggggtncagggaaacagctggaatccacactcacctcgattcccattgtttggatcatgcctctttccaacacgtgttcacaatctccaaagggactgtatttcttctctgtgcttaatgtgatttgaaatatgttgaatcaaagtgaaatatttattttttgaataaaggagatnatagcctt

SEQ ID NO: 117946 - DNA, 6110 bp, Homo sapiens
atgagacagaaagtcaacaaggatacccaggaattgaactcagctctgcaccaagcagacctaatagacatctacagaactctccacccgaaatcaacagaatatacatttttttcagcaccacaccacacctattccaaaattgaccacatagttggaagtaaagctctcctcagcaaatgtaaaataacagaaattataacaaactatctctcagaccacagtgcaatcaaactagaactcaggattaagaatcccactcaaagccgctcaactacatggaaactgaacaacctgcccctgaatgactactgggtacataacgaaatgaaggcagaaataaagatgttctttgaaaccaacgagaacaaagacacaacataccagaatctctgggacacattcaaagcagtgtgtagagggaaatttatagcactaaatgcccacaagagaaagcaggaaagatccaaaattgacaccctagcatcacaattaaaagaactagaaaagcaagagcaaacacattcaaaagctagcaggaggcaagaaataactaaaatcagagcagaactgaaggaaatagagacacaaagaccccttcaaaacaatcagtgaatcctggagctggttttttgaaaggatcaacaaaattgatagactgctagcaagactaataaagaagaaaagagagaataatcaaatagatgcaataaaaaacgataaattgggatatcaccactgatcccacagaaatacaaactaccatcagagaatactataaacacctctatgcaaataaactagaaaatctagaagaaatggataaattcctggacacatacaccctcccaagactaaaccaggaagaagttgaatcccttcagtagactaataacaggctctgaaattgaggcaataattaatagcttaccaaccaaaaaaaagtccaggaccagacggatttcacagccaaattctagcagaggtacaaggaggagctggtcccattccttctgaaactattccaatcaatagaaaaagagggagtcctccctaactcattttatgcagaaaaagtatcatcctggataccaaagtctagcagagacacaacaaaaaaagagaattttagaccaatatccctcatgaacatcgatgcagaaatcctcaataaaatactgggaaaccaagtccagcaacacatcaaaaagtttatccaccatgatcaagtgggcatcatcccagggatgcaaggctggttcaacatatgcaaatcaaaaaaactgttggaagccagggcaattaggcaggagaaggaaataaagggtattcaattaggaaaagaggaagtcaaattgtccctgtttgcagatgacatgattgtatatctagaaaaccccatcgtctcagcccaaaatgtccttaagctgataagcaacttcagcaaagtctcaggatacaaaatcaatgtacaaaaatcacaagcattcttatacatcagtaacagacaaacagagagccaaatcatgagtgaactcccattcacaattgcttcaaagagaataaaatatctaggaatccaacttacaagggacgtgaaggacctcttcaaggagaactacaaactactcactgatcaaggaaataagagaggacacaaacaaatggaaaaacattccatgctcatgggtaggaggaagaatcaatatcgtgcaaaatggaccatactgcccaaggtaatttttagattcaatgccatccccatcaagctaccaatgaccctttcttcacagaattggaaaaaaactactttaaagttcatatggaaccaaaaaagagcccgcattgccaagtcaatcctaagcaaaaagaacaaagctggaagcatcatgctacctgacttcaaactatactacaaggctacagtaaccaaaacatcatggtactggtaccaaaacagagatatagatcaatggaacagaacagagccctcagaaataatgccacatatctacaactatctgatctttgacaaacctgacaaaaacaagcaatggggaaaggattccctatttaataaatggtgctgggaaaactggctagccatatgtagaaagccaaaactggatcccttccttacaccttatacaaagattaattcaagatggattaaagacttacacgttagacctaaaaccataaaaaccctagaagaaaacctaggcattagcattcaggacataggcatgggcaaggacttcatgtctaaaacaccaaaagcaatgacaacaaaagccaaaattgacaaatgggatctaattcaactaaagagcttctgcacagcaaaagaaactaccatcagagtgaacaggcaacctacaaaatgggagaaaattttcacaacctactcatctgacaaagggctaatatccagaatctacaatgaactcaaacaaatttacaagaaaaaaatcaaacaaccccatcaaaaaatgtcaacaggcctcacagctgaaggctttacccacccaatcctgctccccctcttctaacagctatgaaaccttcctagtttcaccccttcacccgttccagttttacataagttttcctcactacacagagatggttcctcccttgacacctgaggattacaattcgagaggagattttggtggggacacagagacaaaccatattatttcaaagttccacaggtctctagagcaggtgcaaaatgctgccagtcggaggagccaagatggccgaataggaacagctccggtctacagctcccagcgtgagcgacgcagaagacgggtgatttctgcatttccatctgaggaacgcagttcctcaccagcaatggaacaaagctggatggagaatgactttgaggagctgagagaagaaggcttcagacgatcaaattactctgagctacgggaggacattcaaaccaaaggcaaagaagttgaaaactttgaacaaaatttagaagaatgtataactagaataaccaatacagagaagtgcttaaaggagctgatggagctgaaaaccaaggctcgagaactacgtgaagaatgcagaagcctcaggagccgatgtgatcaactggaagaaaggatatcagtgatggaagatgaaatgaatgaaatgaagcgagaagggaagtttagagaaaaaagaataaaaagaaatgagcaaagcctccaagaaatatgggactatgtgaaaagaccaaatctacgtctgattggtgtacctgaaagtgatggggagaatggaaccaagttggaaaacactctgcagcatattatccaggagaacttccccaatctagcaaggcaggccaacgttcagattcaggaaattcagagaacgccacaaagatactcctcgagaatagcaattccaagacacataattgtcagattcaccaaagttgaaatgaaggaaaaaatgttaagggcagccagagagaaagaaatacaaactaccatcagagaatactacaaacacctctacgcaaataaactagaaaatctagaagaaatggatacattcctcgacacatacactctcccaagactaaaccaggaagaagttgaatctctgaatagaccaataacaggagctgaaattgtggcaataatcaatagcttaccaaccaaaaagagtccaggaccagatggattcacagccgaattctaccagaggtacaaggaggaactaataccattccttctgaaactattccaatcaatagaaaaagagggaatcctccctaactcattttgtgaggccagcatcatcctgataccaaagccgggcagagacacaaccaaaaaagagaattttagaccaatatccttgatgaacattgatgcaaaaatcctcaataaaatactggcaaaccaaatccagcagcacatcaaaaagcttatccaccatgatcaagtgggcttcatccctgggatgcaaggctggttcaatatatgcaaatcaataaatgtaatccagcagataaacagaactaaagacaaaaaccacatgattatctcaatagatgcagaaaaggcctttgacaaaattcaacaacccttcatgctaaaaactctcaataaattaggtattgatgggacatatctcaaaataataagagctatctatgacaaacccacagccaatatcatactgaatgggcaaaaactggaagcattccccttgaaaactggcaaaagacagggatgccctctctcaccactcctattcaacatagtgttggaagttctggccaaggcaattaggcaggagaaggaaataaagggtattcaattaggaaaagaggaagtcaaattgtccctgtttgcagacgacatgattgtatatctagaaaaccccattgtctcagcccaaaatctccttaagctgataagcaagttcagcaaagtctcaagatacaaaatcaatgtacaaaaatcacaagcattgttatacaccagtaacagacaaacagagagccaaatcatgagtgaactcccattcacaattgcttcaaagagaataaaatacttaggaatccaacttacaagggatgtgaaggacctcttcaaagagaactacaaaccactgctcaatgaaataaaagaggatacaaacaaatggaagaacattccatgctcatggataggaagaatcaatattgtgaaaatggccatacttgcccaaggtaatttacagattcaatgccatccccatcaagctaccaatgactttcttcacagaattggaaaaaactactttaaagttcatatggaaccaaaaaagagcccgcatcgccaagtcaatcctaagccaaaagaacaaagctggaggcatcacactacctgacttcaaactatactacaaggctacagtaaccaaaacagcatcggtactggtaccaaaacagagatacacatcagtggaacagaacagagccctcagaaattacaccacatatctacactattctgatcctttggacaaacctgagaaaaacaagcatgggggaaaggcatccctaatttataaaatggctgctggggaaaactggctagcccatatgtaggaagctgaaactggatcccttccttacaccttatacaaaaatcaattcaagatggattaaagatttaaacgttaaacctaaaaccataaaaaccctagaagaaaacctaggcattaccattcaggacataggcgtgggcaaggacttcatgtccaaaacaccaaaagcaatggcaacaaaagacaaaattgacaaatgggatctaattaaactaaagagcttctgcacagcaaaagaaactaccatcagagtgaacaggcaacctacaacatgggagaaaattttcgcaacctactcatctgacaaagggctaatatccagaatctacaatgaactcaaacaaatttacaagaaaaaaacaaacaaccccatcaaaaagtgggcgaaggacatgaacagacacttctcaaaagaagacatttatgcagccaaaaaacacatgaagaaatgctcatcatcactggccatcagagaaatgcaaatcaaaaccactatgagatatcatctcacaccagttagaatggcaatcattaaaaagtcaggaaacaacaggtgctggagaggatgtggagaaataggaacacttttacactgttggtgggactgtaaactagttcaaccattgtggaagtcagtgtggcgattcctcagggatctagaactagaaataccatttgacccagccatcccattactgggtatatacccaaatgactataaatcatgctgctataaagacacatgcacacgtatgtttattgcggcactattcacaatagcaaagacttggaaccaacccaaatgtccaacaatgatagactggattaagaaaatgtggcacatatacaccatggaatactatgcagccataaaaaatgatgagttcatgtcctttgtagggacatggatgaaattggaaaccatcattctcagtaaactatcgcaagaacaaaaaaccaaacaccgcatattctcactcataggtgggaattga

SEQ ID NO: 117947 - DNA, 391 bp, Homo sapiens
  misc_feature (1)...(391): n = a,t,c or g
gacagcaaggagatgccacctaaaaacaagatggcgactannnnnnnnnnnnnnnnnnnnnnnnnnnnnnnnnnnnnnnnnnnnnnnnnnnnnnacagcaaggagatgccacctaaaaacaaagaaaaagggaagaaatctggggcacagaagaagaaaaagaactggggtgcagatgtggtggccgagtccaggcacaggctggtggtgctggagaaggagctgctccgagaccacttggaggcatgccaaagggaggctgcagctgcccgggaagaggctgaacaagctctcggagagcgggaccaggccctggctcagcttcgggcccacatggcagacatggaggcgaagtatgaggaaatcttacacgacagtctggacaggctct

SEQ ID NO: 117948 - DNA, 738 bp, Homo sapiens
ctagagactaggggctgtgggcttcaaagatccagggggagtgagtccaaactggcgttgctgatcctggtgcctggcgtgaagtctcagtgctgccccatcccactgctgcttgatggctctcagcttggccaagagcctgtccagactgtcgtgtaagatttcctcatacttcgcctccatgtctgccatgtgggcccgaagctgagccagggcctggtcccgctctccgagagcttgttcagcctcttcccgggcagctgcagcctccctttggcatgcctctgcctttggttcctgcaggatccttcctgatttgtactgtttgggaaagaccaagaccaggcctggcagtcggaagccctccttgttttccttccttgcatcaactgtccctgttggttgtcctcctccaagcccctgtctcctgccctcctgcttaaccgaccacacacctgcatatatggccttcccttctcttcgggccccttccagctctacctccaccccttgctgcctctgcctctgctggtcttcggaagccttggctcgacgggcttcatccctccgtagagccaagtggtctcggagcagctccttctccagcaccaccagcctgtgcctggactcgcccaccacatctgcaccccagttctttttcttcttgtgtgccccagatttcttccctttttctttgtttttaggtggcatctccttgctgtccatgttgtccagcat

SEQ ID NO: 117949 - DNA, 1185 bp, Homo sapiens
tcagcagcttcttctgtattgtacgttcacaatgaaccccaggtccatggcgctcaccagaaaatccatcccattcaccccagcctgcactactgtcttgcacatattatcagtcaagacctccacacttccatgaatgcccttgggctgtttggagtaggctaagaacaggggctgcaggaaaaatcgaatttgagttccacgcaccacgagcccggccatggcggccaggacgctgcgggcgcgcgggacggagcgcgggggcgcggcggcagcagcggggagcgcggcaggggagcgcggcgggcgcacagttccgcactgggcagtcagccggcggaagccggaggcgcgggctagcctcggggacctcagctccgccgctcgccgccgccgctcttccaccacgggctggaagttccgcaaacacgcggaattcagttttgctttgattcttctgagctgtgtgtctctgggctgatcactaccctctctgaaccttgatttcctcatcctaaatggctggcaggtggcgctcggtacccggaatcccgacttctccgacgaaacacccccgccgccgcccccgccaccgccaccgcctccaccgccgcctcccggctccttcttatccgagccgggtttggagtacggcttgaaactcgacttgtcctccacgccgatgtcgctcagcttcagggggcccgatttggtgtccttgtcgcccgcagcaccgccgccggcaccgcccgcgccgcccccgttggaggcaaccgaggagagtttggaggagggcgaggggtcgggcttcccgatctgcgaacatgtttgcgccaacagcgccagcgggctcttcttggcatcgagctcgatggggctgaccggcgtggaaggcaggggctgcaggtactcggggtgcaaaatgtggccagttcgtgccgtcagcatcttcagcaccttgattggcaggcggttggcctggcgcagggggtcagaggggggcacggcgtgcacaaaaggcttggtgctgccggccggggacgagcctgggccggggccggagctatttccagagagcgcgctggtccaggcagggtctgcaccgccgcctccgcctccgccgccgccgccgccgctgtgcttactgcttcttagggcagaaagcgagggcgctgtgctcatgac

SEQ ID NO: 117950 - DNA, 477 bp, Homo sapiens
tcagagaggcatagcgttttcccaaggccacacagcactcagggtccgaggccctctttagatgttcagaatgcgaaatcgcccccactcgtctcgtttttcgagggaccgtccccatcggggcaccgaaacctctggtgcacggtccgtgttctgcaagggtgatgatccagggcctgccgtgtccgtgagggtccctgggcggggatcgggggtccccggccccactgaccgtgcccgcaccgttgcccagtccacaggcaggacaagctgaaggtgcacatgcggaagcacacgggcgagaagccgtacctgtgccagcagtgcggcgccgcctttgcccacaactacgacctgaagaaccacatgcgcgtgcacacgggcctgcgcccctaccagtgcgacagctgctgcaagaccttcgtccgctccgaccacctgcacagacacctcaagaaagacggctgcaacggcgtc

SEQ ID NO: 117951 - DNA, 1782 bp, Homo sapiens
acgcgccgcagcgcggaaggagcaccagggcagcgcgacgcggcagagcgagcgcccggaccccgaaggcgagcgcgccgaggggagcccagtcccaacttcgggcacagtcaccgcgcgcaccggcacggcccctcgaggtctcagcgcggaagatggccggcggcgtggacggccccatcgggatcccgttcaccgaccacagcagcgacatcctgagtgggctgaacgagcagcggacgcagggcctgctgtgcgacgtggtgatcctggtggagggccgcgagttccccaacgcaccgctcggtgctggccgcctgcagccagtacttcaagaagctgttcacgtcgggcgccgtggtggaccagcagaacgtgtacgagatcgacttcgtcagcgccgaggcgctcaccgcgctcatggacttcgcctacacggccacgctcaccgtcagcacagccaacgtgggtgacatcctcagcgccgcccgcctgctggagatccccgccgtgagccacgtgtgcgccgacctcctggaccggcagatcctggcggccgacgcgggcgccgacgccgggcagctggaccttgtagatcaaattgatcagcgcaacctcctccgcgccaaggagtacctcgagttctataccagagcaaccccatgaacagcctgccccccgcggccgccgccgccgctgccagcttcccgtggtccgcctttggggcgtccgatgatgacctggatgccaccaaggaggccgtggccgccgcctgtggccgccgtggccgcgggcgactgcaacggcttagacttctatgggccgggccccccggccgagtcggcccccgacgggggacggggcacgagggcgacagcaacccgggtctgtggccagagcgggatgaggacgcccccaccgggggtctctttccgccgccggtggccccgccggccgccacgcagaacggccactacggccgcggcggagaggaggaggccgcctcgctgtcggaggcggcccccgagccgggcgactctccgggcttcctgtcgggagcggccgagggcgaggacggggacgggcccgacgtggacgggctggcggccagcacgctgctgcagcagatgatgtcatcggtgggccgggcgggggcccgcggcgggggacagcgacgaggagtcgcgggccgacgacaagggcgtcatggactactacctgaagtacttcagcggcgcccacgacggcgacgtctacccggcctggtcgcagaaggtggagaagaagatccgagccaaggccttccagaagtgccccatctgcgagaaggtcatccagggcgccggcaagctgccgcgacacatccgcacccacacgggcgagaagccctacgagtgcaacatctgcaaggtccgcttcaccaggacaccagcacctccaccctccaaaagcctgggagcccgaggcccctctgagtcacagcagggcgttgagcaggacaagctgaaggtgcacatgcggaagcacacgggcgagaagccgtacctgtgccagcagtgcggcgccgcctttgcccacaactacgacctgaagaaccacatgcgcgtgcacacgggcctgcgcccctaccagtgcgacagctgctgcaagaccttcgtccgctccgaccacctgcacagacacctcaagaaagacggctgcaacggcgtcccctcgcgcctgctgtgcctgcaagcccctgcgtcctgtgggctggtggctgccctgacccccagccctggg

SEQ ID NO: 117952 - DNA, 588 bp, Homo sapiens
  misc_feature (1)...(588): n = a,t,c or g
gnctgcagganttcggcacgagagcntgggggactccgcgcagagntcgacagaggttgaggcagggccaggagccatgatggacacagaggggcagtagaggctgcaggcttctccacaaccccagcgcagaggggcccgggccagggccacagggagccatggagagcttcatggagtcgctgaacaggctgaaggagatccacgagaaggaagtcctgggcctncagaacaagcttntggaactnaactcagagaggtgccgggacgnccagaggatcgaggagctntttttncaagaaccancancttcgggtacagcagangncantttaggagaacttnggtttcnttgagaacanngtttngggnncggtctttttnngancnctttnaatgtttaaccnangtgntttgncnanntngnngtanaanntngttttttannttcnttcntttaaaancttaangtgatttttattttnacntnggggttnnccgnttttcaaaannnnnnnnnnnnnnnnnnnnnnnnnnnnnnnnnnnnnnnnnnnnnnnnnnnnnnnnnnnnnnnnnnnnnnnnnnnnn

SEQ ID NO: 117953 - DNA, 2292 bp, Homo sapiens
atggagagcttcatggagtcgctgaacaggctgaaggagatccacgagaaggaagtcctgggcctgcagaacaagcttctggaactgaactcagagaggtgccgggaccacactggccacttcatccccctgaagccccagtgtgccagcactaccaccgtcctatggtgcagaagggaaactgaggctcagtgtgggggcggggggagtcacttgtccaaggtcacacggacagacatcacagaggagcgtgcagatgactggggggggtgcgtggacgggacagacgtcacagaggagcgtgcagatgactggggggggtgggacgcccagaggatcgaggagctcttctccaagaaccaccagctccgggaacagcagaagacactgaaggagaacctgcgggtgctggagaacaggctgcgggccggcctgtgcgaccgctgcatggtcacccaggagctggccaggaagcggcagcaggagttcgagagctcccacctgcagaacctgcagcgcatcttcatcctcagccggcactgctcattcaacagcatccaatcagccatgcacgcagccagcatccacggcgcccctgctgcctgccaggccctgggctacgtgctgggggcactgctgaggggcttccctgtgccttttgcagccaacgagatgaacgggctgaaggaagagaacgagaccttgaaggaggaggtgaagcggcttcggggcctgggagacaggcccaagccccgggccaaggagggcacctcggaccccccctcacccctgctgctcccctcccctggtggctggaaggccatcacagagaagccaccgggaggccacgaggaggctgaggaagaccaccagggcgtgggcctacggggagaagaaaagccagcagggcacaggacatctccagtggccaaaatctccccaggggccaccctgcctgagtcgcgagccccagacatgagcccccagcgcatctccaaccagctgcacgggaccattgccgtggtgcggcctgggtcccaggcttgccctgccgaccgaggccccgccaatgggacgcccccaccactgcccgccaggagcagcccacccagcccagcgtatgagcgtggcctctccctggacagcttcctgcgggcctcccggccctccgccatgacccatgaggccccgaagctctccccgaaggtggaccggctctgcctcctaaaccgccccctgtccctgcaccttcagagcccccacagcagccccctggcccctgctgcagcccccagcgacccccggctccaggacctgaaggccagagaagcagaggcctgggaggagcccacagaactgctggggctgcccagtgccctggcgggcatgcaggaccttcgcctggagggggcactgcacctgctcctggcccagcagcagctgcgggctagggccagggcaggcagtgtcaggccaaggggccagcccacacccggggagatgctgccctccctaccagtcggctcagactctgagggccctgagaatgaggggaccagggcagctctggccgcagcaggcctgtctggagggcggcacacacagcctgcaggcccgggccgcgcccagaggacagaggctgcagccacgcaggactgtgccctagacaagcccctggacctctcggagtggggccgggcccggggccaggacactcccaagccggccggccagcatgggtcactcagccctgccgctgcccacactgccagccccgagccacccacccagtccggacccctgactcgcagtccccaggcactcagcaatggcaccaaggggaccagagtgccagagcaggaggaggcttccactcccatgccgcctgacctggacggccacccagagcccagcaaggctgaagtgctgagaccagagtccgacgaactggatgagacagacaccccaggcagcgaggtgggcctgagctcccaggcggaggccactacgagcacgaccggggaggggcctgagtgcatctgcacccaggagcacgggcagggtccaccacggaagaggaagcgggcctcggagcctggggacaaaggcagtgcccacgctctgggaggcaacggaccactcggacccccacccctgcccgccaagctccaagcacaatcttggacgccccctcgtgggctgacagcaaacagatgtctggcagtgagggtggagggagacagtgggcggcagcaccctcgaagaccgggtcccctgagtgacggagaataa

SEQ ID NO: 117954 - DNA, 3531 bp, Homo sapiens
gagcaagtcagttggtgctaactttggcctaccaggcaaactgtgtttctgtctcttatactgacctgctaggaaaacctgggggaagttatttcacctttctgtatgtccttaatattcgcagcaggagccgcctgaagaaagactatgatgatttcagaagacaacctgatcatgatacatttaatagagaactatggaccactgatgaaggtgaaggagatcttggaaaagactctcctaagggagaaatcagtaagtctatagactcaacagaacctctggatatcctggagaaagatcactttgattcagatgatatgaagttgtcagaaatagattttcctatggctagaagcaagctgttgaaaaaggaattgccttcaaaagacttaccgaagacactgcttaaaacacttaaacgacagtccaaacaaactgattatgtggatgacagcacaaaagagctttctccaaggaagaaggcaaagttaagcacaaatgagacaacagttgagaatctagaaagtgatgtgcagattgactgtttcagtgaatcaaagcatacagagccatcatttccagagtcatttgcctcattggattcagtaccagtgtctactctccagaaagggaccaaacccattcaggctttgcttgcaaagaatattgggaataaagtgaccttaacaaatcaactgcctccttccacaggtagaaatgctcttgctgtggaaaaaccagttttatctcctccggaagcaagcccgataaagccagcattgacctgccacaccaatacaaaaggtcctttacaaatggtatacaaaatgccctgtggccagtggttgccaatagatcttcaaaatagctctgtaaagattcaggtgcagcctatggtggatcctaaaacaggagaaaaaatcatgcagcaagttcttattctgcctaagaattttgtgattcagcataaagaaggaaaagcagttgcaaaagaagtgccaccacttcaacagaaaggtacagaacaacattgttcatctttcccacagacaacaaatataaattcttctttagcatcagtttttgtcaactcaccaggaactgtttctacccaactaccaaatacagctttcaacaaaacaattacacctttatcaaatataagtagtgctagaccacagcctttgtcgcctgtaacctctgtaagtaacttattaacaccatcagttaagactagccagagtgaggcaggaaaagccaagaatgcagtttcagcagccacattctccttgcccagtgcttcaccgaccatttcctccacaggtcagcctctgtcatcaacaacaacactaaatgggtctacaaatcctggtagttccttcaactgttttgcacaacagactgctgattcttctgaagcaaagcaagagctgaaaactgtgtgcataagagattcacagtcaattcttgttaggacacgaggtgggaacactggagttgtaaaagtacagaccaacccagatcaaaattcacccaatactgtatcttcaagttcagttttcacttttgctcctcagctgcaggcatttctggtgccaaaatcaacaacttcttcctctgctttttcacctgtagctggaacaactactacatctagtctttcaccttttagccaaacaccaacttctgtttccattccagctagctttgccccatccatggggaaaaatctcaaacttacattaggccacaccactggcagtggtgatttgggccacgtgatagataaaacttcacacatgccctcttctcccttgaagtcctctatttgttctagtactctactaccatcaacaacaagtagttcggtaagtgtaattagcatatcagcagcaaattttggacaaaacaatgcaaatattattcatactccaactaaacagcaacaagtagattatatcacaaaaagttaccctgttacaaggtcagaagcaacagcagcaacaaatggagatgtaatcagtgggactccagttcagaaacttatgctggtatcagctccatctattctttcttctggcaatggaactgcaattaatatgacacctgcgctgacatctacaggtgtttctgcccagaaattagtttttattaatgccccagttcctagtggtacatcaaccccaactcttgttgcagaatcattaaaacaaactcttcctcctccattgcataaagcatatgttaagactccagagcaaccccaaatagtactgattccgtctacagtgggcacaccaataaaaataaattcatcaccagctgtgtctcagataaaggatgtgaaaattggactaaacataggtcaagcaattgtaaatacttcaggcactgtgccagctataccatcaattaacatattacaaaatgtaaccccaaaaggagaagacaaaagtagcaagggctatattttgccattgtcaacaagtggtaattcagttccagtaagctcaaattttgtgagtcagaatattacccctgttaatgaatcagtggtttcttcagcaagagcagtaaatgtgctttcagttaccggagcaaatttatctttgggttcctttccagtgacctcagcctctgcttcagctggggcacaacctcctgttttagtcagtggaaatgatacctcttcaagaattatgcctattttgtcaaatagactttgctcatcaagtctcggaaacactgtgggctatatcaactgtgaaaacaggacaccttgcatcatctgttctgatttcaactacacaaccagtagtgtctcctaaatgttttaacatcagctttgcaaattcctgttacgggttggccttacctacacctggcggactacatcccctaaaaataattaaacacagtttccacattcgggagcagtaccaggagccacacgttctgtatctatttctaaaagacaatctcggacttcactccagttccattcaccagggatttcaactacagtgccaacaaatgtaaacacaaataaacctcaaactgaattgtcgtccctttcaacaagtccagtgagctttctcttaagtgtgccaagctgccatccaactttcttgagcattttttctcatgggaaatgatcaagttttgatagcagaaagtgcttctttccaagactttctcgaggccatcttcctgtaggcgtcatgcttctgatgttacacagctgatattttcatatgagctgcatttttagactacaaagatgcttactcaggtgggagaccatttctttgaactgtaagtgatttatttgattttctttttaatagtccttgtttttctccttcaagcctttttaaggaaacatttaacagcatcaatgtattttttcaaattgctttttgatttacctagaagttctcaattttctgatttgtgtttgtctgatttcaagttgccatcatccatgtaatttttgctaaagaagacaggcaagtgtatcaccttcca

SEQ ID NO: 117955 - DNA, 1227 bp, Homo sapiens
tcagcacttctgttttcttctgcaggtggtgacaccatctaagaggcactggccagagagctgggcagcagctgccacctgggatgaagatgggcagagctgggccaccagggccgtggtgtgaacacaccactctccctccaggggccgaccaacgagctccgggggtccaaccctggctccggctttggcagaactctcacctcgcccccagacaccgtccccgtcaatctcatccctgccaatgatcacatccttgcctggtggcacgggtcccctctgtctgcggccactgtcatgggagaagccaggctcagccactggcaagagcaggcagccagcaagaggtggatgtgggtccaagcccaggccacacggctcccagcaagagccatggccaggggccagtcggcagcccctctgcccgacaaggatgtgggccagcgtcgtctgcacttcagaggagacgagaaccaggaggcggcccccgagggcatcccgcgggtcctcacggaggctgcgttctcccaccttggccaggatgccccgggaacaccatgcagcgtctctgaggcttccacactcgtgcaatgaacacacagagcggtgcagggcccaggacagcgccttccccacgtgctcagggggcacaagggcgtccctccaagtcttgctcaggggcctcccagggtccctgcccagctgtgggtcctcactgagcacccggcgaggacagagtacggcatccgttggcctcgatctccggaacaacacgggcacacggccgtcccagccagcaacgagagccacgaaacaaatccacccgggctgactcccgaagccctcggactgttccgccccacggacctcccggaccctctcttccacggggaagacaccgcccagccaggaccgggtgtataaagaaacgggatttccgtaggggcaggccgatttccccctttcaccgccccctgcgggcagcaggcgcgtcctggggctgggcaaccggggtgcaggttccggagctgccagagctgtgagggggactcgggagagatccaggttcctctggctgcgaagtccctggaggccgggccggagggctccgcgcacgtagcactttttggcccgcccggcgcccccgtcgcctccacaagggctgcctcggcctcccaaggtgctgggattacaggcgtgagccagcgcgcccagccagctgggcat

SEQ ID NO: 117956 - DNA, 1183 bp, Homo sapiens
tcagcagggagtttttgcctggcggaacttgtctcttccaatcatctgactgtggcccacatcttgcagggagccgatatgtggatttactcccttgatggaagcagctgctgctggccatgagataatcgtgcagtattttcgcccacgggtcggcgggcaccggggaggtggcggacctgcgggcacgttggcgcgcgtgtgaagcgcccctggtgcgtttggtgtgtgatcaacgcgtacacatgtggcgggtgtgcagatgccgcccgtgcccggcacgtgtgatgtgtgtacacggccatgttctcccgtctcaaggcctccgagagcttccacagcggtggcagcggcagcctcgatgggccgcgacagccacgtcacccccgccacacttcccccatgccgccaccagcagctctgcggcctccagctggcccacgcggcctcgcccccgggggcccacagcaccaccagccacagccgcccctgtggaactccaacacccccttctccggcttcagactgggccacccctgggccccccaacagggccagcttaggaacccagggcccacccttgtatacgaggcttgctgccagctggttctgggccgccgcccagaagacagggccaccccgagcctccccggctccacactgctgcctgtagcccttgtcagccacagcgtgctctggaatcttcctgcccacccagggcttttcctgggacagctgctcactggctgcttggcactggcgactggctgctgtgacctgccgctcaagccgcacttgcttcccaggaatgggccctcccaggaatctgcctttgtaatagcctttcggagcccacaggacgggtgatcctggccagccagctagccccctgcatccgcctggggtgcaggaaacgaagcttggctaaggcccccaagctcatcagcggtggagctggggcgcacaccccgactccagagcccacttgtttctcagtctctgtgctgggcacctcccctcctgcagccgggggaccacggggacaggagtcagtggtgtcatcgccagtgacaatgggcacttcccggcctgggctattccctccttgggatgccgcggtgaggccagcctggaccaccccgcaggccaactgccagctcgtggtcaacgctcccgccgccat

SEQ ID NO: 117957 - DNA, 1599 bp, Homo sapiens
atgcctgggccatctgaaaagccagttgacttcgtgcagccaaactggaaataccagcagcccctgggcaaaggccagacccgtttcccgtttctgatgaacaaagaagcatcagctgggatggccatgggaaggcacacgaatctcagagtgcggagcagcgggggaactgagttcttcacgcggtcggcaaccaagttcaagggtgccctggcccagaagttcatgtttgtggatggagaccgggctgtgtgcggctcctacagcttcacgtggtcggccgcgcggacggaccggaatgtgatctctgtgctgtctggccaggtggtggagatgtttgaccggcagttccaggagctgtacctcatgtcacacagtgtgagcctcaagggcatccctatggagaaggaaccggagccggagcctattgtgctgccctctgtggtccccctggtgcccgcgggcactgtggccaagaagctcgtcaaccccaagtacgcacttgtcaaggccaagagcgtcgacgagattgccaagatctcctctgagaagcaggaggccaagaagcccctggggctgaaaggcccagcgctggctgagcatccaggggaactccccgagctgctgccacccatccacccaggactgcttcacctggagagggccaacatgtttgagtacctgcccacgtgggtggagccagacccggagcctggcagcgacatcctgggctacatcaatatcatcgaccccaacatctggaacccccagcccagccagatgaaccgcatcaagatccgtgacacctcccaggccagcgcccagcaccagctgtggaagcagagccaggacagcaggccccgtccagagccttgccctcccccagagcccagtgccccccaggacggtgtcccagctgagaacggcctcccccagggggaccctgagccattgccccccgtgcccaagccccggacagtccctgtggcagatgtactagcccgggacagcagtgatattggctgggtcctggagctccccaaagaggaagctccccagaatgggacagaccataggctacccaggatggcaggcccaggccacgccccactccagcggcagctatctgtgacccaggatgaccccgagagcctcggggtggggctccccaatgggctggatggggtggaagaagaagatgatgacgactacgtaaccctcagtgaccaggacagccactcaggcagctccggccgtggccctggcccccgacggccctcagtggcttcctctgtgtcagaggagtacttcgaggtgagagagcactcagtccctctccggaggcgccactcagagcaagtggccaacgggccaaccccaccaccgcgccggcagctgagtgccccccatataacccgagggacctttgttggaccccagggtggctccccatgggcccagagtcggggaagagaagaagcagatgcgttgaagaggatgcaggcccagcgctccacagacaaggaggcacagatggggaaacttgatgaacaggcaggggtgggaaccggccagggccatatggaaggccatcattaa

SEQ ID NO: 117958 - DNA, 1351 bp, Homo sapiens
aagcagttctatgaagtttggatgtcaagattctcagctcacaacagggatgagaagagaagatggttctctgtggagcagagtcaccaacaatagcaggaaggacaaatgtgacagcctgaaagacaagtcagtaaatgaaaacttgaaaggtgaatttcagactggagaaggcagcggggaaagggactcaagtccgtttttctcggaccaatggcagtgtatggctgacctgccgtgcctgcagcccacaagccacccccttcttttcccacgcatggcccaaagctacgagctctcagagtttttccttcttgcagcacgagatgacacaaagataggttctggcagttgcagaatgattcctgtttcctacatagcccaggagaaaggcaatggctgggtgggccgcggtcagatacgtttggcccgcaagtccttttcggacacgttggcatctgctcccaaagagcgccccagcaggacccggtcaccggggtcttccagaggggcggtagccaccgcacaggagccagcggcatcccccaaggagccgcaagccctacctggcttaacccccggacatgtgtgtcgctaccgatcgaagaacccaaacaccccgagatttccctcctctaggcaggtgaaaaccccacggaactctccgcagcgctgcctgcccagccggccgtgtctcgccgtccccgaggcctcgggggctcccagcacctccacccaaatcccacctgtgcgggctcgggagtccgagggcgctgacagctgctgccgccgcatcccggatctccaaagggggagaggggttggactgcaagccccggggcggcccgagggggcccaggtccagctcctgccccacgccctccgtgcgtcctggagtcagcccagcgtcactttcccgctgcccttggctggcttggccgtcaccccgggtcgaggactgagccagcctggaaagctggcggggccgcggcgcgcccgggacctgagctccctcgggacctgctgcaagctggcagcacagacacagccagtggggaacagcttgcagcaggcccctggacagggaaggaaattagtggcagagccaggcctagactttgactctccacactcgctgtcacagccagaagagtccctggtttggttccattccagaaggattatacgcaaagcagccatagacatccatgaacaaatgaaggagcgggtgcctgagaggctgatcaatgcttttggacaaccttgcagggattgcagggagaggtgcactggcatcctggagtccagggctgccaagaaggtgtggttgataacagatgtcaaagaatag

SEQ ID NO: 117959 - DNA, 415 bp, Homo sapiens
ttacacaattctgactgaaaaatgaaagttgagcaaactctccacttgatgggatgcatcaagatcagctgcagaaaagagaagaactttcaatggagattttaaacaagtgagatcaagattctgaagcatatcctcaaagaactgtaacaggagaggaaacatggctttaccagtatgatccgccacccctccccaggtcccttcccccaccacaaacccacactgcgcccgtgggcgcctagagcactggggtggatgagaacttccacctgggcttaacggagacaagctagcccaccactcccccacccctttcctctccttctcaggcttgctctttgtggactggctgtgatcccagctccttagcttgtttggattattcacccaaggggttatccgaatcttcatt

SEQ ID NO: 117960 - DNA, 4530 bp, Homo sapiens
atggggttctgctgtcgggaatgcaggcctcgtctgctcaaggggaggccatgcattcagcatgcaggtccggtggcagccttcaaggtcgccacgccgtattccctgtatgtctgtcccgaggggcagaacgtcaccctcacctgcaggctcttgggccctgtggacaaagggcacgatgtgaccttctacaagacgtggtaccgcagctcgaggggcgaggtgcagacctgctcagagcgccggcccatccgcaacctcacgttccaggaccttcacctgcaccatggaggccaccaggctgccaacaccagccacgacctggctcagcgccacgggctggagtcggcctccgaccaccatggcaacttctccatcaccatgcgcaacctgaccctgctggatagcggcctctactgctgcctggtggtggagatcaggcaccaccactcggagcacagggtccatggtgccatggagctgcaggtgcagacaggcaaagatgcaccatccaactgtgtggtgtacccatcctcctcccaggatagtgaaagtaaccatggcaacaacttccggatccatgtcagcaatgggctcctgatgcgagggccccggcccctggaccgggagcggaactcatcccacgtgctgatagtggaggcctacaaccacgacctgggccccatgcggagctccgtcaggatgaggaaactgaggcaaagcactgcactggcacagcactggacaggcacagcactggacagaaagcaggtctggttctccaggaagcccagttgctcccacttgctcagcaagaacctgacagacctctgcttcctgtacatctgtgcctctcaggcaaaagccaccatgcctggcctccataaacaccttttaaactgtattacgttcatgatgtacagtgcacacattcataaagagaacttagtgctggtgattgtgtacgtggaggacatcaacgatgaggcccccgtgttcacacagcagcagtacagccgtctggggcttcgagagaccgcaggcattggaacgtcagtcatcgtggtccaagccacagaccgagactctggggatggtggcctggtgaactaccgcatcctgtcgggcgcagaggggaagtttgagattgacgagagcacagggcttatcatcaccgtgaattacctggactacgagaccaagaccagctacatgatgaatgtgtcggccactgaccaggccccgcccttcaaccagggcttctgcagcgtctacatcactctgctcaacgagctggacgaggccgtgcagttctccaatgcctcatacgaggctgccatcctggagaatctggcactgggtactgagattgtgcgggtccaggcctactccatcgacaacctcaaccaaatcacgtaccgcttcaacgcctacaccagcacccaggccaaagccctcttcaagatagacgccatcacgaggatactgggaacacaaatggacacaaagatgaacaagacccttctcagtcctcaaagagttctcaggctagaagtggaaatggaactaatccaggatgcaaatcagagcgccacaagaagatgtgcagagaactacaacagaggggtagtggagcccctcagggcccagcagtcatacctggctggggaagcaggaaggcttcatggaagaggtggcttcccagtggaatgtgagagagaagaaggaattcaacagacagagtgtcctggggaagttatgccggacagaggaagtgacatggagggtgtgatcacagtccagggcctggtggaccgtgagaagggcgacttctataccttgacagtggtggcagatgacggcggccccaaggtggactccaccgtggtgagtgggaccagggtctacatcactgtgctggacgagaatgacaacagcccccggtttgacttcacctccgactcggcggtcagcatacccgaggactgccctgtgggccagcgagtggctactgtcaaggcctgggaccctgatgctggcagcaatgggcaggtggtcttctccctggcctctggcaacatcgcgggggcctttgagatcgtcaccaccaatgactccattggcgaagtgtttgtggccaggcccctggacagagaagagctggatcactacatcctccaggttgtggcttctgaccgaggcacccctccacggaagaaggaccacatcctgcaggtgaccatcctggacatcaatgacaaccctccagtcatcgagagcccctttggatacaatgtcagtgtgaatgagaacgtgggtggaggtactgctgtggtccaggtgagagccactgaccgtgacatcgggatcaacagtgttctgtcctactacatcaccgagggcaacaaggacatggccttccgcatggaccgcatcagcggtgagatcgccacacggcctgccccgcctgaccgcgagcgccagagcttctaccacctggtggccactgtggaggacgagggcaccccaaccctgtcggtgagcgatgggggtggccacagggaggagcgggtgggccagggcagctccgcctccgattatctgcctggcttcaaaatggccttcactggctcaggaccaaccttgctggaggacaagggcatgaaagattcattcatttgttcatccaacaccaagttcctgagagctggacattcctgcaaacagcctaggccacccccatccggcctcagcccatatcacccgaactcggaacagctgtgctgcaaggggtatctgggccagacccaggcccgccacacaatgctccctgctcagcccctgcacagaccagagggcaagccagtgtgccacagagggaactgtcagggtagaagcagtcctaaaagcaatctggtccagctgccttgttttatggtggaaagaaccaagcacagagaagttaagcgacttggcccaggggaaatcaccaccacgtctctgcttgaccgagagaccaagtctgaatacatcctcatcgttcgcgcagtggacgggggtgtgggccacaaccagaaaactggcatcgccacccggcctggctccttcctgccctcgaaagcccaggctctgcccaaggctcccaaggttggtggagctggcagaattaatgcgaagattgcccgtgggcatctgagcacttttcccctggcaggccctgccctggcccatctcagctgggtaaacatcaccctcctggacatcaatgacaaccaccccacgtggaaggacgcaccctactacatcaacctggtggagatgacccctccagactctgatgtgaccacggtttttgggaaattcttcccaaacgggattgatgggcaggaaatccacgagctatcagggaatgcctactgcatgccaggccccacgcttgtcaggctgagggtacaggaagcaacaccaggccaggtggtggctgttgacccagacctgggggagaatggcaccctggtgtacagcatccagccacccaacaagttctacagcctcaacagcaccacgggcaagatccgcaccacccacgccatgctggaccgggagaaccccgacccccatgaggccgagctgatgcgcaaaatcgtcgtctctgttactgactgtggcaggccccctctgaaagccaccagcagtgccacagtgtttgtgaacctcttggatctcaatgacaatgaccccacctttcagaacctgccttttgtggccgaggtgcttgaaggcatcccggcgggggtctccatctaccaagtggtggccatcgacctcgatgagggcctgaacggcctggtgtcctaccgcatgccggtgggcatgccccgcatggacttcctcatcaacagcagcagcggcgtggtgctggaccgcgagcgcatcgcggagtaccagctgcgggtggtggccagtgatgcaggcacgcccaccaagagctccaccagcacgctcaccatccatgtgctggatgtgaacgacgagacgcccaccttcttcccggccgtgtacaatgtgtctgtgtccgaggacgtgccacgcgagttccgggtggtctggctgaactgcacggacaacgacgtgggcctcaatgcagagctcagctacttcatcacaggtggcaacgtggatgggaagttcagcgtgggttaccgcgatgccgttgtgagaaccgtggtgggcctggaccgggagaccacagccgcctacatgctcatcctggaggccatcgacaacggccctgtagggaagcgacacacgggcacagccaccgtgttcgtcactgtcctggatgtgaatgacaaccggcccatctttctgcagagcagctatgaggccagcgtccctgaggacatccctgaaggccacagcatcttgcaggcaggcctcagggcagcctcaacccccaccccaacctccaggaagacagtgcctaatggccagcagggcctgctggtgaggtggatggctacaggctga

SEQ ID NO: 117961 - DNA, 2610 bp, Homo sapiens
atggcgctcaccttcccctgtcggaagtttgaatggtatggtcggcggcagccagaggttcgctattcagtgcctgccagccaccagctgaaagccacggacgcagatgagggcgagtttgggcgtgtgtggtaccgcatcctccatggtaaccatggcaacaacttccggatccatgtcagcaatgggctcctgatgcgagggccccggcccctggaccgggagcggaactcatcccacgtgctgatagtggaggcctacaaccacgacctgggccccatgcggagctccgtcaggatgaggaaactgaggcaaagcactgcactggcacagcactggacaggcacagcactggacagaaagcaggtctggttctccaggaagcccagttgctcccacttgctcagcaagaacctgacagacctctgcttcctgtacatctgtgcctctcaggcaaaagccaccatgcctggcctccataaacaccttttaaactgtattacgttcatgatgtacagtgcacacattcataaagagaacttagtgctggtgattgtgtacgtggaggacatcaacgatgaggcccccgtgttcacacagcagcagtacagccgtctggggcttcgagagaccgcaggcattggaacgtcagtcatcgtggtccaagccacagaccgagactctggggatggtggcctggtgaactaccgcatcctgtcgggcgcagaggggaagtttgagattgacgagagcacagggcttatcatcaccgtgaattacctggactacgagaccaagaccagctacatgatgaatgtgtcggccactgaccaggccccgcccttcaaccagggcttctgcagcgtctacatcactctgctcaacgagctggacgaggccgtgcagttctccaatgcctcatacgaggctgccatcctggagaatctggcactgggtactgagattgtgcgggtccaggcctactccatcgacaacctcaaccaaatcacgtaccgcttcgacgcctacaccagcacccaggccaaagccctcttcaagatagacgccatcacgaggatactgggaacacaaatggacacaaagatgaacaagacccttctcagtcctcaaagagttctcaggctagaagtggaaatggaactaatccaggatgcaaatcagagcgccacaagaagatgtgcagagaactacaacagaggggtagtggagcccctcagggcccagcagtcatacctggctggggaagcaggaaggcttcatggaagaggtggcttcccagtggaatgtgagagagaagaaggaattcaacagacagagtgtcctggggaagttatgccggacagaggaagtgacatggagggtgtgatcacagtccagggcctggtggaccgtgagaagggcgacttctataccttgacagtggtggcagatgacggcggccccaaggtggactccaccgtggtgagtgggaccagggtctacatcactgtgctggacgagaatgacaacagcccccggtttgacttcacctccgactcggcggtcagcatacccgaggactgccctgtgggccagcgagtggctactgtcaaggcctgggaccctgatgctggcagcaatgggcaggtggtcttctccctggcctctggcaacatcgcgggggcctttgagatcgtcaccaccaatgactccattggcgaagtgtttgtggccaggcccctggacagagaagagctggatcactacatcctccaggttgtggcttctgaccgaggcacccctccacggaagaaggaccacatcctgcaggtgaccatcctggacatcaatgacaaccctccagtcatcgagagcccctttggatacaatgtcagtgtgaatgagaacgtgggtggaggtactgctgtggtccaggtgagagccactgaccgtgacatcgggatcaacagtgttctgtcctactacatcaccgagggcaacaaggacatgaccttccgcatggaccgcatcagcggtgagatcgccacacggcctgccccgcctgaccgcgagcgccagagcttctaccacctggtggccactgtggaggacgagggcaccccaaccctgtcgcttccatttgtgaagcccggctatgacacaggcgtcacacaccttaaccagaatccacacgatggcccaaagacagcgtcagtccactccttttcttggagaaagaaactggggccagaggggaacgctgctccaagtgcgatgccaggagctggcatagtgaacccctccctgtgccacacgtggcagaaggaggcccacaagcacctcagctcaggcctgccccgccactcatggctccaggcctccgtttctccactgtgggagtggagcacctcttgggcctgcatcaaggtgaaggacgtcaccctcatttcaggctttcatcctcctacctatgtcccctccccaagctcctctgtggcttggcccttgagtaccatgggcctgaggttatctgctgaattccacacacgcctgcacagacgggatcaatccgaggctgcctcgccttcagcttatctctgctccaaatga

SEQ ID NO: 117962 - DNA, 1398 bp, Homo sapiens
atgcttgggctgggcggcctggctgctcctggactcgcctcccagcgtctgatgctgtgtattttccatctgccccaggaatttgacacagagggtgtaggagttgtgttccaagtttgttcctgcaaaccctccgatgaggccagctgcattcatcggggcctggatggccgcacctctctctccccgccctgtctcctgcactcagggacagagtgcaaggacatgatcgaacagaaaaagttctggtacaagatcaaccccgtggggtggaaggcgtgggccaatgaccagctggaagtgcaggttcatgtgtcctcagacagtggctggtgcctcacgctggcttctggctgtgaccagggtagcagagagagcaaagaggtcctttcctcaggtggccgagcacacacagtccagtgggctgaggtggccccaagggcaggaacgtggcatctcttcccaccagtcagtggctctgggggcacaaggacttgtcgggggaaggaggcagcaaccacgagagaaagcggggacaacggggcacgcaccaaaaaaacacaacggtgcccgaaaaaccctcccccgcgtgtggagaatagagagggcggccaagggggagcccgattttccccacccgcgctccgagagaaaagaaaagatgagaagaggttgggggacacaaacgagaacaaacgggataggggggtggggaacgccgaaagccgcccaacccacaacacgaaccgaaagaaaggggttggtgttcccgtgtgccagaagaaccccagggaaaaggaggagcgcgagggcaaggcccaaaaagctatagagagagaagcgaaggaggggacgccccaaaaggtgtttgtggtgaacggggcgacaccccagccaccacccccggacacaccaatgttgattttaatggagaaaggggaggaggggaaggaacgtaaaaaggaacagcccgcccacgcggggcagaaaaggaggaaggccgcacgacaccgccgacgacgacgacgaagagagagaacagatgagaagaacagaacgtggacgcggcgaagacgagagaaagcagggcaggatgagaagagagagggcgaacacgggcagaaacgaagccaacagggacgagaaagcagaagagacgggagagcgaggacacggaaagagagacgacagaaacgggagaacgacaacagagcacgacgacgacagcaggccgagagagagaaaacgaagagcgtgaagcgacgacaaacgacgcagcaagcagaagaggtaagacaggcgcgagagaacgaagcacgagagccgcagcagcggagacagcacagcagacggaggaaggagaaagaagagatgcgagcgccgagatcgaagcagtga

SEQ ID NO: 117963 - DNA, 548 bp, Homo sapiens
aagataaaccctgcgctgcctgaggaaacagtgatggcctcccctgaggcagttgccaggaaagataatgtagagtctcctcaggacccatctccaacacccctgtttgcttctagacctataactggactaaagtcccagtgggcccctagagtgccagaatgcataattagcacagacatacttagcaactggcagaacccccacattggctccccaactggtggggtgagggctgttatggtgggaaaggccaaatggaagccattagaggtgcctctacctagaaaaatagtaaatcaaaaacaatgtcacatccctggagggattgcagagattagtgctgccattaaggccttaaaagatgcaggggcaatgattcctacaatatccctgttcgactctactcagcctgtgcagaagacaggtggattttggagaatgacagtggattattgtaagcttaaccaagtggtgtctccaattgcagctgctgtaccagatgtggtttcattgcttgagcaaattaacacaccttcgggtacctg

SEQ ID NO: 117964 - DNA, 1806 bp, Homo sapiens
atgtccgaaagcctcaaaaccagggaagctgacagtgcagccttaagtctgcagccgaaggcccaagggccccagggaagatgctggcacaagtttcagagccagcgtctgaagatcctggagtctgatgtccaagggcaggaagagtggaaagaagcaaacatcctgcacgtgaagaagaaagagccagaagactcagcatgcaaatttatctcatcttctcctgctttctttgttccagctgcattggtagccaattggatgatgcccacccacattgagggaaaggagggagagaagaagggagagagaaaggtaggaaggagggaagaagagaacaaagaaaaaagaagggaagcagaaagggagaaagaaagaaagggagagagtgagggaggagggaaggaaggaaaggaaagacagcaggaaggaatgaaaggaagaaagaaggatgggagagggagggagggaggggacctgggatggaggaagaaagcctttccaccttggtctgaggagataaaccctgtgctgactgacacaacagtgatggcctcccctgaggcagttgccaagaaagataatgttgattctcctcagaagccaccgccaatagccatgtttgcttctagacctacaactagactaatgtcctcgcagaaccctagaggagacctccagccttttaccaggataactatgcactggggaaagggaaatgatcagacattttggggactgctggacaatggctctgagctgacattgattccaggggacccaaaatgtcattgtcgtcttccaattgaagtaggggcttatggaggtcaggtaattactggaattttagaacagccccaacttacagtgtgtccagtgggttcctggactcatcctgtgatcattatcccagtaccagaatgcataattggcatagacatacttagccagctggcagaacccccatattggatttctgactggttgaaggctgttatggtgacaagggcccagtggaagccattagagctgcctctacctagaaaaatagtaaatcaaaaacaatattccatacctgaagagcttgcagagattaatgccaccatcaaggacttgaaagatggcagaggctcatctagccataaagtgggtcatgaacagcaacaccccatcatcaaatggaaatggtatatacatgatcaggctcgagcaggccctgaaggcaacaccagaagtcacaggtccaggaatcaaggggtgggagtagaagtggcaccactcatggtcacccctagtgatccactagcaaaatttttgcttcctgttcctgcgacattattgtctgctggcctagaggttttagttccagatggaggaagacttccaccaggagacacaacaacaattccattaaacttgaagttaagattgccacctgggtactttgggctcctcctacctttaagtcaacaggctaagaagggagtgactgtgttggctgggatgattgactatcatgatgaaatcagtctaccactccacaacggagcttgcagatggcctattgtgggaccttctgattatgtactatatgtgttactattatcaaaagagattgcatcaaccatcttggttgatgcaattgaaaagcccagagttgggttagttatagagatcgttgatcctccatctcaatatgtgatccaaggaccaatttcttcccaccgtctcattctgccaggcattggattggagcttcatttcaatgctggaggttcttgtgattatagagattactttaattaa

SEQ ID NO: 117965 - DNA, 720 bp, Homo sapiens
cttcctttaaccctgatgtactggattggcttcctgctggaagtagtgagcttcctactcagcccaatttactcctatcaaccccccttcaaccgccacacagtcacattatcaaatagtgtgttcaccttctcttacaagaaggctcagcaagatctggcatataagccactttacagctgggaggaagccaagaagaatgtacctgagtctgttagaaccgtggagtgggtttcccttgtggaccggcacaaggagaccctgaagtccaagactcagtgatttaaggatgaccagagatgtgcatgtgggtattgttaggagatgtcatcaagctccaccctcctggcctcatacagaaagtgacaagggcacaagctcaggtcctgctgcctccctttcatacaatggccaacttattgtattcctcatgtcatcaaaacctgcgcagtcattggcccaacaaggaaggtttcttgtccttaattcatattaccagagggaaagaccatgtgggttttgcttgtttaccaaatctcagtagctgattctgaacaatttagggactcttttaacttgagggtcgttttgactactagagctccatttctactcttaaatgagaaaggatttcctttctttttaatcttccattccttcacatagtttgataaaaagatcaataaatgtttgaatgtttaatgtgaaaaaaaaaaaaaa

SEQ ID NO: 117966 - DNA, 963 bp, Homo sapiens
atgtgctatagcaggcaaagcaaccttggcacctttggtgaaggcaaaataaaaggaagtgaagttatagatgagtgtcccagatccagtaggtatcaggaccttcaagagctccagaacaagaccaagctgacggtgctggaaggagacattctggatgagtcatgcctgaagagagcctgccaggacatgtcggtcatcatccacaccacctccatcatagacatcatcggtgtcactcacagagagtccatcatgaacatcaatgtgaaacgtacccagcttctgttggaggcctgtgtccaagctacagtgccagtcttcatctacaccagtaccccagaggtagccgggcccaattcctacaaggaaatcatccagaacagtcacgaagaagagcctctggaaaacacatgcgtgttcaccttctcttacaagaaggctcagcaagatctggcatataagccactttacagctgggaggaagccaagaagaatgtacctgagtctgttagaaccgtggagtgggtttcccttgtggactggcacaaggagaccgtgaagtccaagactcagcgatttaaggatgacagagatgtgcatgtgggtattgttaggctcccaggagctatgacacaagactttaggacacccctcagcagccccttctctgcagcactgggcacaaccacctggaactggcgtctggcagttctttactcaggttggaaatccttcaaatacgtgtgtgggaatgccaatttaaacattgcacgtacactgacacctttttcaacctccttaaaaacacagggcaacatggtatatggaacaccttgccacccacctcattggcttccaaagctgagcattcccagctgctggaatgagacagggcgccagctggatgcagacagcattgtgaacagtgccctggatcccacaggagcagcaagaaactga

SEQ ID NO: 117967 - DNA, 621 bp, Homo sapiens
ccgctgggcagcagacagtggagatcgacctgaggcatcggatccagctgccccgacctcgagaaccagcgcaacttcaatgagctctcccgcatcgtcctggaggtgcgcgagagggtgcgccaggagcagcaggaaggcgggcacgaggcgggcgagggtcgtggccggcagggcccccgggagtcccagccaagccctgcccagcccagggcagaggcgcccagcaagggcccagatgggacacctggtgaggatggtggcgagcctggggatgccgtagctgcggccgagcagcctgcccagtgtgggcaggggcagccgttcgtgctgcccgtgggcgtgagctccaggaatgaggactacccccgaacctgcaggatgtggaatagcacatttcaaacctacaagaaagaagtgtgcctcccccgtcattcgatgcaccctggcccctgggccatctgctgtgaatgccagaccagattcgggggccgcctgcctgtgtccagggtggaagcagcactgccttactgggtccctctgtccctgagaccccgaaagcagcacccctgctggatgcatgctgctggcacaactgctggcggatctgcggtgatgagt

SEQ ID NO: 117968 - DNA, 543 bp, Homo sapiens
aggcatcggatccagctgccagacctcgagaaccagcgcaacttcaatgagctctcccgcatcgtcctggaggtgcgcgagagggtgcgccaggagcagcaggaaggcgggcacgaggcgggcgagggtcgtggccggcagggcccccgggagtcccagccaagccctgcccagcccagggcagaggcgcccagcaagggcccagatgggacacctggtgaggatggtggcgagcctgggaattgccgtagctgcggccgagcagcctgcccagtgtgggcaggggcagccgttcgtgctgcccgtgggcgtgagctccaggaatgaggactacccccgaacctgcaggatgtggtaaggatgcggcgggtactggggcctgaaggtgggacagcatgggcttcagcgagggccccagccccacacctagcacaggcggagagggcctgtgacctcacagagggcggcagccggtgctttgggacaggagtgcggcctctgaccccttgggccatgttccccagcacctgagcaagcggccgc

SEQ ID NO: 117969 - DNA, 1177 bp, Homo sapiens
gtggcagccagatatcgggccatacggaggactgctgaacgtggtggtggacggcctgttcatcatcgggtggatgtacctgcctccccatgacccccacgtcgatgaccctatgagattcaagcctctgttcaggatccacctgatggagaggaaggctgccacagtggagtgcatgtacggccacaaagggccccaccacggccacatccagattgtgaagaaggatgagttctccaccaagtgcaaccagacggaccaccacaggatgtccggcgggaggcaggaggagtttcggacgtggctgagggaggaatgggggcgcacgctggaggacatcttccacgagcacatgcaggagctcatcctgatgaagttcatctacaccagtcagtacgacaactgcctgacctaccgccgcatctacctgccgcccagccgccccgacgacctcatcaagcctggcctcttcaaaggtacctatggcagccacggcctggagattgtgatgctcagcttccacggccggcgtgccaggggcaccaagatcacgggcgaccccaacatccccgctgggcagcagacagtggagatcgacctgaggcatcggatccagctgcccgacctcgagaaccagcgcaacttcaatgagctctcccgcatcgtcctggaggtgcgcgagagggtgcgccaggagcagcaggaaggcgggcacgaggcgggcgagggtcgtggccggcagggcccccgggagtcccagccaagccctgcccagcccagggcagaggcgcccagcaagggcccagatgggacacctggtgaggatggtggcgagcctggggatgccgtagctgcggccgagcagcctgcccagtgtgggcaggggcagccgttcgtgctgcccgtgggcgtgagctccaggaatgaggactacccccgaacctgcaggatgtgtttttatggcacaggcctcatcgcgggccacggcttcaccagccctgaacgcacccccggggtcttcatcctcttcgatgaggaccgcttcgggttcgtctggctggagctgaaatccttcagcctgtacagccgggtccaggccaccttccggaacgcagatgcgccgtccccacaggccttcgatgagatgctcaagaacattcagtccctcacctcctga

SEQ ID NO: 117970 - DNA, 681 bp, Homo sapiens
catctgagaattcatactcaggagtcttcctatgtatgtgatgagtgtggaaaagccttgactagcaaaagaaatcttcatcagcatcaaagaatccatactggagagaaaccctatgagtgtagcaagtatgagatagccttttggacttcttccccagctaggtcaccttgagcatgtctactctggagagaagcctgtgctggacatttgtcgttttggcctcccagaattttttacccccttttactggtaatagtacactccagtgaaatgtactgagtggattcccgtcttctactcaggaatggaatgtgtgacacaggcctgacctcagcctctgatccatccctcaagccacagttaatgattcagatgtcagtagatgaccaaaagatggttcaattagagtcccagggattgcaagagctaatagggaacaaatactctccccccgcccacccccattggttttaatgctgagaagaagaactagactcttacagaggtgagaatgaagtccacacagcaaaaatgcatctgagaattggagagcagtaaaagactgaagataatgtttgaacagccacatacaccatgcctgaagctaaaaatatatacgggtttttgaattgcagcagccaataaattccatttttgtttggttggttttggctttgg

SEQ ID NO: 117971 - DNA, 1397 bp, Homo sapiens
atgcggccacagctggccgggcgtgaccaccaccgaggcgcagcgaccttgctcctagagaggcccggccgcctggtgacgcacttccggcagcgccggggagcagtccgctacggaggtggaaagagtacaacacagcacttatcacagaggcggttgtcaggaccaaacgaccatacaaagggcttagtatggctcctggagcatattctacagaggttagtcagctttgtgaagctgcaagctaccagaaccttcacaaggacctacatcacctatgcctggttcctgccctggggcttctctggtgtcctatgtgggacacctgtggacacctgctgggccctgaaacaccagagaatccacactggggagaaaccttttgagtgtagtgagtgtggaaaagcctttaatggtaattcttcgttaattcggcaccagaggattcacactggagagagaccctatcagtgtgaggagtgtgggcgagcctttaatgataatgcaaatctgatcaggcatcagagaatccacagtggggacagaccctattactgtacagagtgtgggaatagtttcacgagtagttccgagtttgttatacatcagagaatccacactggggagaaaccctatgagtgtaatgagtgtggcaaagcttttgttggtaattcacccctacttcggcatcagaaaatccacactggagagaaaccctatgagtgtaatgagtgtggcaaaagctttggaaggacttcccatctaagccaacatcagcgtattcacacaggggaaaagccttattcttgtaaagtatgtggacaagccttcaattttcatacaaaactaactcggcaccagagaattcacagtgaggagaaacccttttgactggtgtagattgtggaaaagccttcagtgctcaggaacaattaaaaaggcatctgagaattcatactcaggagtcttcctatgtatgtgatgagtgtggaaaagccttgactagcaaaagaaatcttcatcagcatcaaagaatccatactggagagaaaccctatgagtgtagcaagtatgagaaggcctttgggacttcttcccagctaggtcaccttgagcatgtctactctggagagaagcctgtgctggacatttgtcgttttggcctcccagaattttttacccccttttactggaaggaggagaagaaatgtggtcggaagatgaggaatgaggtggtccataaagtgagtttcttcttagttgttcctatagcactcagttccttacttaaaaaaaaatggaaaatgctgaagaaggaaaaggcacaggatccaacagaatatggcaacttggaagatgacaacagtcagcagcaccagggagcaaaatggaaataa

SEQ ID NO: 117972 - DNA, 547 bp, Homo sapiens
atggacagccagagaccccgagagcgacaagagaaagagaacggcagagtgagagacagaggcacacgcagaggatgcacagagaagcagagacagaagatgaaagagactggaagggacacgacaccaaaaccaggaggcaaaggcagagaaaaagagcagaggaagggcaatgcagagagcacgacagagagagacgcagagacagtgactggagagaggagagagaaacagagaaagagcacacaacagagcagaaaacccagtgaggagccacacagagagaagacgcagataaagagagaacgggggccagagcagggagaactagaaagggggcaatgcacagagaggaacagaaaggctgcaccccagaatgctaaacagaccctcacatttggactccacatccagcgaggagtgcccctgcccaccccccagatcacacagctgccaagtacagaccaccctataggtcccaccactcgggcataacccaccaacatcccagagctgcctctacactaaagctctggcccaaaccagc

SEQ ID NO: 117973 - DNA, 399 bp, Homo sapiens
gaaaatggggaggaatcaagacagaatagtactgtggaggaagattctgaaggtgacaatgattccgaagaattttattacggaggacaggtgaactatgatggggaactgcacaagcacccacaactggaagctgatttgtcagcagttagagagatatatgggccacatgcagtttctctcagggaatatggagccattgatgatgtagatattgatctgcatatcgatgttagctttcttgatgaggagattgctgtggcttgggaagtaattcgaacagaacctataattgttcgactacactgttcacttacacagtatttaaatggcccagtgcccactgttgatgtctttcagatttccacaaaagagcgatttggattgggacatcagctg

SEQ ID NO: 117974 - DNA, 874 bp, Homo sapiens
gcaaatccaaactgaaatctgagcaggacggaatctccaaaacgcataagctgctgcggaggacttgttccagcacagtcaagactgatgatgtgtgtgtcacaaagtcacacaggacctttggccgctccttgtccagcgatcccagggcggagcaggctatgacagcaattaaatcgcacaaacttttgaaccgtccttgccctgcagctgttaagtcagaggaatgcctaactctaaagtcgcatagactattgactcgatcttggtctggagatccacgatgtgagcacaacacaaacttgaagccccataaactgttaagcaggtcttactctagtaatctcagaatggaagaattatatggactgaaaaatcacaaattgctcagcaagtcctactccagtgcccccaagtcatccaaaacttgagcttttccaaggaaccttaacgcagaaggggcaggaaggctctctccttacctcagggcttatttgggtatccctaacaccatcttcatccttcatcttctcagcttgctccaaatggtgcaaaatgcattccagtacgagaccgtggcttcctggtgcagacaattgagtttgctgaacagcggatccctgtattaaatgaatattgtgaggtttgtgatgagccacatgtgtttcaaaatggccctatgcttaggcgtgggagagatgtttgtgaatgggccaagaaatatgcaaactcagtagtcaggaagaaattctgcagattaagcattgcaagacgcagtcggtaccgagctgatatggacctacttcgcatgtctaatttcatcctcacaataatttataaacagaaactaaatctccagaggttcttttcttag

SEQ ID NO: 117975 - DNA, 491 bp, Homo sapiens
  misc_feature (1)...(491): n = a,t,c or g
attgttgtcgctcccatcaaggcgcaggcgaaggcgggcacctgtcagtccaactactgtggcaatacaggtggatgtggtgttcctggggtcctgtgcttccaatttcatactgatcttgaactcgttgcttggaggtgtgtaggactagatccaggatgtcagcagcttgatattgggatgcagactctgataggtgaccatatttgtgttttctaacatcactccagtctatcacattaggctgcatagtcaatggactaaaaaccggtctaggggttaagaagtttgggatttatccctggatccaccaataccttgctctgacttctgacaagtcagtttctttgtatgctaatttctccatctgagggcgcgacgaaggcgcggggcggctcactcccttcccgccgccacgaaatcgtcggnncggnnnttccnnnccggnnggtcatcctgtcgaccgtccgggannaannnangcgagcact

SEQ ID NO: 117976 - DNA, 1055 bp, Homo sapiens
atgggagactttaacaccccactgtcaacattagacagatcaaggaaacagaaagttaacaaggatatccaggaattgaactcagcactgcaccaagcagacctaaaagacatctacagaactcttcatcccaaatcaacagaatatacattcttttcagcaccacaccacacttattccaaaattgaccacatagttggaagtaaagcactcttcagcaaatgtaaaagaacggaaattataacaaactgtctctcagaccacagtgcaatcaaactagaactcaggattaagaaactcactcaaaaccgctcaactacatggaaactgaacaacctgctcctaaatgactactgggtacataacgaaatgaaggcagaaataaagatgttctttgaaaccatgttggaagttctggccagggcaatcaggcaggagaaggaaataaagggctttcaattaggaaaagaggaagtcaaattgtccctgtttgcagatgacatgattgtatatctagaaaaccccatcaactcagcccaaaatctccttaagctgataagcaacttcagcaaagtctcagcatacaaaatcactgtgcaaaaatcacaagcattcttatacaccaataacagacaaacaaagagccaactcatgagtgaactcccattcacaattgcttcaaagagaataaaatacctaggaatccaacttacaaaggatatgaaggacctcttcaaggagaactacaaaccactgctcaatgaaataaaagaggatacaaacaaatggaagaacattccatgctcatgggtaggaagaatcaatatcgtgaaaatggccatactgcccaagttaatttatagattcaatgtcatccccatcaagctaccaatgactttcttcacagaattggaaaaaactactttaaagttcatacggaaccaaaaaagaacccacatttccaagtcaatcctgagccaaaagaacaaagctggaggcatcacgctacctgacttcaaactatattacaaggctacagtaaccaaaacagcatg

SEQ ID NO: 117977 - DNA, 962 bp, Homo sapiens
acagatcaatgagacagaaggttaacaaggatatccaggacttgatctcagctctgccccaagctgatctaatagacatctacagaaccctccaccccaaatcaacagaatatacattcttctcagcaccacatcgcacttatttcaaaattgatcacatagttggaagtaaagcactcctcagcaaatgtaaaagaacagaaatcacaacaaactgtctctcagaccacagtgcaatcaaattagaactcaggattaagaaacttactcaaaaccgcacaactacatggaaactgaacaacttgctcctgaatgactactgggtacataacgaaatgaaggcagaaataaagatgctctttgaaaccaatgagaacaaagagaaacataccagaatctctgggacacatttaaagcaccagtatcatactgaatgggcaaaaactggaagcattccctttgaaaactggcacaagagagggataccttctcttaccactcctattcaacatagtgttggaagttctggccatggcaatcaggcaagagaaagaaataaaggttttcaattaggaaaagaggaagtcaaactgtccctgtttgcagatgacatgattgtatatttagaagatcccatcatctcagctgcaaatctccttaggctgataagcaacttcagcaaagtctcaggatacaaaatcaatgtgcaaaaatcacaaacattcttatacaccaataacaggcaaacagagagccaaattatgagtgaactcccatttacaattgctacaaagagaataaaatacctaggaatccaacttacaagggatgtgaaggacctcttgaaggagaactacaaaccactgttcaatgaaataaaagaggacacaaacaaatggaagaacattccatgctcatggataggaagaatcaaaatcgtgaaaatggccatactgcccaaa

SEQ ID NO: 117978 - DNA, 1452 bp, Homo sapiens
atgggagactttaacaccccactgtcaacattagacagatcaatgagacagaaagttaacaaggatacacaggaattgaactcagctctgcaccaagcagacctaatagacatctatagaactctccaccccaaatcaaaagaatatacatttttttcagcactgcaccacacctattccaaaattgaccgcacagttggaagtaaagctctcctcagcaaatgtaaaagaacagaaattatcacaaactctctctcagaccacagagcaatcaaactagaactcaggattaagaaactcactcaaaaccgttcaactacatggaaactgaacaacctgctcctgaatgactactgggtacataacgaaatgaaggcagaaataaagatgttctttgaaaccaacgagaacaaagacacaacataccagaatctctgggacacattcaaagcagtgtgtagagggaaatttatagcactaaatgcccacaacagaaagcaggaaagatccaaaattgacaccctaacatcacaattaaaagaactagagaagcaagagcaaacacaatcaaaagctagcagaaggcaagaaataactaaaatcagagcagaactgatggaaatagagacacaaaagacccttcaaaaaagtaatgaatccaggagctggttttttgaaaggatcaacaaaattgatagaccactagcaagactaataaagaagaaaagagagaagaatcaaatagacgtaataaaaaatgataaaggggatatcaccaccgatcccacagaaatacaaactaccatcagagaatactacaaacatctctacgcaaataaactagaaaatctagaagaaatggataaattcctggacacatacaccctcccaagactaaaccaggaagaagttgaatctctgaatagaccaataacaggctctgaaattgtggcaataatcaatagcttaccaaccaaaaagagtccaggaccagatggattcacagtcgaattctaccagagggcaattaggcgggagaaggaaataaagggtattcaattaggaaaagaagaagtcaaattgtccctgtttggagatgacatgattgtatatctagaaaaccccatcgtctcagaccaaaatctccttaagctggtaagcaacttcagcaaagtctcaggatacaaaatcaatgtacaaaaatcacaagcatttttatacaccaataacaggcaaacagaaagtcaaatcatgagtgaactcccattcacaattgcttcaaagagaataaaatacctaggaatccaccttacaagggatgtgaaggacctcttcaaggagaactacaaaccactgctcaatgaaataaaagaggatacaaacaaatggaagaacattccatgctcatgggtaggaagaatcaatatcgtgaaaatggccatactgcccaag

SEQ ID NO: 117979 - DNA, 1251 bp, Homo sapiens
atgaaggcagaaataaatatgttctttgaaaccaatgagaacaaatacacagtgtaccagaatctctgggacacatttaaggcagtgtgtagagggaaatttatagcactaaatgcccacaagagaaagcaggaaagatctgcaatgaacaccctaacatcacaattaaaagaactagagaagcaagagaaaacaaattcaaaagctaacagaaagcaagaaacaactaagatcagagcagaactgaaggagatagagacacaaaaaacccatcaaaaaatcaatgaatccaggagcttgttttttgaaaagaccaacaaaatagatagaccactagcaagactagtaaagaagaaaagggagaagaatcaaatagatgcaataaaaaatgatacaggggatatcaccacagatcccacagaaatacaaactaccatcagagaatactataaatgcctctatgcaaataaactagaatatctagaagaaatggataaatttctggacacatacaccctccaaagactaaaccaggaaaaagttgaatctctgcatagaccaataacaggttctgaaattgaggcaataattaacagcctaccaaccaaaaaagtccaggaccagacagattcacagcccaattctaccagaggtattgatggaatgtatctcaaaataataagagctatttatgacaaacccacagccaatatcatgctgaatgggcaaaaactggaagcattccctttgaaaaccggcacaagacaaggatgccctctctcacgactcttattcaacatagtgttggaagttctggctagggcagtcaggcaagagaaagaaataaacggcattcatttaggaaaacaggaagtcaaattgtctctgtttgcagatggcatgattgtatatttagaaaatcccatcgtctcagcccaaaatctccttaagctgataagcaaatttagcaaagtctcaggatacaaaatcaatgtgcaaaaatcacaagcattcctatacactaataacagacaaacagagagccaaatcatgagtgaactcccattcacaattactacaaagagaataaaatacctaggaatccaacttgcaagggatgtgaaggacctcttcaaggagaactacaaaccactgctcaacaaaataaaagaggacccaaacaaatggaagaacattccatgctcatggataggaagaatcaatatcatgaaaatggccatactgcccaag

SEQ ID NO: 117980 - DNA, 1206 bp, Homo sapiens
atgggagccactgggaataaaggagaggtcagagatgatgcagcaccagggaacctgcagtaccacagacagataccagagggagcaacagctccagaaaaagaaactggcaaacctctacttgggatattgcaatgtataaacccaaagaagatgcattcccagaaaaagtttgagaggctgctggaacctatagccatgctgattcaggatcacagctccttgtcagcaacggaacaaagctggacagagaatgactttgacgagttgacagaagtaggcttcagaaggttggtaataacaaacttctctgagctaaaggaggatgttggaacccattgcaaggaagctaaaaaccttgaaaaaagatttgacgaatggcatacaagaataaacagtgtagagaagaccttaagtgacccaaaggagctgaaaaccatggcaccagaactttgtgatgcatgcacaatcttcaatagccgattcaatcaagtggaagaaagggtatcagtgattgaagatcaaataaatgaaataaaggcaatcaggcaagagaatgaaataaagggtattcaattaggaaaagaagaagtcaaattgtccctgtctgcagatgacatgattgtatatttagaaaaccccaccgtctcagcccaaaatctccttaagctgaaaagcaacttcagcaaagtctcaggatacaaaatcaatgtgcaaaaatcacaagcattcctatacactgataacagacaaacagagagccaaatcatgagtgaactcccattcacaattgcttcaaagagaataaaatacctaggaatccaacttacaagggatgtgaaggacctcttcaaggagaactacaaaccactgctcaacaaaataaaagaggatacaaacaaatggaggaacattccatgctcatggataggaagaatcaatatcgtgaaaatggccatacagccaaaggtaatttataaattcaatgtcatccccatcaagctaccaatggctttcttcacagaattggaaaaaacaactttaaagatcatatggaaccaaaaaagaacctgcattgccaagtcaatcctaagcaaaaagaacaaacctggaggcatcacactacctgacttcaaactacactacaaggctacagtaaccaaaacagcatggtactggtgccaaaacagagatacagaccaatga

SEQ ID NO: 117981 - DNA, 1236 bp, Homo sapiens
atgggagactttaacaccccactgtcaatattagacagatcaacgagacaaaaagttaacaaggatatccaggaattgaattcagctctgcaccaagcagacctaatagacacctacagaactctccaccccaaatcaacagaatatacattcttttcagcaccacaccacacctattccaaaattgaccatatagtaggaaataaagcactcctcagcaaatgtaaaataacagaaattataacaaactgtctctcagaccacagtgcaatcaaactagaactcaggattaagaaactcactcagaaccactcaactacatggaaactgaacaaactgctcctgaacgactactgggtacataacgaaatgaaggcagaaataaagatgttctttgaaaccaatgagaacaaacacacaacataccagaatctctgggacacattcaaagcagtggaaatacaaactaccatcagagaatactataaacacctctacgaaaatgaactagaaaatctagaagaaatggataaattcctcaacacatacaccctcccaagactaaaccatgaagaagttgaatctctgaatagaccaataacaggctctgaaattgaggcaatgattaatagcttaccaaccaaaaaaaggccaacagcaaatggattcacagctgaattctatcagagacaaacagagagccaaatcatgagtgaactcccattcacaattgcttcaaagagaataaaatacctaggaatccaacttacaagggatgtgaaggacctcttcaaggagaaatacaaaccactgctcaacgaaataaaagagaatacaaacaaatggaagaacattccatgctcatgggtaggaagaatcaatatcatgaaaatggccatactgcccaagcaagacgtagcccagcgcgtcggccgccatgccggcgataatggcctgcttctcgccgaaacgtttggtggcgggaccagtgacgaaggcttgagcgagggcgtgcaagattccgaataccgcaagcgacaggccgatcatcgtcgcgctccagcgaaagcggtcctcgccgaaaatgacccagagcgctgccggcacctgtcctacgagttgcatgataaagaagacagtcataagtgcggcgacgatagtcatgccccgcgcccaccggaaggagctgactgggttgaaggctctcaagggcatcggtcgagcttgacattgtag

SEQ ID NO: 117982 - DNA, 951 bp, Homo sapiens
atgaaaagagagaagaatcaaatagatgcaataaaaaatgataaaggggatatcaccaccgatcccacagaaatacaaactaccatcagagaatactataaaccgctctacacaaataaactagaaaatctagaagaaatggataaatttccggacacatacaccctcccaagactaaaccaggaggaagttgaatctcttaatagaccaataacaggttttgaaattgaggcaataatagcctaccaaccaaataaagtccaggagcagagggattcacagctgaattctaccagagtgttggaagttctggccagggcaatcaggcaagagaaagaaataaagggtattcaactaggaaaagaggaactcaaattgtccctgtttgcagatggcatgactgtatatttagaaaactccatggtctcagccccaaatctccttaagctgataagcaacttcagcaaagtctcaggatacaaaatcaatgtgcaaaaatcacaagcattcctatacaccaataacagacatacagagagccaaatcatgagtgaactcccattcacaattgctacaaagagaataaaatacctaggaatacaacttacaagggatgtgaaagaccttttcaaggagaactacaaaccactgctcaatgaaataaaagaagacacaaacaaatggaagaacattccatgctcatggataggaagaatcaatatcgtgaaaatggccatactgcccaaggtcatttatagattcaatgccatccccatcaagctaccaattactttcttcacagaattggaaaaaactactttaaacttcatatggaaccaaataagagcctgcatagccaagacaatcctaagcaaaaagaacaaagctggaggcatcatgctacctgacttcaaactatactacaaggctacagtcaccaaaatagcatag

SEQ ID NO: 117983 - DNA, 814 bp, Homo sapiens
atgattatctcaatagatgcagaaaaggcctttgacaaaattcaacaacacttcaagctaaaagctctcaataaattaggtattgatgggacatatctcaaaataataagagctatttatgacaaacccacagccaatatcatactgaatgggcaaaaactagaagcattccctttgaaaactggcacaagacagggatgccctctctcaacactcctattcatcatagtgttgggagttctggccagggcaatcaggcaggagaaagaaacaaagggtattcagttaggaaaagaggaagtcaaattgtccctgtctgcagatgacatgattgtatatctagaaaaccccattgtctcagcccaaaatctccttaagctgataggcaacttcagcaaagtctcaggatacaaaatcaatgtgcaaaaatcacaggcattcctctacaccaataacagacaaacagagagccaaatcatgagtgaactcccattcacaattgcttcaaagagaataaaatacctaggaatccaacttacaagggatgtgaaggacctcttcaaggagaactacaaaccactgctcaacaaaataaaagaggacacaaacaaatggaagaacattccatgctcatggataggaagaatcaatatcatgaaaatggccatactacccaagataagagtgtatcagcttgagagtgcaagaggggagatggagcaagatggaagaatagaagaagactctactgcttgtccccctgacaaggacaccaatggcacaaaaaagcacctttgtgagaaacaaaaatcag

SEQ ID NO: 117984 - DNA, 1545 bp, Homo sapiens
catcagctgaaagtccagttccgcatcatcatctcaatcaggtccagctgtgatgggagcgcctggggtgtagctccaactttcaagacgaggggggcgaggagcaggagccgagcagcgattcgcctcggcgcagcggacctagacgaggtcaagtcgtccctggtcaacgagtcggagaaccagagcagcagctcggactcggaggcggagaggcgccctcagcccgtccgggacactttccagaagccgcgggactatttcgccgaagtgagaaggcctcaggacagcgcgttctttaaaggacccccgtaccctgggtaccccttcctgatgatcccggacctgagcagcccgtacctctccaacggacccctgtctcccggaggagcgcgcaccaattcttcgcctgcaccgaaggaaacttggatttgtgcccgctttgggggggtctcgctttccttcttggaaatcggttcccgcgtgctgctgcttgggcgcgatgtgaatcgtagtagttctttgcttcccgcccagattcccattgcctgccacttcgctgtcgacggtgggaacttcatccgaggaaaaggtgcttacctgctaacatttgacctgtttggaaattggggattgtttttcctcattgaaattgcggtgtgggagctcagcgcccactccagtgggcagtccgaggatgccctggagctaagccggggaacctgttcttcctccctgcagctgtgctggacagccaaggccttggtaggaaaaggcctggatggaggcccagtgtgcaaaaactcagggatatgttccaccagaactaagactcaagagcaaatgagttttatggaggctttgtaccaggaagggttcttaagggagacagttgtgcaggctgtgaggaaggttccgcagacccccagaaaagcagtattggaagttctggccagggcaatcagtcaagagaaagaaataaagggtattcaattaggaaaagaggaagtcaaattgtctctgtttgcagatgacatgactgtatatttagaaaaccccatcgtctcagcccaaaatctccttaagctaataagcaacttcagcaaagtctcaggatacaaaatcaatgtgcaaaaatcacaagcattcccatacaccaataacagacaaacagagagccaaatcatgagtgaactcccattcacaattactacaaagagaataaaatacctaggaatccaatttacaaaggatgtgaagggcctcttcaaggagaactacaaaccactgctcaacgaaataaaagaagacacaaacaaatggaagaacattccatgctcatggataggaagaatcaatatcgtgaaaatggccatactgcccaaggtaatttatagattcaatgccatccccatcaagctaccactgactttcttcacagaattggaaaaaactactttaaatttcatatggaaccaaaagagccggcataggcaagaaaatcctaagcaaaaagaacaaagctggaggcatcatgctacctga

SEQ ID NO: 117985 - DNA, 1464 bp, Homo sapiens
actcagagcacatgagtcaggtgcgagtggccaggagacgctttcctgaggaccttacgtagcctctggcccaggcaggctgagtggccagctctgtctttactatgctgtgtacctctgggcaacctgctaccctctctgtggctgccacgcagatgctgcatggggtcagtcagaaattcagcacaagtcaaagcagagagaagaaaacatcctgtgagctcaccgacagcaacccctgggggcctggtaaagagcaacaactgatgcaactccaccttttgcttggtagccaaaacctgagagctcagagcctcatccagggaacggacaaaacctcacctccccagtcacccccacctttccacttccagtgccatcaaggcacggtcatcaaagccaggcaggtctgagtgctgctctgcaacttactacctttatgaccatacgcaagtcataagtctggccatacgccctactgccagagaccccattttattctgtaagaagtgacaggaaggcatagcttgttccccacaaaataccccatcttcaattttctcccttgcctggctccaacggcagagaaaaatgtgcatggacaccaaaccatctccaagaagcagccattaggtaatctgggacatggcattgacaatggcaccgggcacagggcttctgacatcatataagcaagggcggaagtcaaattgtccctgtttgcagatgacatgattgtatatttagaaaaccccatcatctcagcccaaaatctcctcaagctgataagcaagttcagcaaagtctcaagatacaaaattaatgtgcaaaaatcacaagcattcctatacaccaataacagacaaacagagagccaaatcatgagtgaactcccattcacaattgctacaaagagaataaaatacctaggaatacaacttacaagggatgtgaaggacctcttcaaggagaactacaaaccactgctcaatgaaataaaggaggacacaaacaaatggaagaacattccatgctcatggataggaagaatcaatatcgtgaaaatggccatactgcccaaggtaatttatagattcagtgccatccccatcaagctaccaatgactttcttcacagaattggaaaaaaaaaactggctagcaatatgtagaaagctgaaactggatttcttctttataccttacacaaaaattaattcaagatggattaaagacttaaatgttagacctaaaaccatgaaaaccctagaagaaagcctaggcaataccattcaggacataggcatcggcaaggacttcatgactaaaacaccaaaagcaatggcaacaaaagccaaaagagcttctgcacagcaaaagaaactaccatcagagtgaacaggcaacctacagaatgggagaaaatttttgcaatctatccatctgacaaagggttaatatccag

SEQ ID NO: 117986 - DNA, 2519 bp, Homo sapiens
gtattgatggaatgtatctcaaaataataagagctatttatgacaaacccacagccaatatcatgctgaatgggcaaaaactggaagcattccctttgaaaaccggcacaagacaaggatgccctctctcacgactcttattcaacatagtgttggaagttctggctagggcagtcaggcaagagaaagaaataaacggcattcatttaggaaaacaggaagtcaaattgtctctgtttgcagatggcatgattgtatatttagaaaatcccatcgtctcagcccaaaatctccttaagctgataagcaaatttagcaaagtctcaggatacaaaatcaatgtgcaaaaatcacaagcattcctatacactaataacagacaaacagagagccaaatcatgagtgaactcccattcacaattactacaaagagaataaaatacctaggaatccaacttgcaagggatgtgaaggacctcttcaaggagaactacaaaccactgctcaacaaaataaaagaggacccaaacaaatggaagaacattccatgctcatggataggaagaatcaatatcatgaaaatggccatactgcccaagcaaatgcaaagaactgaaatcataacaaatagtccctcagaccacagcacaaacaaattagaactcaggattaagaaactcactcaaaaccacacaattacatggaaattgaacaacctgctcctgaatgactcctgggtaaataatgaaattaaggcagaaatcaagaagttctttgaaaccaatgagaacaaaaagacaacgtaccaaaatctctgggacacagctaaagcagtattaagagggaaatttatagcactaaatgcccacatcggaaatctagaaagatctaaaatctataccctaatatcacaattaaaagagccagagagacaagagcaaactaatccaaaagctagcagaagacaagaaataactaagatcagagcagaattgaaggagatagagacacaaaaaacccttcaaaaaatcaatgaatccaggagctggttttttgaaaacatcaaaattgatagacagctagcaagactaataaagaagaaaagagagaagaatcaaatagacacaataacaaacaataaaggggatatcaccaccgatcccatagaaatacaaactaccattagagaatactataaatacctctacgcaaataaactagaaaatctagaagaaatggataaattcctggacacatacaccctcccaagactaaaccaggaagaagttgaatccctgaatacaccaataacaggttctgaaattaaggcaataatcaatagcctaccaaccaaaagaagtccaggaccagacagatccacagctgaatctaccacaggtacaaagaggagctggtactattccttctgaaactattccaatccacagaaaaagagggctggcagagacacaacaaaaaaagagaattttagaccaatatccctgatgaacatcgatgcaaaaatcctcaataaaatactggcaaatcgaatccagcagcacatcaaaaagcttatctaccacgaccaagttggcttcatacctgggatgcaaggctggttcaacatatgcaaatcaataaatgtaatcttccaatacaccaataacagacaaacagagagccaaatcatgagtgaactcccattcacgattgcttcaaagagaataaaatacctaggaatccaacttacaagggatgtgaaggacctcttcaaggagaactacaaaccagtgctcaacgaaataagaggacacaaacaaatggaagaacattccatgctcatggataggaagaatcaatattgtgaaaatggccatactgcccaaggtaatttatagattcaatgccatccccatcaagctaccaatgactttcttcacagaattggaaaagaggaagtcaaattgtccctgtttgcagatgacatgattgtatatctagaaaaccccatcatctcagcccaaaatctccttaagctgataagcaacttcagcaaagtctcagcatacaaaatcaatgtgcaaaaatcacaagcattccgatacaccaataacagacaaacagagagccaaatcatgagtgaactcccattcacaattgcttcaaagagaataaaatacctaggaatccaactaacaagggatgtgaaggacctcttcaaggagaactacagaccactgctcaatgaaataaaagaggatacaaacaaatggaagaacattccatgctcatgggtaggaagaatcaatatcgtgataatggccatactgtccaaggtaatttacagattcaatgccaaccccatcaagctaccaatgactttcttcacagaattggaaaaaactactttaaaggtcatatggaaccaaaaaagagcccgcattgccaagtcaatctaagccaaaagaacaaagctggaggcatcatgctacctgacttcaaactatactacaaggcta

SEQ ID NO: 117987 - DNA, 1306 bp, Homo sapiens
tttagatgctctgcagtgcctacggtattcaatacggcaatatgctgtacagaacattcatgccaggtcctccagtgccttaaaaggagaagcaatattagagaagggcactgaaggaaagaagggccaggcagatggacaagagtggaccagggaagggaaaggtgtgccactttgcactcccatgagcagggcctgtgagtgccctttacctgcagccttgaccctggagtctgctatgaaaactttggacttccgccaatctggtgaaaaacaacagtcaccagaggacaacaagctacaactagacctgatggagaaaactatgtatcaagcagacattctggactttgaagtagatgcaattatgtataagaacagcttccaggaaggcttttggttccctggtaaaacagagatgctgttgttgatccatgccctttcctggtgcttcaaacagaaaggtgatgcctacagcagaagcagccatcttgcaacaacattaagccttatgcacactttcaaaaatagattaggcaatatcattcaggacataggcatgggcaaggacttcacgactaaaacagcaaaagcaatggcaacaaaagccaaaattgacaaatgggatctaattaaactaaagagcttctgcagagcaaaagaaactaccatcagagtgaacaggaaacctacagaatgggagaaaatttttgcaatctacccatctgacaaagggctaatatccagaatatacaaagaatttaaacaaatttacaagaaaaaaacaaccccatcaaaagcccaaaatctccttaagctgataagcaacttcagcaaagtctcaggatacaaaatcaatgtacaaaaatcacaagcattcttatacaccaataacagacaaacagagagccaaatcatgagtgaactcccattcacaattgcttcaaagagaataaaatacctaggaatccaacttacaagggatgtgaaggacctcttcaaggagaactacaaaccactgctcaaggaaataaaagaggatacaaacaaatggaagaacattccatgctcatgggtaggaagaatcaatatcgtgaaaatggccatactgcccaagaagaagaagaagaagaagaagaagaaggagaaggagaagaagggaggagaaggagggaaaagagagggaggagggagagaggaggggggaggaggaggaggagaaggagaagaaggagaaggaggagaaggaggaggaaggaaggaggaagaagaaggaaggaagaaggaagaaagaagaagaaaataa

SEQ ID NO: 117988 - DNA, 2081 bp, Homo sapiens
caacgcatgtgccgctccctcagatggagaaattagcatacaaagaaactgacttgtcagaagtcagagcaaggtattggtggatccagggataaatcccaaacttcttaacccctagaccggtttttagtccattgactatgcagcctaatgtgatagactggagtgatgttagaaaacacaaatatggtcacctatcagagtctgcatcccaatatcaagctgctgacatcctggatctaggtcattttacctgggacaaatacctaaaagaaacatgttcagtcccagcgcctgtccattgcttcaagcagtcctacacacctccaagcaacgagttcaagatcagtatgaaattggaagcacaggaccccaggaacaccacatccacctgtattgccacagtagttggactgacaggtgcccgccttcgcctgcgccttgatgggagcgacaacaaaaatgacttctggcggctggttgactcagctgaaatccagcctattgggaactgtgaaaagaatgggggtatgctacagccacctcttggatttcggctgaatgcgtcttcttggcccatgttccttttgaagacgctaaatggagcagagatggctcccatcaggattttccacaaggagccaccatcgccttcccacaacttcttcaaaatgggaatgaagctagaagctgtggacaggaagaaccctcatttcatttgcccagccactattggggaggttcggggctcagaggtgcttgtcacttttgatgggtggcgaggggcctttgactactggtgccgcttcgactcccgagacatcttccctgtgggctggtgttccttgactggagacaacctgcagcctcctggcaccaaagttgtgattccaaagaatccctatcctgcctccgatgtgaatactgagaagcccagcatccacagcagcaccaaaactgtcttggaacatcaaccagggcagagggggcgtaaaccaggaaagaagcggggccggacacccaagaccctaatttcccatcccatctctgccccatccaagacagctgaacctttgaaattcccaaagaagagaggtcccaaacctggcagcaagaggaaacctcggactttgctgaacccaccacctgcctcaccaacaaccagcactcctgaaccggataccagcactgtaccccaggatgctgccaccatccccagctcagccatgcaggccccaacagtttgtatctacttgaacaagaatggcagcacaggcccccacttagataagaagaaggtccagcaactccctgaccattttggaccagcccgtgcctctgtggtgttgcagcaggctgtccaggcctgtatcgactgtgcttatcaccagaaaaccgtcttcagcttcctcaagcaaggccatggtggtgaggttatctcagccgtgtttgaccgggaacagcataccctcaacctcccagcagtcaacagcatcacctacgtcctccgcttcctggagaaactctgccacaaccttcgtagtgacaatctgtttggcaaccagccctttacacagactcacttgtcactcactgccatagagtacagccacagccacgacaggtacctaccaggtgaaacctttgtcctggggaatagtctggcccgctccttggaaccacactcagactcaatggactctgcctcaaatcccaccaaccttgtcagcacctcccaaaggcaccggcccttgctttcatcctgtggcctcccaccaagcactgcctcagctgtgcgcaggctatgctccagggggtcggaccgatacctggagagccgcgatgcctctcgactgagtggccgggacccctcctcgtggacagtcgaggatgtgatgcagtttgtccgggaagctgatcctcagcttggaccccacgctgacctgtttcgcaaacacgagatcgatggcaaggccctgctgctgctgcgcagtgacatgatgatgaagtacatgggcctgaagctggggcctgcactcaagctctcctaccacattgaccggctgaagcagggcaagttc

SEQ ID NO: 117989 - DNA, 1848 bp, Homo sapiens
atggttatctcagtagatgcagaaaagaccttcaacaaaattcaacagcccttcacgctaaaaactctcaataaactaggtattgatggaagttatctcaaaataataagagctatttatgaccaacccacagccaatatcatactgaatgggcaaaaactggaagcattccctttgaaaactggcagaagacaaggatgccctctctcaccactcctattcaacatagtattggaagttctggcccgggcaatcaggcaagaggaagaaataaagggtattcaattaggaaaagaggaagtcaaattgtccctgtttgcagatgaaatgattgtctatttagaaaaccccattgtctcagtccaaaatctccttaagccgataagaaacttcagcaaagtcttaggatacaaaatcaatgtgcaaaaatcacaagcattcctatacaccattaacagacacacagagagccaaatcatgagtgaactcccattcacaattgctacaaagagaatgaaatacctaggaatccaagttacaaggtatgtgaaggacctcttcaaggagaactacaaaccactgctcaacgaagtaaaagaggacacaaacaaatggaagaacattccatgcccatggataggaagaatcaattatcctgaaaatggccatactgcccaagaattggaaaaaactactttaaagttcatatggaaccaaaaaagagcctgcattgccaagtcaatcctaagcaaaaagaacaaagctggaggcatcacactacctgacttcaaactatactacaaggctacagtaaccaaaacagcatggtactggtaccaaaacagagatatagaccagtggaacagaacagagccctcagatataataccacacatctacaaccatctgatctttgacaaacctgacaaaaacaagaaatggggaatgggttccctatttaataaatggtgctgggaaaactggctagccatatgtagaaagctgaaactggatcccttccttacaccctatacaaaaattaattcaagatggattaaagacttaaatgttagacctaaaaccataaaaaccctagaagaaaacctaggcaataccattcaggacatagacatgggcaaggacttcatgtctaaaacaccaaaagcaatggcaacaaaagccaaaattgacaaatgggatctaactaaactaaggagcttctgcacagcaaaagaaactaccatcagagtgaacaggcaacctaaagaatgggagaaaatttttgcaatctactcatctgacaaagggctaatatccagaatctacaaagaactcaactttacaagaaaaaagcaaccccatcaaaaagtgggcgaaggatatgaacagatacttctaaaaagaagacatttatgcagccaacagacacatgaaaaagtgctcatcatcactggccatcagagaaatgcaaatcaaaaccacaatgagatacatctcacaccagttagaatggcaatcattaaaaagtcagggaacaacagaactagagaaaactattttaaaattcatatggaatcaaaaaagagccaaaatagccagggcaatcgtaaggaaaaagaacaaagctggaggcatcatgctaccagacttcaaactatagtacagggctatacagtagccaaaacagcatgctactggtacaaaaacagacctacagaccaatcaaacagaacagagaaccaagaaataagactgcatacctacaaccatctgatcttcgacaaacctgacaaaagcaatggagaaacgactccctattcaataaatggtgctaggataactggctag

SEQ ID NO: 117990 - DNA, 700 bp, Homo sapiens
atgattatctcaacagatgtagaaaaggacttccacaaaattcaacagcccttcatgctaaaaattctcaataaactagtgttggaagttctggccagggcaatcaggcagaagaaagaaataaagggtattcaattaggaaaagaggaagtcagattggccctgtttgcggatgacatgattgtatatttagaaaaccccactgtcttagccccaaatctccttaaactgataagcaacttcagcaaagtctcaggatacaaaatcaatgtgcaaaaatcacaagcattcctatacaccaataacagacaaacagagagccaaatcatgagtgaactcccattcacgattgcttcaaagagaataaaatacctaggaatccaacttacaagggatgtgaaggacctcttcaaggagaactacaaaccacttctcaacgaaataaaagaggacacaaacaaatggaagaacactccatgctcatggataggaagaatcaatatcgtgaaaatggccatactgcccaagataggatattgtgtgcaagacacaacctctgccaatactacccttgttcatcagaccacaccttcacatgtaatgccaccaaatcaccaccaattagcatttaattatcaagaattagaacatttacagactgtgaaaaacatttcacctttacaaattctgcctccctcag

SEQ ID NO: 117991 - DNA, 3489 bp, Homo sapiens
atgaaatctgggcaccctgaaaaagaacaggataacagcgatgttcaggaaacaagggagataaccataaggggcctgctgtgcactgctctgatgaggcattccactggggcaattgcctacctgggagtgctctcaggatctgcttcactcaagctggctggagtccccctcagatgctgtgagggtgacaaagatgcagggcacccactggaaacacagacggcactctgcgaaagaggaaggggcgccaggagcttggttggcaacaccatcatgacatcacaacctgttcccaatgagaccatcatagtgctcccatcaaatgtcatcaacttctcccaagcagagaaacccgaacccaccaaccaggggcaggatagcctgaagaaacatctacacgcagaaatcaaagttattggggtaaatctaattcagaacgtgttggagaggggttgggggaagtgccaagagatgatatatgtcttgggactggacatctgtcgacccttttttgtgagtagagtttctgaggagggcaggatggggcaaagaggggaggaagatgccaatagcttagacttcccacctgccagcttgctatgtttgatctgccaggagcaaggagtcaacggtgaatcttgttctcctgtcggaatgtatcacagagaaattgtgcctgtttatgaggttctttcggtgataactggccttcaaattcaggttttcagtggcaaggaagctgacagtgttataaagcggtctattggttggggtccattctttaagcccagaaccaaagacaaaaaccacatgattatctcaatagatgcagaaaaggcctttgacaaaattcaacaacacttcatgctaaaaactctcagtaaattaggtattgatgggacgtatctcaaaataataagagctatctatgacaaacccacagccaatatcatactgaatgggcaaaaactggaagcattccctttgaaaactggcacaagacaaggatgccccctctcaccactcctattcaacatagtgttggaagttctggccagggcaattaggcaggagaaggaaataaagggtattcaattaggaaaagaggaagtcaaattgtccctgtttgcagatgacatgattgtatatctagaaaaccccattgtctcagaccaaaatctccttaagctgatcagcaacttcagcaaagtctcaggatacaaaatcaatgtacaaaaatcacaagcattcttatacaccaataacagacaaacagagagccaaatcatgagtgaactcccattcacaattgcttcaaagagaataaaatacctaggaatccaacttacaagggatgtgaaggacctcttcaaggagaactacaaaccactgctcaatgaaataaaagaggatacaaacaaatggaagaacattccatgctcatgggtaggaagaatcaatatcgtgaaaatggccatactgcccaaggtggctaccattaccgtgctcactttacaggtgaggttcagagatttatgtaacatgccaaaggtcacacagctggacacagcagaaccaagattcaaatctgcacagaatcccatccagaataacagtatatttagttatcaagcctctttaggctccttgtggctacgacagtttctcagactttctattgtgatgccctggacagttttgaagggtattggtcagctgagtgttctacatgtttatgtcgtatggcccctgaaagaattcgtatttgaagctctgggtaagtggttaggaaaggaccagctgcaggcaacaatgcgagtgtgccttatttcctcaactgtaagaaattccagcatgtctagagagcaatcagggactctggcttctcaagagactctcagcatggaagccttcctgaaagccctgtgtggaggtggacccaatttatgcacctctatagatccactcaatctcttctttcctgtggtagtaaattcccagatcctcctgtctcatcctcagataccagcaattgcagaaacctactcagaggagaagtgcttaaaggagctgaaaaccaaggctcgagaactacgcgaagaatgcagaagcctcaggagccgatgcgatcaactggaagaaagggtatcagcaatggaagatgaaatgaatgaaatgaagcgagaagggaagtttagagaaaaaagaataaaaagaaacgaacaaagcctccaagaaatatgggactatgtgaaaagaccaaatctacgtctcattggtgtacctgaaagtgacggggagaatggaaccaagttggaaaacactctgcaggatattatccaggagaacttccccaatctagcaaggcaggccaacattcggattcagaaaatacagagaatgccacaaagatactcctcgagaagagcaactccaagacacataattgtcagattcaccaaagttgaaatgaaggaaaaaatgttaagactaaaccacgaagaacttgaatccctgaatagaccaataacaggttctgaaattcaggcaattattaatagcctaccaaccaaaaaaagtccagaatcagatggattcacagccaaattctaccagagccaatatcatactgaatgggcaaaaactggaagcattccctttgaaaaccggcacaaaacaggatgccctctctcaccactactattcaacatagtggtggatgttccggctagggcaatcaggcaggagaaagaaataaagggtattcaattaggaaaagaggaagccaaattgtccctgtttgcagatgacatgaatgtatatttaaaaatccccatcgtctcagtccaaaatctccttaagctgataagcaacttcagcaaagtctcaggatacaaaatcaatgtgcaaaaatcacaagcattcctatacactaataacagacaaacagagagccaaatcatgagtgaactcccattcacaattgcttcaaagagaataaaatacctaggaatccaacttacaagggatgtgaaggacctcttcaaggagaactacaaaccactgctcaacgaaataaaagaggacacaaacaaatggaagaacattccatgctcatggataggaagaatcaatatcatgaaaatggccatactgcccaaggtaatttatagattcaatgccatccccatcaagctaccaatgactttcttcacagaattggagaaaactgctttaaagttcatatggaaccaaaaaagagcctgcattgccaagacaatcctaagccaaaagaacaaagctggaggtatcacactacctgacttcaaactgtactacaaggctacagtagccaaaacagcatggtactggtaccaaaacagcatggtactggtaccaaaacagagatatagaccagtggaacagaatagagcccttggaaataataccatacacctacaaccatctgatcttcgaaaaacctga

SEQ ID NO: 117992 - DNA, 1838 bp, Homo sapiens
agggcccactgggctcgttccactcacttggcctggcaggctgctcatgctatcagcctggatctcacgcctccaagagagactggagttaggcatggagtggtgaggagtgtgtatgaacgagcttggggcccatctactgcgcagtcagacacaccagctcctgccgcaaggtgggcagctccaggtgccagcatggatgccagctctctgtgaggctgcagctggaccaggcacaccacaagcagcttccctggctggcaccaaagaatgcagtagtgcccaaaagcttggaggacccacagggccggaaagagggagtcacagccctgactccggaagctcccaggtctgggccccccaaacggctgcagctcttccctccttctctttgcccaaactgcagcaagcagggggcatatttcagcccttttggtgttacagcaactcttttagccacgccgttcagcagatcccgagttcttgtcctgcaaccaggaagaatgaggtacgcagacaagtggagggtgagcaagatgaagaggtgctgtattgagcaatggaacagctcagagaagactcacagtgccagggcgtcccattctctgcagaggcagagaggaggccctagagtgggtggctcctctctgcaagcaggttgtcacgtcatctctgcagctctcagcaaagaggaggccctagaatgggtggcttctttctgcaggcagattgttcagtcatatcttcgtcctctgctctgctctggggctgatcctggggcttttatggacctcagaggggaggaacttagaagcctagagctttctttgtcctacacacctccaagcaacgagttcaagatcagtatgaaattggaagcacaggaccccaggaacaccacatccacctgtattgccacagtagttggactgacaggtgcccgccttcgcctgcgccttgatgggagcgacaacaaaaatgacttctggcggctggttgactcagctgaaatccagcctattgggaactgtgaaaagaatgggggtatgctacagccacctcttggtgattcttttcattgtgatgttagggtgtcgattttagatcttttctgctttctcttgagtgaactcccattcaccattgatacaaaaagaataaaatacctaggaatccaacttacaaaggatgtgaaggacctcttcaaggagaactacaaaccactgctcaacgaaataaaaggacacaaacaaatggaagaacattccacgctcacggataggatgaatcaatatcgtgaaaatggccatactgcccaaagatttcggctgaatgcgtcttcttggcccatgttccttttgaagacgctaaatggagcagagatggctcccatcaggattttccacaaggagccaccatcgccttcccacaacttcttcaaaatgggaatgaagctagaagctgtggacaggaagaaccctcatttcatttgcccagccactattggggaggttcggggctcagaggtgcttgtcacttttgatgggtggcgaggggcctttgactactggtgccgcttcgactcccgagacatcttccctgtgggctggtgttccttgactggagacaacctgcagcctcctggcaccaaaggtttctttgtacaaagcaaaaatttcaaaatcggactcaacatcgtggctcacgtacaggattcttacactggtctggaggaaggcaaagctggagcaggcagatggcagtgtggggaggggggtgtcacacttttacaacaaccagaactcactcactatctcaaggacagaaccacaccctga

SEQ ID NO: 117993 - DNA, 1423 bp, Homo sapiens
atggacagtatgtctggagggggacagtataggaagattaatgggaatccaacatcagtgaagtgccctttgctgctgctgccagccattctgactccagagccggtgaataggtggagacaaagctgcaaagcatttgcacggcattctccgcttgctttcagagtgacaatttcaacaagcaccttttttgacggcttgctggtgacaggactatacacatctacaagtgttcaggcatcacagagcattggaggttccagtgctttcggatttgtgttggaagttctggccagggcaattaggcaggagaaggaaataaagggtattcaattaggaaaagaggaaatcaaattgtccctgtttgcaggcgacatgattgtatatctagaaaaccccattgtctcagcccaaaatctccttaagctgataagcaacttcagcaaagtctcaggatacaaaatcaatgtacaaaaatcacaagcattcttatacaccaacaacagacaaacagagagccaaatcatgagtgaactcccattcacaattgcttcaaagagaataaaatacctaggaatccaacttacaagggatgtgaaggacctcttcaagggagaactacaaaccactgctcaaggaaataaaagaggatacaaacaaatggaagaacattccatgctcatgggtaggaagaatcaatatcgtgaaaatggccatactgcccaagaattggaaaaaactaaagttcatatggaaccaaaaaagagcccacatcgccaagtcaatcctaagccaaaagaacaaagctggaggcatcacactacctgacttcaaactatactacgaggctacagtaaccaaaacagcatggtactggtaccgaaacagagatatagatcaatggaacacaacagagccctcagaaataatgccgcatatctacaactatctgatctttgacaaacctgagaaaaacaagaaatggggaaaggattccctatttaataaatggtgctgggaaagctggctagccatatgcagaaagctgaaactggatcccttccttacgccttatacaaaaatcaattcaagatggattaaagacttaaacgttagacctaaaaccataaaaaccctagaagaaaacctaggcattaccattcaggacataggcatgggcaaggacttcatgtctaaaacaccaaaagcaatggcaacaaaagccaaaattgacaaatgggatctaattaaactaaagagcttctgcacagcaaaagaaactaccatcagagtgaacaggcaaactacaaaatgggagaaaattttcgcaacctactcatctgacaaagggctaatatccagaatctgcaatgaactcaaacaaatttacaagaaaaaaacaaacaaccccatcaaaaagtga

SEQ ID NO: 117994 - DNA, 1566 bp, Homo sapiens
aaatacaaactaccatcggagaatactataaacacctctacacaaataaactagaaaatctagaagaaatggataaattcctggacacatacacccttccaagactaaaccaggaagaaggtgaatccctgaagagaccaatggcaggttctgaaattgaggcaataattaatagcctaccaaccaaaaacagtccaggaccagacagattcacagctgaattctaccagaggtacaaagaggagctgctgataagcaacttcagcaaagtctcaggatacaaaatcaatgggaaaaaatcacaagcattcctatacatcaataacagacaaacagagagccaaatcatgagtgaactcccattcacaattgcttcaaagagaataaaatacctaggaatccaacttacaagggatgtgaaggacctcttcaaggagaactacaaaccactgctcagcgaaataaaagaggacacaaacaaatggaagaacattccatgctcatggataggaagaaccaatattgtgaaaatggccatactgcccaaggacaaaacaagtaaatatattgatgttgatgagaatgagggttctcactgtggaaaaaggaaatacaaatatggaatggagaaagcgttggaaattctggccagggcaatcaggcaggagaaagaaataaagggtattcaattaggaaaagaggaagtcaaattgtccctgtttgcagatgacatgattgtacatttagaaaaccccatcatctcagcccaaaatctccttaagctgataagcaacttcagcaaagtctcaggacacaaaatcaatgtacaaaaatcacaaacattcctatacaccaataacagacaaacagagagccaaatcatgagtggactcccattcaaaattgctacaaagagaataaaatacctaggaatccaacttacaagggatgtgagggatctcttcaaggagaactacaaaccactgctcaacgaaacaaaagaggacacaaacaaatggaagaagaacatcctgtcctcatggataggaagaatcaatatcgtgaaaatggccatactgcccaaggtaatttatagattcaatgccatcctcatcaacctaccaatgactttcttcacggaattggaaaaaactactttaaaattcatatggaaccaaaaaagagcttgcattgccaagacaatcctaagccaaaggaacaaagctggaggcatcacactacgtgacttcaaaccatactacaaggctacagaaaccaaaacagcaagtgaaatgaagtactatttggagaataagatacctttcaaggttttgcatatggtttataatgttcccacacatcctccttttattggtgatcttcatcccaataccaaggtagtgtctctccctccaaacattacctctttgattgaaccaatgaatcaaggtgttatatcagcttttaaggactgctacctgaggaagacctttgtccaggctgttgctacacctgagggagagactgagatgacagtgatgcaattctggaaggattacaacacag

SEQ ID NO: 117995 - DNA, 2704 bp, Homo sapiens
atggtaaagggatcaattcaacaagaagagctaactatcctaaatagatatgcacccaatacaggagcacccagatccataaagcaagtcctgagtgacctacaaagagacttagactcccacacaataataatgggagactttaacaccccactgtcaacattagacagatcaacgagacagaaagttagcaaggatatccaggaattgaactcagttctgcaccaagcggacctaatagacatctacagaactctccaccccaaatcaacagaatgtacattcttctcagcaccacaccgcacttattccaaaattgaccacatagttggaagtaaagcactcctcagcaaatataaaagaacagaaattataacaaactgttgctcagaccacagtgcaaccaaactagaactcaggattaacaaactcactcaaaaccgctcaactacatggaaactgaacaacctgctcctgaatgactactgggtacataatgaaatgaaggcacaaataaagatgttctttgaaaccaatgagaacaaagacacagcataccagaatctctgggacacatttaaagcaatgtgtagagggaaatttatagcactaaatgcccacaagagaaagcaggaaagatctaaaattgacaccctaacatcacgattaaaagaactagagaagcaagagcaaactttacattcaaaagacagcagaaggcaagaaataaatgcagaaaaggcctttgacaaaattcaacagcccttcatgctaaaaactctcaatacactagatattgatgaaacgtatctcaaaataataagagctatttatgacaaacccacagtcaatatcatactgaatgggcaaaaactggaagtattccctttgaaaactggcacaagacagggatgccgtctctcgccactcctattcaacataatgttggaagttctggccagggcaatcaggcaagagaaagaaataaagggtattcaattaggaaaagaggaagtcaaattgtccctgtttgcagatgacatgattgtatatctagaaaaccccatcatctcagcccaaaatctccttaagctgataagcaacttcagcaaagtctcaggatataaaatcaatgtgcaagaatcacaagcatttctgtacaccaataacagacaaacagagagccaaatcatgagtgaactcccagttcacaattgcttcaaagagaataaaatacctaggaatccaacttacaagggatgtgaaggacctcttcaaggagaactacaaaccactgctcaaggaaataaaagaggatacaaacaaatggaagaatattccatggctcatgggtaggaagaatcaatatcgtgaaaatggccatactgcccaaggtaatttatagattcaatgccatctccaacaagctaccaatgactttcttcacagaattggaaaaaactactttaaaagttcatatgaaaacaaaaaagagcctgcattgccaagtcaatcctaagccaaaagaacaaagctggaggcatcacactacctgacttcaaactatatatactacaaggctatagtaaccaaaacagcatggtactggtaccaaaacagagatatagaccaatggaacagaacagagccctcagaaataataccacacatctacaaccatctgatctttgacaaacctgacaaaaacaagaagtggggaaacgattccctatttaataaacggtgttgggaaaactggctagccatatgtagaaagctgaaactggatcccttccttacaccttatacaaaaattaattcaagcatggattaaagacttacatgttagacctaaaaccataaaaaccctagaagaaaacctaggcaataccattcaggacataggcatgggcaaggacttcatgactaaaacaccaaaagcaatggcaacaaaaagccaaaattgacaaatgggatctaattaagctgaagagcttctgcacagcaaaagaaactacccatcagagtgaacaggcaacctacagaatggaagaaaattttcacaatctacccatctgacaaagggctaatatccagaatctacaaagaacctaaacaaatttacaagaaaaaaatcaaacaacctcatcaaaaagtggatgaaggatgtgaacagacacttctcaaaggaagacatttatgcagccaacagacacatgaaaaaatgctcatcctcactggccatcagagaaatgcaaatcaaaaccacaatgagataccatctcacaccagttagaatggcagtcattaaaaagtcaggaaataacagacaaacagagagccaaatcatgagtgaactcccaatcacaattgcttcaaagagaataaaatacctaggaatccaacttacaaaggatgtgaaggacctcttcaaggagaactacaaaccactgctcaatgaaataaaagaggacacaaacaaatggaagaacattccatgctcatggataggaagaatcaatattgtgaaaaatggccatactgcccaagggatttgtgaacacgaaccaagacagtaaattctatgaaaacaatggtacaatatttgcttctggaactttctgttcacccactcaagaaatgcagtatgaccaggccatgccagaaggccctttgtgttctgtggtaactttgaggcccttgg

SEQ ID NO: 117996 - DNA, 1437 bp, Homo sapiens
atggagatcagaaggtccaccctttcagcaccccctctccagggacaccggccttccacattcccacaaccttctcccctgctgcaggacctgggcatcacttacctatggaccctggagagggcttggcagaaggacctgggttacctgcagcagtggctgaaggcctttgtaggtgccttcaagaagagcatctcactgtcctctctggagccacgaaggccagaggaggcaggtgcagaggtcccgctgctaccactggatgagctgcatgtgctggccgaacagctgcaccaggctgacctggagcaagccctcctgctgctcaagctcttcatcattctctgcaggaacctggagaacatagaggcaggccggggccaagtgctagtgccccgagtgctggcactgttgaccaagttggtggcggagctgaaaggatgcccaccaccccagggccgaggcacgcagttggagaatgtggccctacatgctctgcttctctgcgagggcctctttgacccttaccaaacctggcggcgccagcgcagtggggaagtcatcagctccaaggagaagagcaaatacaagttccctcctgctgctttgccccaggaattcagcgccttcttccaagaccccagacacaggaaccaggattctaaacccagaccccagatccaggactcaagccccaggactctaaacccagacttccaggactgcaaacccaaaccccagacccaggacccaggacaagggctgacggatttccagatcagcgtggccctgtgtggacaaggccagtgggaaggggcaccggggggtcacactcttggcaacagcgggggtagctgcttggcagacctccctggtagcgttcagaagggcatgaagaatgtccatcatcctgtcagagccaatttggggagctcagactatggttgccacgtggagggtgggcagaaggagtctccgcaggcagccatggcccgccctggcctgccggtcccgcccctcctggcccacagcctctgggctgggacgcaggcccacacttcccggaggagtcgagaacacggcctgggccagacccagagccttagaaggaccacgggacggtgctctaactcacccaaagaaagcacagagatgggcacaaagaacccaggaccaaaatacaacttcctgtccccggagctgagggccagacttgccccccagagccctgggctggggcccacaggaggaacgcaaactggcaggcccaaggctcgaggagagaaaggccttcaggttttcagactcccaggagccactgggtacccagtgctggcagatcaggctttcttgggcctcagttttcctgcctgtgacacaggcaagaaccacctccagcccccctctgatttctctgggtgccttaaacttgagtga

SEQ ID NO: 117997 - DNA, 2130 bp, Homo sapiens
atgacagagactcaggcgtcagcatcgactagaacagaagacacgcagcacaacgtgccacatgagacagagcactacacgcagtgccgagcgggcggacactcgcatcgaatcaatgccgacgtagaccacaccgtagcacacagacgacgtaccacgcactgcactaacagcacgcatacagcgacgacgtcacccagcacgcacaaccaccagcagacgctcacgcgagtagcgaacgtcgcacagatccgtcgcaccgacatctcctccatcgctgctacagaatggatcagtacaattaacacacataactacgcgtgcagaactcgtgcagtctcccaacgaagatacgtgtcggactttgaaaagcgcgaaagacccacttccaatacccccgaacctcgattccggcttgttgtttctacacccaccctcgtcggtaccacccaaggcacctaccagccaccccctgcacgctctcgcatctcgatcgcgtcccacctgctccctcctctgtcgttgctgccaagtagtctggacctagatggacgctccacacttgcgtgctcatcctctgtatctcagttctcggggagccgtggttcaccatcatcatacatagtagccactactcgcgtcatcagcgacgtcgactacgacatgacgacctactacaacagcacaatcacaccgatatctcgtcagctagatcatagtgtcagcgctcagtgcatctgctactcagcagtcatcgtacgtatcgacatcctctcgtcagtcgtcatacctctcaagaacatagtttgggcggaccgctccacaggcactagtacaatcccgtcggctctcgtgcggctgcgtgggcgagtaaatctgcactggtcttgtaagcctggaggctttagtcgtgtctgccctcatctgactcgtcgcgactcgccagcgtctggtcggtatctgccgaacaaccccaatccgagcacgatcaagcgttgtacgctgagtaactcgatatcagccaaaccagagagcgccactcattcatgctacctaccatttgctggaccgaggacagcatcctcagagtatgcagacgatttcgcactggacgaccccaccctgctggtgtttagtgtgcggcaagaaatcatctctgccgtgttgctccaccagttctatgagtacccgtcgaaatcaatacgacactttgtcgttgacaacaagctgggtcctctgatcctccatcttctggctagcttttatcctactcccgcgcacttccctgccgtggccgactgtttcataattagctgcaaatgcttgcctctggttcaacgccagttaattcttcatttcggactcagtgttcgtagatccaaattagtcgttcccgcgaacgaaatagaaactccatccttcgtcgtcgtcaccaaattctcacgctctgcgtcgagctatgactgtagcatagagtatgcgtctacctacgctatcaacataacaatagttaacagctacgtcttcgcgctacgcacaccactcgagagcacactatcagctacgcgctcacaagcccggggcaacctcaaaacaaaaccagaatcccggaattgcagtgggctttctgagctgtgcgacctagcacacaacgtctacggttatataccacgcaccgaccagccaggccatcgcctcgtgtgccttgcactcgctgttagggtgtctgctcggctcagccacagcccctctgccgccaacgtggaccacgcccccaccgcccccccagctacgcacgacatgatcgaccggctctcttccccatcctccctcatgctagacacgtccttgacctttagctccccgaaactagcccttcactgggatgtcatcgcaacattgcattccaacctgaccccagcttgcgtcacactccatcgcactccggggctacgggctcgtcctacgacgtcgcaaacgagcattgcatcgtgcactcgcattcgtaacttagccatgttcagtaacgtccgctctctgatcagcgctctcctctcgatcatcatgcacacagcagcatactatacgccagagcgtcaagaatctcgtgcttgcgtgtgtgcgctgtag

SEQ ID NO: 117998 - DNA, 884 bp, Homo sapiens
atggcagaggatcagcttatactacaagaggaaaggagagtggagtttgagaagtttgtcagcgtgacctcattcttcttggatgctggacaagagctcaggacccactgtgtgcaggatccaattgcatgcaaacctctcttcctggccaattaccagaccttgctagtgaatggggctggtgcctgcttcattgctttccgttccacttgcctgaccctctttgttgtgagtaatctggccttcattgtgaatgacacccaactataccagcagacttttcctacacatgggagtgttattctacccattctacaggaggctcacctaacacataaggactcacataaacttaaaggggtggaaaaaaggcatttcatgcaaatggacaccaaaaatgcagaaaaagcattagacaaaatccagcatcgctttatgattaaaactctcagcaaaatcagcatacaagggacacactttaatgataataaaagccatctatggcaaatccacaaccaacacaatactgaatggggaaaagctgaaagcattccctctgagaactggaataaaacaaggatgcccactcttaccactccctttcaacatagtactggaactcctagccagagcaatcagacaagagaaagaaataaagggcatccaaattggtaaagaggaagtcaaactgacactgtttgctgatgatatgatcatttaccttgaaaactctaaagactcctccagaaagctcccagaactgataaaagaattcagcaaagtttccagatacaaggttaatctacacaaatcaatagctcttctatacaccaacagtgaccaagcagagaatcaaatcaagaactcaacctcttttacaatag

SEQ ID NO: 117999 - DNA, 843 bp, Homo sapiens
atggaaatgctctactgtttgattgcagaggcaggtcacatctcctccaggatggccaccaataccgccaactctgcaggtctaaaacccacgtgtgtttgtgtggcccttcctctcccacctggccgcagcgctcctcatcgcaggggcagggctgcggcttctggagtgagaggtcatttaagggataccctgagcgacctgccggtgctgctggcgtctgcaggctccagggctgcggtcggcggggccggggagccccgttcagaaccacagatttctcgtccagaccccgaggagccgcagaacgcgctgatcagggccccagggctgggtccccctggccgaggacgacgagcggggctcagagagggcgcgcgcagggccaaggtcacactgcgcgccggcgcgggaactcgaacccaggcccaagccgcgcccgccaggccagccgccgccgccgccccgcgactagcggaccccccagaggcagccctcgccggcccgcccccggcgcaggagccccttctaccggtcgtcttctcgcgagacgtcgcggccgccggaggggccacggaggccgagggcgcccgccctcagcgcgcctgcgcccggccagcccgcccgcccccgccctcgcgagccagtgccatgtggcgccgtatttacggccagagatcgactccgcccaccggccgccacgagccacgcccctttctcagcagccaatccgcggcgttgacaccgccccggcggaccgggcgcgcggcggctcggggacgcgcagctgtctcgccgttcgacccgggagctccacgttgcagccaaacacgatcccgttaa

SEQ ID NO: 118000 - DNA, 1056 bp, Homo sapiens
atggaaatgctctactgtttgattgcagaggcaggtcacatctcctccaggatggccaccaataccgccaactctgcaggtctaaaacccacgtgtgtttgtgtggcccttcctctcccacctggccgcagcgctcctcatcgcagttgtagccaggctggccgtgagctcccagggcaaggcccacgctattaccggcatctaccccagcttagcatcttgcactcgattggagaggggcagggctgcggcttctggagtgagaggtcatttaagggataccctgagcgacctgccggtgctgctggcgtctgcaggctccagggctgcggtcggcggggccggggagccccgttcagaaccacagatttctcgtccagaccccgaggagccgcagaacgcgctgatcagggccccagggctgggtccccctggccgaggacgacgagcggggctcagagagggcgcgcgcagggccaaggtcacactgcgcgccggcgcgggaactcgaacccaggcccaagccgcgcccgccaggccagccgccgccgccgccccgcgactagcggaccccccagaggcagccctcgcccggaccgcccccggcgcaggagccccttctaccggtcgtcttctcgcgagacgtcgcggccgccggaggggccacggaggccgagggcgcccgccctcagcgcgcctgcgcccggccagcccgcccgcccccgccctcgcgagccagtgccatgtggcgccgtatttacggccagagatcgactccgcccaccggccgccacgagccacgcccctttctcagcagccaatccgcggcgttgacaccgccccggcggaccgggcgcgcggcggctcggggacgcgcagctgtctcgccgttcgacccgggagctccacgttgcagccaaacacgatcccgttaaccaacctttatgcagtgcctgttgtctatccgaccctttctcgagcatcggctcattggcaaaggatcgtgatgctcaccggctggggcttgagactcgctgtgtgaccttgggcaagtga

SEQ ID NO: 118001 - DNA, 601 bp, Homo sapiens
ccgtctttagcaactccttggtttttatggagatattagggagggctaaagcaggggcttcagttaatgctaaattaacgggctacttcattctgtacttcttggatagctgccactaagatttttgtttgtcttctgaatgctttatcagcggcctttccagttgcctgtgttgcttgtttttgtttttttaaccttgtgattgtcaaaagctttttgggctatttctaaaagctgacagatatttattctagtaaatctttttaggtttttggagtttctatttaatatcctgggctgcctgagccacaaatgctaaattaatagcaaggctattttcgggagctgccgggtcaaaaggggtgtaaatccgataaaaaggggtgtaaatccgataagcctcctggaggtgctctaaaaaccttcttggtgacttctcgggcctttggacaacttcggtcgtcttagacaagttgatgggtttctgagaggctcttttaatacttgcgaggagataccggtgagaatcgtctaaagctccctttctacttgaggaatttgggtcctggttaggccgtgtagaaggaaagacctcctcaag

SEQ ID NO: 118002 - DNA, 642 bp, Homo sapiens
atgaccacacctgccggctccggcagcggcttcggctccgtgtcctggtggggcctgtccccggcgctggacctgcaggctgaaagggatgctacggtggacgctctgccaaccaccatggtgccccagccagctgtcatcttgccaggtcctcctgtggacccagactcccaggccgatacagtgcacagcaaccccgagctagatgtgctgcttctgggctctgtggatggacggcacctgctgcggaccctgtcccgagcgaagttctggcctcgcaggaggttcaacttctttgtgctggagaataatctggaagctgtggcccgacacatgctgatcttcagcctagccctggaggaaccggagaagatggggctgcaagagcgaagcgagaccttcctggaagtgtgggggaacgcgctgctgcgcccgccagtggccgccttcgtgcgtgcccaggccgacctgctggcgcacctggtccccgagcccgaccgcctggaggaacagctgccctggctcagcctccgcgccctcaaggtgccgccgcccggcctccatctgggatcgggtggccgcgggaataatggaagcgcacagtccaaaggacgtgcgttgatggagcaggcggcgggctag

SEQ ID NO: 118003 - DNA, 2377 bp, Homo sapiens
agtgcagctcactgctagtgcttgtttcttggggcaaacaggaaatgagttaagcttgaatgtgaatttcagaggtcagagataaccagtgtcttcagagaacagaaagatgggatatatgcaatttaagtgcttttcactgctttaattagaaacgtagtccctgtttcatggaaaagtttgccatttcttgcatgagcctcttccattggtgtatctttccctgtgtacaggttaccagctcttcaaacccagtctgatctcttggctggaggaagaggaagagttgagcacactgccaagagttctccaagaatggaaaatgtgcctgaaaaccaaagggccagccctttggcaagataatttttgtttaaaaacattaaatgggatacagttggcaagaaaccaaaatggagaggaactctatgactgtaagcaatgtgaagatgtcttctgtaaacatccatgccttaagaccaacatgagtactcaaaatagaggcaacacgtctgaatgtattcagtatgcaaaagacctcctttctctatacaataaaacctctaccataaggaaagtttctgtgttcagtaagcatggaaaatctttccgcctgattttaaatgttcaggtccagagaaagtgtacacaagataaatcctttgaaggcactgactatgggaaagccttcatttatcagtcataccttgaagcacacaggaaaactcagagtggagaaaaactcaatgaatggaagcaatgtggggaagcatttactcactccacaagccatgctgtaaatgttgaaacacacattattaaaaacccctatgaatgtaaggaatgtggaaaagattttagataccctacccaccttaataatcacatgcaaacccacattgggataaaaccttataaatgtaagcactgtggcaaaaccttcactgtgccgtcaggctttcttgaacatgtacgaactcacactggagagaagccctatgggtgtaaggaatgtggtaaagcctttggtacatctgcaggccttattgaacatataagatgtcacgccagagagaaaacctttaaatgtgaccactgtgggaaagcctttatttcttacccatctctttttggacatttgagagttcataatggagagaagccatatgagcataaggaatatgggaaggcctttggtacatcctcaggtgttattgaagatagaagaagtaacacaggacagaaacgctttgattgtgaccagtgtgggaaagtctttgtttctttctcatctctttttgctcatttgagaactcacactggtgagaagccctttaagtgttacaaatgtgggaaaccatttacctcttctgcctgtcttcgtattcacatgcgaactcacacagaagagagactctatcaatgtaagaaatgtggtaaagctttcactaagtgctcatatcttaccaaacatttacgaacacacgctggagagaaaccctatgaatgtatgaaatgtgggaaagccttcactgagcgctcataccttactaaacatttacgaagacacagtggagagaagccatatgaatgtaagaaatgtggaaaagccttcacagaacgctcagatcttactaaacatttacgaagacacactggagataagccctatgaatataaggactgtgggaaagcctttgttgtctcctccagtctagttgatcatttaagaactcacactggatataaaccctataaatgtaatgcatgtgaaaaagcttacagtaggtcttgtgtactaactcaacacttaaaaactcatgcagcagagaagacctctgaatgtaacgcatgtggaaattcctttcgaaattccatgtgctttcatgatcgcttaaaaactctcaccaaaataaaaccctataaatgtaaggactgtgggaaagccttcacttgtcattcagatcttactaatcatgtgcgaattcacactggagagaagccctataaatgtaaggaatgtgggaaggccttccgtacatcctcaggacgtattcaacatttaagaactcatatgggagagaaaccctttgaatgtgaccagtgtgggaaagcctttgcttctttctcagctcgtattgcacatttgaaaacacactagagagaagccctgtggatgtgaagaatgtggaaaaacctttgctgtttcctcaagcctaactgaacatgtaaaaattcacaggagaaagtaacactatcaatgtaaggaatgtgagaaagcctgaacagttgaatctttctagatatgtacaaactcacactgtagagaaaccctgtaaatgtaagggatgtaggaaaacactagttcttctctctctct

SEQ ID NO: 118004 - DNA, 457 bp, Homo sapiens
cctgaggacttctgcacgagcggcaagcagaggccagatgctccatctgtctggactacctgagacacccaatgaccactgattgcaggcactacatctgaagtgcccgcatccaccaatgctggtaagaattacaggacatctctccctgtcctgtctgcctccagcactgtcctgacaagaacctcaagaggaacttccagttatgccacatgaccgatattgctaagcagcttctcaccactgcaaggcgcaaaaggaaactgcagggagaggagcccgtgtgcaggaagtcagatgtggccctgttctgtgagaaggatcctgagctactgtgtcaccagtatagggtctccctcgaccactgagatcacccccgatgcccattgaacaagctgcagctaagcacaggaagcagttcgagagctacattgaacccttggaaaagcaagtttga

SEQ ID NO: 118005 - DNA, 1009 bp, Homo sapiens
atggaatggtcatcgaatgaattgaatgcaatcatcgaatggtctcgaatggaatcatcttctaatggaaaggaatggaatcatcgcatagaatcgaatggaattatcatcgcatggaatcgaatggtatcaacaccaaacggaaaaaaacggaattttcgaatggaatcgaagagaatcttcgaacggacccgaatggaatcatgtaatggaatggaatggaataatccatggactcgaatgcaatcatcatcgaatggaatcgaatggaatcatcgaatggactcgaatggaatcatcttccaatggaatgggaatgggaatcatcgcataggaatcgaatggaattatgatcaaatgtaatgaatggattcgaatggaatcaacatcaaacggaaaaaaacggaattatcaaatggaatcgaagagaatcatcgaatggacccgaatggaatcatctaatggaatggaatggaataatccatggactcgaatgcaatcatcatcgaatggaatcgaatggaatcgaatggaatcatcgaatggactcgaatggaataatcattgaacggaatcgaatggaagcgtcgaatcatcatcagatggaaatgaaaggagtcatcatctaatggaattgcatggaatcatcataaaatggaatcgaatggaatcaacatcaaatggaatcaaatggaatcatggaacggaattgaatgaatcgaatggaattatcatcgaatggaatcgaatggaatcaacatcaaacggaaaaaaacggaattatcgaatggaatcgaagagaatcatcgaatggacccgaatggaatcatctaatggaatggaatggaataatccatggactcgaatgcaatcatcatcgaatggaatcgaatggaatcatcgaatggactcgaatggaataatcattgaacggaatcgaatggaatcatcatcggatggaaatgaatggaatcatcatcgaatggaatcgaatagaattatggaatga

SEQ ID NO: 118006 - DNA, 1494 bp, Homo sapiens
atggccagcctcctgggagcccctcgcctggctggatgggccagtggggcgggggcattgagcagagggtgggcaataaggcctgcggacacaggaggaaacttaggccctgtgccacgggtgcccctcccccccgacccggttttgactgcccgctgggctcctggtgtgaacagcggctcccaatttagctgtcactgccaggctcccatcctggagatgggccacaagggatccagtccagggctgggggacgcagaggtaagggccatcactgtgcaatgcatacgtcccattgacggtccccagcagcctccaggtggtgggagcgctggccgacgcctaaccatcccagctagcacccaggagtgggcccagcttccagtggggagggtgctggccaacgtgctgaccgaggggggggacacaggaaaccagcccatcccccagcgctccctctgcaggcctcagccctgctcccatgcagagacctggggggaggtggaggcccaggtcccagcgcagagcaaccgggaacagccagcggcggcgcctggatgcggacccggccgcggggagacgggcgcccgccccgaaacgactttcagtccccgacgcgccccgcccaacccctacgatgaagagggcgtccgctggagccttgaattcatgctttgtggcacggacggccctgtgcagccggtgcaacaccaggagggtccagctgccaggctgcagctgatccgaggtggttccttgatcctggagtctgaagggacattgaggggctacctgtgctccaaacagaccagcccgcttctcatctgcttcacacacaggggttctgggctgagcactgagcgctgtctgtctgaccagaacatcatccactcgggcagtgccctcctggccccggccaccagggcagcgtgggagcagatccagcggagcgagggtggcacggcacagctgctccggcgcctcgagggctacttcagcaacgtggcacgcaacgtgcagtggacgtacctgcagccctttgtcatcgtcaccaccaacatgattcttgctgtcgacatctttgacaagttcaacttcacgggagccagagtcccatggttcgacgccattcatgaagcattccccagggagctggagtcctccatctccttcccagccaacttcttcaaaccacctgaagaaaaagaaggccccctggtaaggccagccagccggaagaccaccccgcagaccacacgcccagggcctggcaccgagagggaggccccgatcagcaggtgaaagcgacaccctgatgacactggctagttcaccttcactctgggcatcgtttactgtaccccggggcagctcccgcctgagccctatgaccccaaccgccgcagcctctggctgcctcactggcccatcattaatacgtcgatggtgagcgcactggtgtacagcgagggggctccacttccgagccccctg

SEQ ID NO: 118007 - DNA, 684 bp, Homo sapiens
atggggcagctgctggacaagaatactcccagtcatggagccaggacacgagaggagtgtggacgggagcgactgtgcgtgtctccctcccaaactggggacaccccgaggaccagcgcgtacctgtgcgtgggaggccccgcgtggagccccctcagcgagtcccgacctgctggctcctctggctgcccctggataaagccccctgaccccaggtattctcctattggcctttgttccttgctgaccacagagatgatgagcaggcaaccacgcactgaccttcgtggacaaacaaacccagctgcccgcctcagctcctgtcccactgagctgcagccaaaatctgcctgtttggccctctctcatggcagggaccacatggcactcacctctgttcccccagctgcttctggcacagtcctgggcacaactgacattaatgttgtgtcagcaaagattgaaagtcccttttttgggaacctactgcctcagtccattgctcccatctacctctccatgtcgaagtccatgcagccgccaaaacccaggtctaatgctgattcctccgtgcaggcctctctgatccccagagctatgagctcacctaccgttagtccctggatcatggggaatggctctcaaggctttgatcacattgcagtgtcaatgtgggatgattag

SEQ ID NO: 118008 - DNA, 420 bp, Homo sapiens
  misc_feature (1)...(420): n = a,t,c or g
tttgttggtggacccacgcctccgcccacgcgtccggagccagngaagctcctggacatttgcgttattgagaacaccagccttgcacctgaagaccccgcctttcctgaaacttgaggttgctgtttgagctgaagagagagcagaaatctgtccagaggcgaagagagcgaagatcctgccgagcccagttcggaatggttaggaacaccccctttgctacctgcagtgagagtttctgcaagtcttgacaatgcttcaggctgaaggaacaatgcatcacttcagaagtatttgtcaggtgaatagaaatttccttgaacggggccaccaccaccttcgccagctcctcctcctgagactcatacaggcagcccaagacctccttcaggtcggtcacggataagggcttatttgcat

SEQ ID NO: 118009 - DNA, 1785 bp, Homo sapiens
atggggtttctccaagttgttgaggctggtcttgaacccacgacctcagtttatcagttgccggaagccactcgtgcgcagcgcggtcgtccgatcgtcaacctgctgccgctggagcaggacgaacgtatcactgcgatcctgccagtgaccgagtttgaagaaggcgtgaaagtcttcatggcgaccgctaacggtaccgtgaagaaaactgtcctcaccgagttcaaccgtctgcgtaccgccggtaaagtggtgcgctttaaagagtcttctgtccgtgcgatgggctgcaacaccaccggtgttcgcggtattcgcttaggtgaaggcgataaagtcgtctctctgatcgtgcctcgtggcgatggcgcaatccttaccgcaacggaaaacggttacggtaaacgtaccgcagttgcgaaatacccaaccaagtcgcgtgcagagacaggggttaatctcatcaaggttaccgaacgtaacggtttaagtgttggcgcggtacaggtagatgactgcgaccagatcatgatgatccacgatgccgcaacatcaaagggaatttttcccatctcaatgaagcaggcaaaaccacaggccagtaacgccagtacggtggttagcggcgagttccagcccatcgccagcgtattgctgatcatctcgatatgcgtggaaactgctatcagcgccaatagcagcaagcctcaggcctggcgtggcacagccaaccgcgcggcgtggggaggagctggggagggggctcgcaaggccggggagggggctaggggcctccgagggctccggatcggcgactggcgagccatggcgctggggctgcagcgcgcaaggttgggaggtcactgtgccaccccggagcagtgggctgaattcttctatgtcctcaaagccaaccagtccctgaagcacctgcgtctctcagccaatgtgctcctggatgagggtgccatgttgctgtacaagaccatgacacgcccaaaacacttcctgcagatgttgtcaaaacccagtaacgtcaccgtccagttcatcccgctggcaaaaaacagcgtcatgccgagaaagccaccgggaataaaggacagtaaccagaaacgcccttgccagaccactaccgccgagaaggccaccgatccgtccctacggattcaacggctgctgcgtctgataacacaaccagaatggctggctgaagcggcgcggatcacgctttcatcaaagggggcccatacccccggcgttgatggcgtgaacaaaacaatgctacaggccagactggctgttgagctgcaaatcctcagggatgaattactctcaggccactaccagcccttgcccgccagacgggtttacatccctaaaagcaacggcaaactgcgaccactgggtatccccgcgttgcgggatcgtattgttcagcgggccatgctgatggcgatggagccgatatgggagagtgattttcatacgctctcatatggcttccggcctgagcgcagtgtccaccacgcgatccgcacgactgtggtgaaacccgggggacgctgggtgattgaaggcgacctgtccagttacttcgacaccgtacatcatcgactgctgatgaaagctgtacgccgcaggatcagtgacgcacgtttcatgactctgctgtggaaaaccatcaaggcgggacatatcgatgtcggtctctttcgggcggccaggaaagggtgccacagggcggtgttatatcgcccctattatcgaacatcatggtga

SEQ ID NO: 118010 - DNA, 3085 bp, Homo sapiens
atgacatcgccccagctagagtggactctgcagacccttctggagcagctgaacgaggatgaattaaagagtttcaaatcccttttatgggcttttcccctcgaagacgtgctacagaagaccccatggtctgaggtggaagaggctgatggcaagaaactggcagaaattctggtcaacacctcctcagaaaattggataaggaatgcgactgtgaacatcttggaagagatgaatctcacggaattgtgtaagatggcaaaggctgagatgatggaggacggacaggtgcaagaaatagataatcctgagctgggagatgcagaagaagactcggagttagcaaagccaggtgaaaaggaaggatggagaaattcaatggagaaacagtctttggtctggaagaacaccttttggcaaggagacattgacaatttccatgacgacgtcactctgagaaaccaacggttcattccattcttgaatcccagaacacccaggaagctaacaccttacacggtggtgctgcacggccccgcaggcgtggggaaaaccacgctggccaaaaagtgtatgctggactggacagactgcaacctcagcccgacgctcagatacgcgttctacctcagctgcaaggagctcagccgcatgggcccctgcagttttgcagagctgatctccaaagactggcctgaattgcaggatgacattccaagcatcctagcccaagcacagagaatcctgttcgtggtcgatggccttgatgagctgaaagtcccacctggggcgctgatccaggacatctgcggggactgggagaagaagaagccggtgcccgtcctcctggggagtttgctgaagaggaagatgttacccagggcagccttgctggtcaccacgcggcccagggcactgagggacctccagctcctggcgcagcagccgatctacgtaagggtggagggcttcctggaggaggacaggagggcctatttcctgagacactttggagacgaggaccaagccatgcgtgcctttgagctaatgaggagcaacgcggccctgttccagctgggctcggcccccgcggtgtgctggattgtgtgcacgactctgaagctgcagatggagaagggggaggacccggtccccacctgcctcacccgcacggggctgttcctgcgtttcctctgcagccggttcccgcagggcgcacagctgcggggcgcgctgcggacgctgagcctcctggccgcgcagggcctgtgggcgcagatgtccgtgttccaccgagaggacctggaaaggctcggggtgcaggagtccgacctccgtctgttcctggacggagacatcctccgccaggacagagtctccaaaggctgctactccttcatccacctcagcttccagcagtttctcactgccctgttctacgccctggagaaggaggagggggaggacagggacggccacgcctgggacatcggggacgtacagaagctgctttccggagaagaaagactcaagaaccccgacctgattcaagtaggacacttcttattcggcctcgctaacgagaagagagccaaggagttggaggccacttttggctgccggatgtcaccggacatcaaacaggaattgctgcaatgcaaagcacatcttcatgcaaataagcccttatccgtgaccgacctgaaggaggtcttgggctgcctgtatgagtctcaggaggaggagctggcgaaggtggtggtggccccgttcaaggaaatttctattcacctgacaaatacttctgaagtgatgcattgttccttcagcctgaagcattgtcaagacttgcagaaactctcactgcaggtagcaaagggggtgttcctggagaattacatggattttgaactggacattgaatttgaaagctcaaacagcaacctcaagtttctggaagtgaaacaaagcttcctgagtgactcttctgtgcggattctttgtgaccacgtaacccgtagcacctgtcatctgcagaaagtggagattaaaaacgtcacccctgacaccgcgtaccgggacttctgtcttgctttcattgggaagaagaccctcacgcacctgaccctggcagggcacatcgagtgggaacgcacgatgatgctgatgctgtgtgacctgctcagaaatcataaatgcaacctgcagtacctgaggttgggaggtcactgtgccaccccggagcagtgggctgaattcttctatgtcctcaaagccaaccagtccctgaagcacctgcgtctctcagccaatgtgctcctggatgagggtgccatgttgctgtacaagaccatgacacgcccaaaacacttcctgcagatgttgtcgttggaaaactgtcgtcttacagaagccagttgcaaggaccttgctgctgtcttggttgtcagcaagaagctgacacacctgtgcttggccaagaaccccattggggatacaggggtgaagtttctgtgtgagggcttgagttaccctgattgtaaactgcagaccttggtgttacagcaatgcagcataaccaagcttggctgtagatatctctcagaggcgctccaagaagcctgcagcctcacaaacctggacttgagtatcaaccagatagctcgtggattgtggattctctgtcaggcgttagagaatccaaactgtaacctaaaacacctacggttgaagacctatgaaactaatttggaaatcaagaagctgttggaggaagtgaaagaaaagaatcccaagctgactattgattgcaatgcttccggggcaacggcacctccgtgctgtgactttttttgctgagcagcctgggatcgctctacgaattacacaggaagcgggattcgggtctctaagatgtcttatgaatgcaggtcagagggtcacatgttaacactagagtctgtcgagaggtaggatttgacactggttttctcactatttttgggagattctgcacgagtcacgcacccccttcacatgacgctatgtactttctcacagggataataaagttagagcactctca

SEQ ID NO: 118011 - DNA, 282 bp, Homo sapiens; identical to SEQ ID NO: 117047

SEQ ID NO: 118012 - DNA, 252 bp, Homo sapiens
atgacagtctgcatacacattgcctctgaagaccttccagtgggacgagatgtggaggtggaagacagtgacattcatgatcgtgaccctggcctgggagacaagagtgaaactccatctgaaaaaaaaaagaagaagaagaagaagaagaagaagaagaagaagaagaagaagaagaagaagaagaagaagaagaagaagaagaagaagaagaagaagaatccaattttcttcaacattatcttcatttag

SEQ ID NO: 118013 - DNA, 370 bp, Homo sapiens
gaaaaaaagaaaagaagaagaagaagaagaagaagaagaagaagaagaagaagaagaagaagaagaagaagaagaagaagaagaagaagaagaagaagaagaagaagaagaagaagaagaagaagaagaagaagaagaagaagaagaagaagaagaagaagaagaagaagaaggagaaccctttctcttgcttttagtaaatggggtcttaattcctggtgtgagatcttgtcttgactctacctcgcaattcagcttgacagggatgcttcttcaagagaaatcagaaatatttggtctagcggtatgtagtccactcatcaaacggaaaggaggacatattccagtactcaacactgtccctggatga

SEQ ID NO: 118014 - DNA, 435 bp, Homo sapiens; identical to SEQ ID NO: 117052

SEQ ID NO: 118015 - DNA, 906 bp, Homo sapiens
atgcagatcccatctctacataaattgaagaaagaagaagaagaggaagaggaagaggaggaagaggaagaaagaagaagaagaataggaagaggaagagagaagaaagaagaagaagaagaagaagaagaagaagaagaagaagaagaagaagaagaagaaggagaagaagaagaaagaagaaaagaagaagaaagaagaggaagaagaagaaagaagaagaaagaaaaagaaagaaagaaaagaagaagaagaggaagaagaaaggaagaagaagaaggagaagaaggagaggaagaagaagaggaagaagaagaagaaagaagaaaagaagaagaagaggaagaagaagaaggagaagaggaagaagaagaagaagagtcgtgcctcatgggaccaatgtgtgtgcatattcatcctgaacaaggacttatattcgttggggccaccagcccagcgatttacaggaagccacgcggagctgcctacctgaaaagcgcgtcgatcgtcctcttggacggcagcctccagaggatgcgcggccagggatcccccgaggcgctgcagtccagcttgagggtccctccgtacctgacgtccgtcctctgcgaggagctgcaccgtactgcgcgcggagccgatcaggttggcggccacgcactcatagcgcccgctgtccttgggcgcgaggttgcagatgtagagcgtcccgttggggaaaacaaacaagttccggtggaggaaatgcgaggggcggatttgggtaccatccccgagcacccagagcacgctgggcaggggcgcagctttggcagtgcagtgaatgtgaatgctgagccccgggggcagcgagatgttctacagcttctcctggtggataatggggggcagtgccgccacgtgtag

SEQ ID NO: 118016 - DNA, 9012 bp, Homo sapiens
tcagaagacgtggatgtaagttgttttggagtcactgccgagaatgttttttgccatgcacttgtagaagccggcatctctctgtgtggcatgctggatggtcagtgatccctgggggtgaagaaatctgtttccatacagacgagcctgaacccctgccttcagatgcgacttatccggtaactcccacgtgatgtcagctttgggaatccccatagccatgcagttcagtttcacggtgttcccgggccgggtgtagatgaccggggtgggctcgctggtgatccggggaggataggcgatcacaatcacggggatgctggtgaccgaagggccgtactccgtctccatcctgcatacataggtacccctgtcaaacaccgaggcctcacgaaccgtgagggtgccattgtccagaagagaaacgcgtcccagggtttgggggccctccagatgcatgccattggggagcgtccaggagaaacgtccctgcccagccccgggaggggtgcaggggagcttcagggtctcaccattgatgatgctgaccaggttatgatactgcttgtttgcttctggcttcagtcccaccttcagggagaccagcctctccgtgtggccagcggcattgcgggccacgcagcggtaggccccggcgtccaccgaggagagaccgctaatgtgtagcatgccgtcagccttgtggtagaagcgctgcagctgctgtccactctgcagatcggtgccattgggaaggacccacaccaggctgggtgtcggggtccccgcggcagagcagttgaggctgatggtgtggcccgccatggccgtgatcttctcgctgatcgggtcgtggaagatgggtttctccatgggctccaggacagtgagctgcaggatcaacctggcctcccctccctcgttgcgtgccatgcataccagctggacggagtcgctcttcctcaaactcctgatgtccagggaaccgttgccatggacagtgatccggtttccatagtatggagctggcagaaccacaccctcgggaaaagcccataacaccctcggggtggggatgccttcagctttgcagtcaatcagtttccgactgcccccggctgctatctcccgcacagtggtgatggggttggggttaccgttgatcttgggtggctggacgttgacgtgaatccacaccgtcttcctatcctctcccgcgctgttcctgaccaagcaggtgtagttgccgctgtcagaacgctgggctttctgaataaggagagtgccatcttggtatatctgatacttctcagaggaggtggggatcaccttgttggttggggacaaccaagtcaccttgggcatgggttctcctttggcctcacaggctacagtgaccacgtctccatagggcacctgaaccgccaagtaagtcttgttccggatggtggcgggcgctgtcaccaccttgactctgactctcatctcgtccttcccgacctgattttcagcaaagcaggtgtagtctccttcctccctcatccccacttcgttaaagtagagtgtcccattgttgaagacgacatagcgcttggtgcgtccaccgctgtcatccgactgcatgaaggagttcaccagactcccgtctgggaggctccaggagatctcgggattgggaagcccggtggccacacagtccactttcaggtcacccccgtagaagactttgtggtcgttctcctccttgtgttcaatcttggccggtttcatcaccacatccactttgagcaccacgtagtcatcaccaaccttatttcgagctacgcacaggtaatctccggcatctttgtccgtcactgatttcaccaccagggtcccattggcaaacaccttgattctgctatcaaaactgaccttggcactatggacattgaaggtaggatggatgacaatctgtgatgggccatcctgtgcactgcagggtgttgagcaccgtccctggcctccacccaccagataccagaagcacccactgccccatttgtgataatcaaaggtgtcttcagatattgccaagtgttgtcttggggcaaaatcacccttggttgaaaagcactgccataaacctgtatatctgacgtccgtcctccgcggggaggtgcccgtgatgcgcgcgttggctgctgcacgctgcacgttcagctgcaccgtcctgcgcgcggagcctaccaggttggcggccacgcactcatagcgcccgctgtccttgggcgcgaggttgcggatgtagagcgtcccgttggggaaaacaaacaagttcccgtggaggaactgcgaggggcggatctgggtaccgtccccgagcacccagcgcacgctgggcaggggcgcagccttggcagtgcagtgaatgtgaatgctgagccccgggggcagcgagatgttctccagcttctcctggtggataacggggggcagtgccgccacgtgcaggcggatggccaggctgtccgccccggctgcattgctggccacgcacttatagacgcctctgtctgagaaggacgcctccttgatggaaagggtccggttttcgtgcagggtgatgcggccctccacgggggacacagtttgccacaccctcctgtcagggaagatccaggaaatttggggggctggggtccctttggccagacactccattgcaatggtgtctcccaggtagacagtgacgtcctggtagtgggaggctaggatttgaggttgctgcacggtgaccgaaagcaagaccaccatcctgtccaggccgtgcaggttgctggcggtgcacatatactggcctcgatcttgtacttgaaccttccgtatcactaaggtaccgttcttgagaacctcaaaccgttgtatcctggtattcggagtcataagagctcctgtggaaacctttgtccaagtaacgaaaggctttggttttcctgttgcctcacaggggaacacagtgtctgtctcagcggtgacggacacagtctgtggggacttggtgaggatttgtggcttttccccaagagaccagaatttggatgcaggaggtcctcctgcaaagaactttgagctgctctggtggaagcttcctgaggactggacagaagatgttataaaggagatagaactctgggtggaagagaccatagggatattctgtaagttagttgagggtgatcccgtggtctgcggagtgtgcaacaacggaggtgccggagggccaaagtccagatggaaggtgctatgggaatgtatcctgttgtaggaacctggaataacttttctctctctcattactggggcaggagaagtgggtatctggggtctccgggtgactcccaactgtggaaaagaaagagtcttgttggtaaagaaagggagtcttccattggaataatgaggaattcttggactgggaggctttccaactgggtttcttgcctcagggatgttgttatttccaaacactttggagtagccattgaattggtcagttcttcggtcagtaaacttactaggaatgctgggtttggacatgtgcaatgggagaggaattgttgtacttgataatcttggagttgtaaactgtttgttctctggcaaagccccagaaggatatgtagttatttccggtttgttggtccagtgacgaggtgactgggaagttacaaagtatctggaagcgctttgtgtggacatttcaggcagcctcactgttgctgttggtaggatgggtttggcagggactctggttagttgatgagaagcatgaactcttccatcctggcgttggctatctgggccacgtggtagactcctactaccaaatacttgcttttccaattccagctttgtagacaagttaaatgcatcctggtcggaagagggtgttgataattcatttggccctgacatatgctgtgttccttcattgttcactggggttgcttctgtttctggattccccacataattcaagaaaacattttccttggaatctctagatgcttgagatattcttggactgggaagtgctggcttagtggtggtggtttgtcccaaagacatgagaattgtggatggggacgaggatgctggctccttcatccgggcagcagtaggggtgtgattctgtggtctagtttcagaaaggagaatagccacagtggtttcaagatgatcttgatcaagggtggtggtttctgcctgacttgaagccacctccacttttatgcttgagagagttgtggaagaaccagcttcttcctggtgaaatggtgtggagactgtcaaagaggacaaaaactcggaagtgaaatccacatcctcaagctctttaagaaggggagggtctgtaagattttccccagaagtggtaacaggtatgcctgtctgtagcctcccaggctgggccgtccttgagggattccaggttggagttcctggaaagcctacaggagaggattcttccttaaattctcccatagtggagaccaaggagcgagaagttggtatggcattagtaattgattcaccagtgactaaaatgtcacttttatgtttgtcaacatttgtggcaacatcatccttaatttcttttccatctgatgtgggtttatatgtgactggaagtgtctcttggactttagggtaagatgaatatatttttctggtggttgtcatgtaatctaaggaatcataagggccctcagttttcagagaaacagttctaggcaaaagtatagtttctgaactgggagtaacaatgtttctatgtttattttctggagaagggctgggcttggatccggacgctcttgagctcactgtagaaggggtatatcgatgtttgtttggcctcttcccgtgttttctccgtggtgttcccttggatgtgggttctgcattcttctccatttccaactgtttgggggtattaactgtgttatccacccaagctgtaggaaccagagaactctccacttgacttgaaatcttaatgtcaggtgcttgagttggttgagtagaaaaagtctctgatggggcaaaagttgtgggtggggtttgcttgtgccggtggcggaatttgttggggcgtaatctccttctcccgttgggtctccttcgagaagggtgagtgctcatggtggatgacggagcaactttttgccttggtgttgttgttgctgttgtggtgtctttgtctaggagggtaccaactgtggtttccgcaggcttcttaactggagacatactgctcattatacccagtgtggagtcaggcaaagtgatggatttgctctcttggccctcactctcagaacttctggagtgtgtggggtctccctctagcatatttcctccctgtagtgtctgagacatctctttcataccctttttaatcagtaaggtgtcttgagtgcttagactacttttcacaaggtggatgttgtctgtcagtccttgtagatgtgattggcctgggacacctggttcccctatagtagaatcctcaaataactgtgatgtactggagtcattaacccagatggtgggggttggagtaaggtgtgcaaaggtgtcttctttcatcttatcctcatctggttgtgacttagtctccaaatctgggtcaaagtattgcatgggctcagactcagccaaggagacagcatccaatggaggctcatactcactggatgtgggctctggtgacgatccaacatctgctgcagaccaaccctctgttgccgtctcttcatgggtgggcttttcatagactgtgtctaatgtgtgcagagtaggagatggttcataaggctcagatataagtgtaggggctgctgtccccttcaggtctccttcagtggaagttatctcctcagtcttctcggaaaggtcatcaacaacttcctccagaggtgtgcttgttacttcaggttcaacaagaataactccattgtggttgtgttctagccccatgctggctgaggaaatggtacccaaaacgtgctcttcttcaccaagtagaggtacatctgctgaggattcttcagcactggttactgtctgcacaggagatgctgaggggggagaaatagcaggaaaaggtggtgtgacttctagactcaaggatggaggacttgtggttttaatcaatgggggtacttctgtgcccttagggagatttttcccacggactttggctaaaatatcagcccagcgctccggattaatctgtttgtttgccatgtttatccttcgtctagattcaaacactctgcgaccttctgcaacattggtctctggttctttttccgaatgcttccagagtttcagctttcttctccctttcttggctttcttgtctccattgatggcatcatcctttgttttgaggaacacctcttggtcctttggatgcagaagtctccttgaagtgttctcttcatctcccatgcccgagcccccttcatcctccacgatgtcttctctgactctggaaagagcctttgcacctgggcgtctgcctcttttggatggcaagccagaccctttcttggtcactgtgattcccaccgtaaaatggtctgccccttgctggttgacagccacacatctgtagtaaccactgtcactgacttggacctttgggatggaaagagttccatttggcaacatgtatacatgtgatgtgttagccaaatcattaattatccttctgtttggaagaatccagctaaggtgggcttcgggtattgctaaagcattgcaaggcaatgtcaccgactcccctgggttcttgccaattgtcactgtgtctttctcggctggctgagtggagggagactgcacaagtaccctatataccatgcggtccatttcatccctcacttgagcaatgcactggtacaagcctgagtcagatggctccatggacttgatcctcagccagccactgctgagaatggagaacttgctgtctgggtcatccatgggcgctttcaggatggagccatctggaagcacccagaagatagatggactctcagaagctttcacgttgcagctcaactggcatggacccccttccaggacagtctgatctctttgcacagctccactaggctcaatcattacccagcttctgccccgagcctgccttgtatctttggtggatattgtttgagaatactgggtgtagtaggaaagtagcaccttcttggccgtactctgacgtcggttcagctggatatctatggatggctgcatgacccattctggttctgcaagaatctgggctctcacacctgtgtagtaaagagcttcctcatcagcatcctgcctgtactggtagctgactctggggtctttgctgagcatgagctctctgtgtagcttcacgggaacttcactgtagtatgctatcaatttccatagcttttcatagttttctcgggtcattggacactcaaagtccaaggcaactgttgcatttatgtcaatatctggaggatccgtttggttcaagtgaatcttgtacacatccattggtttcttgatgtcacagaccaagttcaccatgttcccgtgctcgtcggtcatattcaaagagatgctccactggggcagttggaatttctccaggatgagctggctgccaccatcctcttcctgttcttgctcctcctcaatactcctgctcctgttctgtctcagaggggactctattgaaggcttcagacaagtcatgtccttcagcttgtgtatctcatgtttgtacaacttctttggactgaagcacattgcacacaactgaccgccttcataagctttgtcctttttacacttcagaattcgttgtcctcttggtctcctggatatgaaatcctctggaattttctccgtcctttctggccacaactgggtctcagtcactgcttcctcctcctcctctgcctgaatctttgctgactgggtcctccttgacttgagcctaagcccctttcctttctggtcggcttcagcgtcaatggcctctcgcatatgtgtggttccaattaccatccacccgccagtgatgactaccatatgtgcttctctagtccaaacacattccgtgagttccacaccccattgcctctttgacatgtactcacactcatacccacacacatacatgctgtgagacaaggcagcaagcacaagcaggagcatttcacaaaatcccttggccagctgaatttcatggctcagcgaatgagcgcagcctctacatgaatgccctctggattttgcatcccattccaaaaaccatctcatctcacaatcgcaggtccacggatttccctgcaagtaaagattctccagaagcggcatgttccgaagcatgctggcaggaagagttctaaccatgttctctgctaagtagaggtgccttatggtggagagtctgaaataatccaaaaatgtgaacgtggagaaggtgctggggtgcagctggtggaggagatttccttccaaatggagtagcctcagagacgttaagccgttgaaagcttgagggtggataaactcgatcttgttgtggtcaatgtgcagcctcattaagttagagagaccctggagggtctgtcctgtgatcactctcagcttgttgtagctgaacttgaaaacctgaagagagctgaggtctcttaaagctccatcggggatgcttgggatctcattgccgtgaatcataagtagctccaacttggtcagtcctgaacggagcccagaagaaggaggcagatcttcagacagaggagatagggctctgaggctctgtctctgaaatgggtcagaaacagctggatgttcctcagcacattttacttcaagggtgtgatatgttctccttccatagttgtggtcaccaaaaaggtctccagatgttgccaaatgttttccaggggcaaactcatccat

SEQ ID NO: 118017 - DNA, 993 bp, Homo sapiens
atgcagatcccatctctacataaattgaagaaagaagaagaagaggaagaggaagaggaggaagaggaagaaagaagaagaagaataggaagaggaagagagaagaaagaagaagaagaagaagaagaagaagaagaagaagaagaagaagaagaagaagaaggagaagaagaagaaagaagaaaagaagaagaaagaagaggaagaagaagaaagaagaagaaagaaaaagaaagaaagaaaagaagaagaagaggaagaagaaaggaagaagaagaaggagaagaaggagaggaagaagaagaggaagaagaagaagaaagaagaaaagaagaagaagaggaagaagaagaaggagaagaggaagaagaagaagaagagtcgtgcctcatgggaccaatgtgtgtgcatattcatcctgaacaaggacttatattcgttggggccaccagcccagcgatttacaggaagccacgcggagctgcctacctgaaaagcgcgtcgatcgtcctcttggacggcagcctccagaggatgcgcggccagggatcccccgaggcgctgcagtccagcttgagggtccctccgtacctgacgtccgtcctctgcgaggaggtgcccgtgatgcgcgcgttggcgcgcagcgcgctgcacgttcgctgctgcgcgctgcacgttcgctgctgcgcgctgcacgttcagctgcaccgtactgcgcgcggagccgatcaggttggcggccacgcactcatagcgcccgctgtccttgggcgcgaggttgcagatgtagagcgtcccgttggggaaaacaaacaagttccggtggaggaaatgcgaggggcggatttgggtaccatccccgagcacccagagcacgctgggcaggggcgcagctttggcagtgcagtgaatgtgaatgctgagccccgggggcagcgagatgttctacagcttctcctggtggataatggggggcagtgccgccacgtgtag

SEQ ID NO: 118018 - DNA, 314 bp, Homo sapiens
aaagcttagacaaagtacaatgttttatttgcagttcatggtggattttcccagtggtcagcatggagagcctgcagtgtcacctgtggaaaaggcatccaaaagaggattcgtctgtgcaaccagcccctttcagccaatggtgggaagccctgatggtgtaatggttcacctttgtatagtggatggtagctggtcggaatggagtctttgggaagaatgcacaaggatctgtggacgcggcaaccaaaccaggaccaggacttgcaataatccatcagttcagcatggtggacgaccatgtgaagggaatg

SEQ ID NO: 118019 - DNA, 3910 bp, Homo sapiens
atgggtatgaccaaaaagataagagataacaagagtcggcaaggatgtggagaaaaggggacacttgcacactgttggtgggattcccctaaaatgacctggatgaaagatggccggccccttccacagacggatcaagtgcaaactctaggaggaggagaggttcttcgaatttctactgctcaggtggaggatacaggaagatatacatgtctggcatccagtcctgcaggagatgatgataaggaatatctagtgagagtgcatgtacctcctaatattgctggaactgatgagccccgggatatcactgtgttacggaacagacaagtgacattggaatgcaagtcagatgcagtgcccccacctgtaattacttggctcagaaatggagaacggttacaggcaacacctcgagtgcgaatcctatctggagggagatacttgcaaatcaacaatgctgacctaggggatacagccaattatacctgtgtggccagcaacattgcaggaaagactccagaaaatttatttttactgtcaaaatatgaacaatcaaaaaaggctgattcagaagacttcacttgtgatttctcttgtagatattccatcttggaaaatggattccttcatattcaatcagcacatgtcactgacactggacggtatttgtgtatggccaccaatgctgctggaacagatcgcaggcgaatagatttacaggtccatggttcactagtaattatttccccttctgtggatgacactgcaacctatgaatgtactgtgacaaacggtgctggagatgataaaagaactgtggatctcactgtccaagttccaccttccatagctgatgagcctacagatttcctagtaaccaaacatgccccagcagtaattacctgcactgcttcgggagttccatttccctcaattcactggaccaaaaatggtataagactgcttcccaggggagatggctatagaattctgtcctcaggagcaattgaaatacttgccacccaattaaaccatgctggaagatacacttgtgtcgctaggaatgcggctggctctgcacatcgacacgtgacccttcatgttcatgagcctccagtcattcagccccaaccaagtgaactacacgtcattctgaacaatcctattttattaccatgtgaagcaacagggacacccagtcctttcattacttggcaaaaagaaggcatcaatgttaacacttcaggcagaaaccatgcagttcttcctagtggcggcttacagatctccagagctgtccgagaggatgctggcacttacatgtgtgtggcccagaacccggctggtacagccttgggcaaaatcaagttaaatgtccaagttcctccagtcattagccctcatctaaaggaatatgttattgctgtggacaagcccatcacgttatcctgtgaagcagatggcctccctccgcctgacattacatggcataaagatgggcgtgcaattgtggaatctatccgccagcgcgtcctcagctctggctctctgcaaatagcatttgtccagcctggtgatgctggccattacacgtgcatggcagccaatgtagcaggatcaagcagcacaagcaccaagctcaccgtccatgtaccacccaggatcagaagtacagaaggacactacacggtcaatgagaattcacaagccattcttccatgcgtagctgatggaatccccacaccagcaattaactggaaaaaagacaatgttcttttagctaacttgttaggaaaatacactgctgaaccatatggagaactcattttagaaaatgttgtgctggaggattctggcttctatacctgtgttgctaacaatgctgcaggtgaagatacacacactgtcagcctgactgtgcatgttctccccacttttactgaacttcctggagacgtgtcattaaataaaggagaacagctacgattaagctgtaaagctactggtattccattgcccaaattaacatggaccttcaataacaatattattccagcccactttgacagtgtgaatggacacagtgaacttgttattgaaagagtgtcaaaagaggattcaggtacttatgtgtgcaccgcagagaacagcgttggctttgtgaaggcaattggatttgtttatgtgaaagaacctccagtcttcaaaggtgattatccttctaactggattgaaccacttggtgggaatgcaatcctgaattgtgaggtgaaaggagaccccaccccaaccatccagtggaacagaaagggagtggatattgaaattagccacagaatccggcaactgggcaatggctccctggccatctatggcactgttaatgaagatgccggtgactatacatgtgtagctaccaatgaagctggggtggtggagcgcagcatgagtctgactctgcaaagtcctcctattatcactcttgagccagtggaaactgttattaatgctggtggcaaaatcatattgaattgtcaggcaactggagagcctcaaccaaccattacatggtcccgtcaagggcactctatttcctgggatgaccgggttaacgtgttgtccaacaactcattatatattgctgatgctcagaaagaagatacctctgaatttgaatgtgttgctcgaaacttaatgggttctgtccttgtcagagtgccagtcatagtccagggtgagtgtgatcagaggaatattcatagtaaacagtacctgggtggtctgcatggagagcctgcagtgtcacctgtggaaaaggcatccaaaagaggagtcgtctgtgcaaccagccccttccagccaatggtgggaagccctgccaaggttcagatttggaaatgcgaaactgtcaaaataagccttgtccagtggatggtagctggtcggaatggagtctttgggaagaatgcacaaggagctgtggacgcggcaaccaaaccaggaccaggacttgcaataatccatcagttcagcatgttcatggagcatggagcgcttggcagccttggggaacatgcagcgaaagttgtgggaaaggtactcagacaagagcaagactttgtaataacccaccaccagcgtttggtgggtcctactgtgatggagcagaaacacagatgcaagtttgcaatgaaagaaattgtccaattcatggcaagtgggcgacttgggccagttggagtgcctgttctgtgtcatgtggaggaggtgccagacagagaacaaggggctgctccgaccctgtgccccagtatggaggaaggaaatgcgaagggagtgatgtccagagtgatttttgcaacagtgacccttgcccaagtgagtgttggaaatacccatggtaactggagtccttggagtggctggggaacatgcagccggacgtgtaacggagggcagatgcggcggtaccgcacatgtgataaccctcctccctccaatgggggaagagcttgtgggggaccagactcccagatccagaggtgcaacactgacatgtgtcctgtggatggaagttggggaagctggcatagttggagccagtgctctgcctcctgtggaggaggtgaaaagactcggaagcggctgtgcgaccatcctgtgccagttaaaggtggccgtccctgtcccggagacactactcagctcagcctctggtagtagcagggccccagtggcatcaggaggtccaaataggttgacagtttgggttgcagaatctggcagaggatttcagagatcccagccaggtattcagaatgaggagtcttttgagcactgggactcaagtccctctgtgagactagagaaccagggtcaaaatgtcagtgatgacccagagagctaa

SEQ ID NO: 118020 - DNA, 573 bp, Homo sapiens
atggcctgccatatggtcaagccagatttaaaaattgagaatatctattaccaatccactaatgctaaagccaaagtcacagacaggacgcagaatctcaacggtcagagcgtgttcagcgtggcccccgtcaagggcgtcatggaccccgggaagacacaagacttcactgtcaccttcagccccgaccacgaaagcctctacttctccgacaagctccaggtggtgctctttgaaaagaaaatctcccaccagatcctgctgaagggtgccgcctgtcagcacatgatgttcgtggagggcggcgaccccctggacgtgcccgtggagtctctgacagcgatccctgtatttgaccccaggcacagagaggaagctgaggagctgaggcccatcctggtgaccctggactacatccagtttgacacagacacgccagccccacctgccacccgagagctgcaggtgggctgtatccggaccacccagccatctccaaagaaggtgcccacagcactgcccctggggacaccaggcagccccctcggcctcccctgccgtgggcagccctga

SEQ ID NO: 118021 - DNA, 424 bp, Homo sapiens
gtgccggcgggcaggctctgcagggtcctggccagggcaggggctcccagggcgttgtaggacagggacagggtcttcaggtgctcagcatcttggaaagcactacccagtgctgtctggtggctcagaaagaagctggggccgaagccacacgcctgcaggcgcagggtgctgagtaaggggcaggcgtgcaggagggaggccagggactggccacagccgtcccccagggggttcatgcttaagtccagctcctccaaactctgcaaggtggcttggcctgggagccccatggcaagctggcgcaggccttcgggacccaggtgattggaggagaggtcaaggagggccaggctgggcatggtgcccagggcagccaccagctcagccacacacttgtcccccgaattccaccgcacggtac

SEQ ID NO: 118022 - DNA, 1238 bp, Homo sapiens
tcagaggcgccgaaagaagagcttggagccgtggtccagcgtgcactcgccggggcccggccgactgggctgcagctggcgcagggcgtccctgtcctcagcgcagaggcgtctgctgcacagctgcagttcccggagctgcgcggctatcttgtcccacaggcccaggcccaggggaccctggacggcgcagcctgacaggccaaggaagctaaggccttggggccgcttttggagggtggacaggagctcttccaagctggcacagctgatctcagggttggcagacagatccagtgagatgagtgaggggcacagagagagacatctgcacaggtctctaacagccttgtcccccaggtggtttgcagacagggtcaggtgggctagagcacagccttccttggccaggtatcggaatacaggctccatgaggtccgaatcacccttgccggctgccacggagctgagctctaagtgcaggagggtgccggcgggcaggctctgcagggtcctggccagggcaggggctcccagggcgttgtaggacagggacagggtcttcaggtgctcagcatcattgctgccccccttacactccccctggatgacacccaattcccagcctcttggcactgggaccccagtctctgcagcctgagtgggctcacagtggaactgcctcaggcgaacagcactcagctggcgagcacgggatggggaccacaggacactagctgcccggactctgctctcggtgtgtccttggaaagcactacccagtgctgtctggtggctcagaaagaagctggggccgaagccacacgcctgcaggcgcagggtgctgagtaaggggcaggcgtgcaggagggaggccagggactggccacagccgtcccccagggggttcatgcttaagtccagctcctccaaactctgcaaggtggcttggcctgggagccccatggcaagctggcgcaggccttcgggacccaggtgattggaggagaggtcaaggagggccaggctgggcatggtgcccagggcagccaccagctcagccacacacttgtcccccagccggttccctgccaggcgcagctcccggagtgctgtgtgcagcttgagggcccgcagcaggggtgtaagctgggcctggtccagggccagggagcaggcgctgaacgagaggcccaagccctggagctccacggcctgcagcacctgttggtgctccc

SEQ ID NO: 118023 - DNA, 415 bp, Homo sapiens
gggagacaggacgacacagatcccagcaatcggtatcatcgccccccgtacagccaagaggaaaaagagcaatgtatcactctgctgctgagctggtgtctaggggattcccaaggcccccagtgcaggccccagctgagcctgcaggagctgcggagggagttcacagtcagcctgcatctcgccaggaagctgctctccgaggttcggggccaggcccaccgctttgtaagtccccctaatgcagctggcgctggagatgggcagacccccaatcccttctggcccccactaacagaccttgccccccaggcggaatctcacctgccaggagtgaacctgtacctcctgcccctgggagagcagctccctgatgtttccctgaccttccaggcctggcgccgcctctctgtga

SEQ ID NO: 118024 - DNA, 657 bp, Homo sapiens
atggagacagagccttcaaaggccagagccaatgacccaggatcagctgcagaggggctcagcctgttgctgcttcccttgctcctggttcaagctggtgtctggggattcccaaggcccccagggaggccccagctgagcctgcaggagctgcggagggagttcacagtcagcctgcatctcgccaggaagctgctctccgaggttcggggccaggcccaccgctttgacccggagcgtctctgcttcatctccaccacgcttcagcccttccatgccctgctgggagggctggggacccagggccgctggaccaacatggagaggatgcagctgtgggccatgaggctggacctccgcgatctgcagcggcacctccgcttccaggtgctggctgcaggattcaacctcccggaggaggaggaggaggaagaggaggaggaggaggaggagaggaaggggctgctcccaggggcactgggcagcgccttacagggcccggcccaggtgtcctggccccagctcctctccacctaccgcctgctgcactccttggagctcgtcttatctcgggccgtgcgggagttgctgctgctgtccaaggctgggcactcagtctggcccttggggttcccaacattgagcccccagccctga

SEQ ID NO: 118025 - DNA, 526 bp, Homo sapiens
tgagtgcggcggaattcctggaagaagagaggtgagccggcggtcaggcagaggctggcctggcagcgggtcttgactgcgcccctgaggtggaggtaccaagtgacactgtttctccttctaggaagcagaagcgttggagaaccagtcccagccttgtgacactgggcccaatcagcatttagcccaccagggtccacccagcacccgcgctcccagctgtcacaatgcaaacaacgctatcaagatctccaggagaagctgctgctatcagaagccactgtctttgctcaggcgaacgagctggagaaatagagagttatacttagtaggtgaacccttgctgaagcaggacagtaaacaggtccaggtggacctccaggacctgggctatgagacttgtggccaaagcaagaatgaggctgaacaggaggaaaccaccagtcccgagcatgaggagcacagcagccgcaaggaaatggtcctggtggaggggctgtgctctgagcaggggcgccggggctga

SEQ ID NO: 118026 - DNA, 648 bp, Homo sapiens
atgggacaggtgtggggtctggttcatttcaccttggaagtttttcacactggtgatgaggaggaacaagagtatagtgaagtaacagaagacgttacagagcatgtttatttaccagctaaagctaaagtggcaaaggaagaagaggcaggaattcagcaagctagacaagagggtgatttagaggcttggcagttccctgttagaatacaccccccagatcaacaggaaaatattacagctacatttgagccttttccttttaaattactcaaagaattaaaacaagctataaatcagtatggaccaggttctccttttgtaatgggactgttaaagaatgttactgtttctagtcagatgattcctactgacggggaccctcttactcgagcttgtctaactcctgctcagttcttacagtttaaaacttggtgggcagatgaagcttccattcaggctgctcgcaatgcctgggcccaacctcaaattaatataactgcagaccaacttttgggggttggcggctgggctggtttagatgcgcaattcgtcatgcaggatgatgccatagaacagcttagaggagtgtgcattagagctcgggaaaaaaatcacttaatgtggggaacaatacccttcctttag

SEQ ID NO: 118027 - DNA, 1079 bp, Homo sapiens
tttcagctctgaaggctgtgagtcccctgatttcccactccacactctatatttctgtgtgtgtgtctttaattcctctagcgccgctgggttagggtctccaagaccgagctggtgtcggcaagtggcgcccaacgtggggcttgaaccccagttgaagggtcgctggagttatggttggagaatgtggaactaagctggaggacacccgagtacccttaagcaatccccatggtgagtaagaaggggagctcggaaacatcagggtaacaatgggacaagtgtgggctctggtgcgttccaccttagaaccttttcacactaatgatgagaaggaaggaaagtataaggaagtaacagaagaagtaacagagcagaacagcttagaggagtgtgcattagagcttgggaaaaaagtcacttcgggtgaagaacaatacccttcctttagcattgtaaaacagggaccaagagaaccatacacggattttatagcttggttacaggagtctcttaaaaaggtgattgcagattcagctgctcaggatatagtgttgtggttattagctttcgacaatgctaatcccgattgccaggctgctctgcgacctatcagagggaaagcacatttagttgattatatcaaggcctgtgatggtatcagaggccctgctgggaggctcagctggctcagcctgcagggccggcctgccggggctgcccgctgtacgtcctcgagttccgactggaaggctcagctggccccagggccccatgcggggcctctccgctgtcccgccttcagggctcgccagcctcggctgcccgctgtcctgtctgcaggggctgccttccgggattgcccgctctcctgcgtgcaggccctgctgggaggctcagctggccccggggaccgcctgccggggcattacagtgcgctggtggcactcagtctgcctttcgtgaaggaggccacgatgaacaggtggagtcggaatcaccgttctgccttcttcctgttctcagcaaacgcacacggcgccgagggggtgctctctcacactgtggcttcccggtga

SEQ ID NO: 118028 - DNA, 633 bp, Homo sapiens
atgggacaactgtgggctctggttcattccatcttggaaccttttcacactgatgatgaggaggaaggagagtctaatgaagtaacagaagaagtaacagagcagatttgtttgccagctaaagctaaagcggcaaaggagggagaggtttatccctatccttctgcaccccctccttattttgaagaaaaagagtggcctgaccctccagatctttcttttctggaggatgctgggcaaaaagtgattgccccagtgactgttcaagcagcgcctcaagcgatcgctctcagttctattcaggcaggaattcagcaagctagaagagagggtgatttagaggcttggcagttccctattagaatacaccccccagatcaacagggaaatattatagctacatttgagccttttccttttaaattactcaaagaatctaaacaagctattaatcaatatggacaaggttctccttttgtaatggaactgttaaagaatgttgctgtttccagtcagatgattcctactgactgggatgctcttgctcaagcttgtctaactcttactcagttcttacaatttaaaaccttgtgggcagatgaagtttccattcaggctgcttgtaatgcctag

SEQ ID NO: 118029 - DNA, 825 bp, Homo sapiens
ctatataaagaattcttcttcatcttcttctttttcttcaccctgaacttgcagatgaaggagacattctgaaattgtcttcctggtaccaaggtccctttggccagcaagtggcaaaggagagactctttccttaaggacactgttgtttttggaggtagccacccccaaggaagaggctggcaagcagaatggtggctggctggtctgtaaatcccttggaaatccgccaaaataagtctgcctgggttcagaatttatgatggtcaagccggtgtcaacattcgtctcggcctcaagcttctgaaagctgttttcccggttgaggaccttcattctggccccggattcaaggtgatgagaagacaggtgcaggtgggcacccatagctgggctgctgacctggaatgaccggccagggcttttccacgaagtgccagcacacctgtctgatgtggggctcccactgggctcaggaagctccagagaatgcccctgggacctcttgccctggttcctctggctcctgggttctgaggtcctctttgcagagacagaagtcagcctggagcccaggggaagcatgccagctcccaagatgccattcttaacaccaagttctggattcagctgaaccctgcagttgactgcactctccctccacaggatggagttcactgacccccctttaagacttccacccttgggagccttgcatcctattccatgcacaacactcttcccaagaagatttctgcccacattttctgaacatgtgttcaggatgccacagaaacacatcggtctgtgaaatgggtgccccat

SEQ ID NO: 118030 - DNA, 516 bp, Homo sapiens
agaagaaaaaggtgtggagagaggagaaagaacgtttattgaagatgaccttagaagagagacgcaaagaatacctaagagactatattcccctgaacagcattctatcatggaaggaggagatgaaggggcaagggccaaaatgatgaagaaaatactcaggaaacatcccaggtgaagaaaagtttgactgaaaaagtttctctctatagaggtgacatacataggtagatgctatagtcaatgccgcaaatgccagtcttcttggaggaggaggtgtggatggctgtattcatagagcagccggcccctgtttgctagctgaatgtcgtaacctgaatggctgtgatactggacatgcaaaaatcacatgtggctatgaccttcctgcaaaatgtgagtacaactgaatactgtttcaaaaccagatgagacatcttaacttgttttactccagtgtataactggaaaaggaaatggcagtggtggtatttaattaaatgtgcttaagttcag

SEQ ID NO: 118031 - DNA, 432 bp, Homo sapiens
acatcagtacggcctgcttggttcgagggcgaccggctgaccgagagcgtgagcctcaaggagaagtcgttagatgcttcacaatctgaggccacggactctgactacgaggacgcgctgcccaagcactccttcgtgaaccactacatgagcgaccccacctactacaactcatggaagcgcagggcccagggccgcgcacctgcgccgcacaggtacgaggcggtggcgggctccgaggcgggcgcgcagctgcacccggtcatcaccacgcagagcgcgggcggcgtctacacccccgctggccccggcgcgcgaactccgctcaccggcttctcctccttcgtgtgagcaaagcgccgcgcctccctcagggcggaacggaggcaactttccggagtctatttttgttaagacaatcaactccaatag

SEQ ID NO: 118032 - DNA, 897 bp, Homo sapiens
atggggtgggtacggcatgaggacagggccacggactctgactacgaggacgcgctgcccaagcactccttcgtgaaccactacatgagcgaccccacctactacaactcatggaagcgcagggcccagggcgcgcacctgcgccgcacagagaaccagcggctcacacccttctcaacgcaggacatcctcggcggctcctggggtttgaagagcaaacgtttttccctgggctcactagatgaaaagagtatgaactactttggaaaacttaacagctcagagatggccatgcctccagcccctcacgtcatctttgcaacagacgactgggctgccatggtccacccctcagcccgggtcccgggtctggatggaacgggagcactgctggtgcccactggcgtgtgtgccccgggtccctgtaagtgccccctcaccagcagcagcgtgacacacacaagactcaagaccaccctgtcagtgccccccagtgcacggcaaacgggcaggtgccgttcccccagtgacctgaggtgtagctatcctcctgacgagcaacccgtctgcgtacctaagtgtggctccccgtgggtcagcgtcctggtagcatggatccagtctgaaagtgccgtgctggacccccggcacccccaacacccttacctttatcctgttgacatgcagaacctgctcacgaacctgggggagcccccacaggctcgagctctggcagcaaagctcctgggaaggccctccagctctcagagtggcagccgcgtccctgctgtgtgggctcaggcgggaaatgctacctacatcacggtgcacacgctctgcagccacaacacacacatgtccccagtgcgagtgaaaagattcacccacctgggctga

SEQ ID NO: 118033 - DNA, 615 bp, Homo sapiens
ttttttttttttttttttaaggaacaaaataatggtttttattaaaaattgtacccatacgcacctctctgtcttcctacaaggttgtttctttttttcttttaatgagatctgtttttctgcacaatttcagaaaaagttgtagggaacgtttagggacctgacggctccctaaaccagaaggtgacgcgggaaggagacgtgtcccagctgggcagggctcagctcatgagtttccacgttgtcctcacctttcagactggatccatgctaccaggggcgctgacccacagggaggccacacttagggtacgcaaaccgggttgcctcgtcagggaggataagctacacttgtgtgccaagaattgcgtaagaaataaaaaccatgctacggaaccatttagggcaaacattcatgctttcagcccagtcacagttagatacaaacacggcctccgaagacctgtacagattgagccacctcccgggggctgtggaggcgcgttccgtgtgtggcatctggggtcccctctccctggggcccctcgtttttttggctgcagcattgagtgaagtgcgccttataaaagcaggccgggagagaggctgaagggg

SEQ ID NO: 118034 - DNA, 939 bp, Homo sapiens
atggcaatcaaaaccaacatcaccaggacttctagtctggaagggtatggatccccctgggtgttcagcataaaagacacagcaacagaagctgtgcggtcagagaagaaacgccttaggaagccaagcaagtggcttttggaatatacagaagaatatgatcagatatttgctcctaagaaaaaacaaaagaaggtacaggagcaggtgcacaaggcttgtgtcaaaacactcccacgttcttccagaatttctatgcgggactctgaatgtgttcaagaagaagagagtactggatgcacattccctatcaggagtctctacagagtctcccacccagttacgacatattgcggtacccttaatcatcgtttctggaagatgctttctctgaccgatgagttacgcccccggatcatgactgccactggccgtccacacacgccgatgatggaacgacaattcagatattttgttgggacacagcaaactacatcagtggtcaagcatggcctcaggctgggacaggactgcccaaccaggacagccttcatggaggccatcgggattgcccccgtctgcccccagggagtggtggctgaaaatgcatatgcggtcagagggggtgtcctctcgtgtactctcgtcctcatgtcgtgccgctaccgctcccggggtttatttcttatgtgtcgactgtatcctggttgtagtggtgcgcagccactgactgggccgtcatgggatgtgtgtgttggtcggatgctggtcttcagggtgtcagggtgtcaccatgcacttcagcgtgttgtgcacaatgcgctggtgaggtcgcagtgtagcgcaagtgatgctgtgggctgccacatggtgaacaccaatgctgcacttgggttgcaacgcagattgccaggtcgcctgcaagcttgccacaagtga

SEQ ID NO: 118035 - DNA, 3934 bp, Homo sapiens
ggcacgagaaaagagacgggctgtttctatgtagcaggatcggcccagcttcgggaaaatggagttttcagaggctcatcgaggccattttttcatctccagtcgggggaactttttctgcccatggaagtgcagcagaaaggcatagaggccactaggccttgaagtggctgccattttaaagagtcgagtcagatggcctattaactcagattaattgctgtgcttttggattccaggttgatgccggcccaggatggatcagacctgtgaactacccagaagaaattgtctgctgcccttttccaatccagtgaatttagatgcccctgaagacaaggacagccctttcggtaatggtcaatccaatttttctgagccacttaatgggtgtactatgcagttatcgactgtcagtggaacatcccaaaatgcttatggacaagattctccatcttgttacattccactgcggagactacaggatttggcctccatgatcaatgtagagtatttaaatgggtctgctgatggatcagaatcctttcaagaccctgaaaaaagtgattcaagagctcagacgccaattgtttgcacttccttgagtcctggtggtcctacagcacttgctatgaaacaggaaccctcttgtaataactcccctgaactccaggtaaaagtaacaaagactatcaagaatggctttctgcactttgagaattttacttgtgtggacgatgcagatgtagattctgaaatggacccagaacagccagtcacagaggatgagagtatagaggagatctttgaggaaactcagaccaatgccacctgcaattatgagactaaatcagagaatggtgtaaaagtggccatgggaagtgaacaagacagcacaccagagagtagacacggtgcagtcaaatcgccattcttgccattagctcctcagactgaaacacagaaaaataagcaaagaaatgaagtggacggcagcaatgaaaaagcagcccttctcccagcccccttttcactaggagacacaaacattacaatagaagagcaattaaactcaataaatttatcttttcaggatgatccagattccagtaccagtacattaggaaacatgctagaattacctggaacttcatcatcatctacttcacaggaattgccatttgctaaactgatgcctggtaccgagctgattgaccgtacttctcgttaccggcgaggagcgctcgggctgtctgttgaccctgccgcgtgcaggggtcgcggccggctggagctgggagtgaggcggcggaggagccaggtgaggatggagccaggaaggcagttggtgggaagtccagcttgggtccctgagagctgtgagaaggagatgcggctgctgctggccctgttgggggtcctgctgagtgtgcctgggcctccagtcttgtccctggaggcctctgaggaagtggagcgttgcctggagcagcaagagcaggagctgacagtagcccttgggcagcctgtgcggctgtgctgtgggcgggctgagcgtggtggccactggtacaaggagggcagtcgcctggcacctgctggccgtgtacggggctggaggggccgcctagagattgccagcttcctacctgaggatgctggccgctacctctgcctggcacgaggctccatgatcgtcctgcagaatctcaccttgattacaggtgcaccctactggacacacccccagcgcatggagaagaaactgcatgcagtacctgcggggaacaccgtcaagttccgctgtccagctgcaggcaaccccacgcccaccatccgctggcttaaggatggacaggcctttcatggggagaaccgcattggaggcattcggctgcgccatcagcactggagtctcgtgatggagagcgtggtgccctcggaccgcggcacatacacctgcctggtagagaacgctgtgggcagcatccgttataactacctgctagatgtgctggagcggtccccgcaccggcccatcctgcaggccgggctcccggccaacaccacagccgtggtgggcagcgacgtggagctgctgtgcaaggtgtacagcgatgcccagccccacatccagtggctgaagcacatcgtcatcaacggcagcagcttcggagccgacggtttcccctatgtgcaagtcctaaagactgcagacatcaatagctcagaggtggaggtcctgtacctgcggaacgtgtcagccgaggacgcaggcgagtacacctgcctcgcaggcaattccatcggcctctcctaccagtctgcctggctcacggtgctgccagaggaggaccccacatggaccgcagcagcgcccgaggccaggtatacggacatcatcctgtacgcgtcgggctccctggccttggctgtgctcctgctgctggccaggctgtatcgagggcaggcgctccacggccggcacccccgcccgcccgccactgtgcagaagctctcccgcttccctctggcccgacagttctccctggagtcaggctcttccggcaagtcaagctcatccctggtacgaggcgtgcgtctctcctccagcggccccgccttgctcgccggcctcgtgagtctagatctacctctcgacccactatgggagttcccccgggacaggctggtgcttgggaagcccctaggcgagggctgctttggccaggtagtacgtgcagaggcctttggcatggaccctgcccggcctgaccaagccagcactgtggccgtcaagatgctcaaagacaacgcctctgacaaggacctggccgacctggtctcggagatggaggtgatgaagctgatcggccgacacaagaacatcatcaacctgcttggtgtctgcacccaggaagggcccctgtacgtgatcgtggagtgcgccgccaagggaaacctgcgggagttcctgcgggcccggcgccccccaggccccgacctcagccccgacggtcctcggagcagtgaggggccgctctccttcccagtcctggtctcctgcgcctaccaggtggcccgaggcatgcagtatctggagtcccggaagtgtatccaccgggacctggctgcccgcaatgtgctggtgactgaggacaatgtgatgaagattgctgactttgggctggcccgcggcgtccaccacattgactactataagaaaaccagcaacggccgcctgcctgtgaagtggatggcgcccgaggccttgtttgaccgggtgtacacacaccagagtgacgtacctgtcagcaagcagttcatccccagctgccaatctccttttggccctcagtcttccagaggagctgggagggtctgcatccggcacttgcagacatgtgctaagggcctgttgacttgggagcctccatcactggactgtgggccttggagagcaaaaggcccttccacaaaggcattcttgccccattttccagatgtggacactgaggctctgaaggtggaagtgactggcccagggtcacagggggggaaacagaaaccgccatcatttcctgggtctccttgcacggcccccatcgcatgctgtgtggccctcaatccagttcagctgttaccagtcttgctcctccccgcaaaatccccacccaggtacgggctgatgcgtgagtgctggcacgcagcgccctcccagaggcctaccttcaagcagctggtggaggcgctggacaaggtcctgctggccgtctctgaggagtacctcgacctccgcctgaccttcggaccctattccccctctggtggggacgccagcagcacctgctcctccagcgattctgtcttcagccacgaccccctgccattgggatccagctccttccccttcgggtctggggtgcagacatga

SEQ ID NO: 118036 - DNA, 4286 bp, Homo sapiens
  misc_feature (1)...(4286): n = a,t,c or g
caatcacgcggatgcggagtttgtagggggggcctgttctaaggacaggagtcgcgcttgcgaaccaagggaaaggaggggtcaccccctccccccagctggcccggaagggggcgcggggcacggttgatgccggcccaggatggatcagacctgtgaactacccagaagaaattgtctgctgcccttttccaatccagtgaatttagatgcccctgaagacaaggacagccctttcggatgatccagattccagtaccagtacattaggaaacatgctagaattacctggaacttcatcatcatctacttcacaggaattgccattttgtcaacctaagaaaaagtctacgccactgaagtatgaagttggagatctcatctgggcaaaattcaagagacgcccatggtggccctgcaggatttgttctgatccgttgattaacacacattcaaaaatgaaagtttccaaccggaggccctatcggcagtactacgtggaggcttttggagatccttctgagagagcctgggtggctggaaaagcaatcgtcatgtttgaaggcagacatcaattcgaagagctacctgtccttaggagaagagggaaacagaaagaaaaaggatataggcataaggttcctcagaaaattttgagtaaatgggaagccagtgttggacttgcagaacagtatgatgttcccaaggggtcaaagaaccgaaaatgtattcctggttcaatccaagttggacagtgaagaagatatgccatttgaagactgcacaaatgatcctgagtcagaacatgacctgttgcttaatggctgtttgaaatcactggcttttgattctgaacattctgcagatgagaaggaaaagccttgcgcttaaatctcgagccagaaagagctctgataatccaaaaaggacttagttgtgaaaaagggccacatacaattttgaagcacattaaagatgaacggaggggaaagattcccagagaaccttgggcctaaactttatctctggggatatatctgatacgcaggccctctaatgaacttttccaggatagccaatagcctcacaggggtccaacactgccccaggaagttttctgttttcttcctgtggaaccacacgctgcaaagaaagaatttgaaacttcaaaaagtgactctttattgggcttgcctgagggtgctttgatctcaaagtgttctcgagagaagaataaacaccaacgaagcctggtgtgtggttcaaaagtgaagctctgctatattggagcaggtgatgaggaaaagcgaagtgattccattagtatctgtaccacttctgatgatggaagcagtgacctggattcccatagaaccaccagctcagagtctgataaccagtgtccttggaaattcccagatgcttttcggataggaccagnggaccatgttatctatgcaggaaaattgaaaagattaaagtattcttaggtttgctgccacaaacactaggggtaaaagcaaaacagaagcctctcattagtaactcacatacagaccacttaatgggttgtactaagagtgcagagcctggaaccgagacgtctcaggttaatctctctgatctgaaggcatctactcttgttcacaaaccccagtcagattttacaaatgatgctctctctccaaaattcaacctgtcatcaagcatatccagtgagaactcgttaataaagggtggggcagcaaatcaagctctattacattcgaaaagcaaacagcccaagttccgaagtataaagtgcaaacacaaagaaaatccagttatggcagaacccccagttataaatgaggagtgcagtttgaaatgctgctcttctgataccaaaggctctcctttggccagcatttctaaaagtgggaaagtggatggtctaaaactactgaacaatatgcatgagaaaaccagggattcaagtgacatagaaacagcagtggtgaaacatgttttatccgagttgaaggaactctcttacagatccttaggtgaggatgtcagtgactctggaacatcaaagccatcaaaaccattacttttctcttctgcttctagtcagaatcacatacctattgaaccagactacaaattcagtacattgctaatgatgttgaaagatatgcatgatagtaagacgaaggagcagcggttgatgacttgcttcaaaacctggggtctcttacccggagtcctggtcgtggggactgttctactaatagtcctgtaggagtctctaaggttttggtttcaggaggctccacacacaattcagagaaaaagggagatggcactcagaactccgccaatcctagccctagtgggggtgactctgcattatctggcgagttgtctgcttccctacctggcttactgtccgacaagagagacctccctgcttctggtaaaagtcgttcagactgtgttactaggcgcaactgtggacgatcaaagccttcatccaaattgcgagatgctttttcagcccaaatggtaaagaacacagtgaaccgtaaagccttaaagaccgagcgcaaaagaaaactgaatcagcttccaagtgtgactcttgatgctgtactgcagggagaccgagaacgtggaggttcattgagaggtggggcagaagatcctagtaaagaggatccccttcagataatgggccacttaacaagtgaagatggtgaccatttttctgatgtgcatttcgatagcaaggttaagcaatctgatcctggtaaaatttctgaaaaaggactctcttttgaaaacgggaaaaggccccagagctggactctgtaatgagcagtgagaatgatgaactcaatggtgtaaatcaagtggtgcctaaaaagcggtggcagcgtttaaaccaaaggcgcactaaacctcgtaagcgcatgaacagatttaaagagaaagaaaactctgagtgtgcctttagggtcttacttcctagtgaccctgtgcaggaggggcgggatgagtttccagagcatagaactccttcagcaagcatacttgaggaaccactgacagagcaaaatcatgctgactgcttagattcagctgggccacggttaaatgtttgtgataaatccagtgccagcattggtgacatggaaaaggagccaggaattcccagtttgacaccacaggctgagctccctgaaccagcaaaaagcgagaagacgagcgcaccaccacgcaaggcaaaagagcacacgaagggcagcaggagtctgttgtttgttcgtgtggttttgtggtgtcgaatgtacgttaggttgtgtgtccgttgttctgggcgtcttcctttgtatgcgtcctacgtttttgctcagctgatgaggcacccacttattgagctttttcacttttccaatttgcttcaaatgctgaacgaccgtagaatggtcgacgttgagctcttcgacaacttcttggctgtgcggtcagagaagaaacgccttaggaagccaagcaagtggcttttggaatatacagaagaatatgatcagatatttgctcctaagaaaaaacaaaagaaggtacaggagcaggtgcacaaggtaagttcccgctgtgaagaggaaagccttctagcccgaggtcgatctagtgctcagaacaagcaggtggacgagaattctttgatttcaaccaaagaagagcctccagttcttgaaagggaggctccgtttttggagggccccttggctcagtcagaacttggaggtggacatgctgagttgccgcagctgaccttgtctgtgcctgtggctccggaagtctctccacggcctgcccttgagtctgaggaattgctagttaaaacgccaggaaattatgaaagtaaacgtcaaagaaaaccaactaagaaacttcttgaatccaatgatttagaccctggatttatgcccaagaagggggaccttggcctttctaaaaagtgctatgaagctggtcacctggagaatggcataactgaatcttgtgccacatcttattcaaaagattttggtggaggcactaccaagatatttgacaagccaaggaagcgaaaacgacagaggcatgctgcagccaagatgcagtgtaaaaaagtgaaaaatgatgactcgtcaaaagagattccaggctcagagggagaactaatgcctcacaggacggccacaagccccaaggagactgttgaggaaggtgtagaacacgatcccgggatgcctgcc

SEQ ID NO: 118037 - DNA, 433 bp, Homo sapiens
cttgaggaattcggcacgagtgaagctgtgtaatttgtaatggaaaggggtttaggtggctcacaaatcttcatgctttacaaggaacacggtaccagcatttgcttctggtaaaaggctcagactgcttccacttgtggtggaaggtgaaagggagctgatatgcacagagatcatgtagcaaaaaataggacacgagagagagggaagtaccagtctctttttaacagcaggatctcgaggatatttttatggaaattaatacagaactcaatcattaccgtgaggatggcaccaagacattcataagggatctgcccccatgatcctcacgcttcctcttaggcccacctccatcattgtgaatcagatgtcaacgtgctttctaaactatagtagactccatccagtacattaatagttcagcacttca

SEQ ID NO: 118038 - DNA, 483 bp, Homo sapiens
atgaaaaatcctcaagaacacagacagtcccttcacagaccagattatgctcctaaggaaggtgtgagtgaaggaactgtggcacagcccgctctcaacacgaacctctcggatcttggctacaagacaccccacaacccccatagacgttggaattggcaggcaatctacctggagactctaaccagggccagggaaagagcagggtatgtttgtttgccaccccatccgccagcctctcccaaggcccctgcctggcagctcccaccagagcatgcccacagcacaacctccgctgagcagttcaagtgctttgctgccagccctacctgcaggctttccagtgacccagggacagtggacaaagctgcaggttcaggccccagctccctttcaccttccaccacaagtggaagcagtctgagccttttaccagaagcaaatgctggtaccgtgttccttgtaaagcatgaagatttgtga

SEQ ID NO: 118039 - DNA, 397 bp, Homo sapiens
aaatggcagaggtttgtcctcactggaatagacacttattccagatatgagtttgcctatcccgcatgccatgcttctaccaagactaccatccatggactcatggaattcctcatccaccatcatggtattccacacagcattgcctctgaccaaggcactcaccttatggctaaagaagtgcggcagtgggctcatgctcatggaattcactggtcttaccatgttccccatcatcctgaagtagctggattgatagaacggtggaatgaatggccttttgaagtcacaattacaacaccaactagtcaacaggctaagaagggagttacagtgttggctggggtgattgacccggactatcacaatgaaatcagtctactactccacaatggag

SEQ ID NO: 118040 - DNA, 1719 bp, Homo sapiens
atgtactccagatatgagtttgcctgtcctgcacacaatgcttctgccaagactaccatccatggactcacagaatgcccggtccactgtcatggtatcccacacagcattgcctctgaccaaggcactcactttgtggccaaagaagtgtggcagtgggctcatgctcatggaattcactggtcttaccatgttccccatcatcctgaagcagctggattgacagaatggcagaatggccttttgaagtcacaattaaaatgccaactaggtgacaatactttgcagggctggggcaaagtcctctggaaggctgtgtatgctctgaatcggcgtcctatatatggtactgtttctcccatagccaagattcactggtccaggaatcaaggggtggaagtcgaagtggcagcactcaccatcacccttagtgatccaccagcaaaatttttgcttcctggtaccgcgacattatgttctgctcgcctagaggtcttagttccagagggaggaatgctgccaccaggaaacacaacaataattccattaaactggatgttaagattgccacctggacactttgggctcctcctacctttaagtcaacaggctaagaagggagttacagtgttagctggggtgactgacccagactatcaagatgaaatcagtctactgctccacaatgaagtcaaaacagtgagaaatgtgaaggaggggcttaggcaaaagccagccttgacggcctggggcatcttattggcatttgaattggggaccgagccactcacagacatcaaggaggatgccgtaaagagtcacagaggccgcagccttgacaagcggccgctacagtcatttattcagtacagatataaagacaaaggccttgaggcaacacactttgccatccagtacaacaagagtcgtaaagccaaggagcttccgttcatcacagaggaaatggattatgaaatgtttagtgttgatggatgggatgatctgcaagcctacgtttttatggctttgggacagacaaggaccctgtctttagttgaactaagggactctctggaagagaatatcctccttcacactttgatggaccaaatttcagggggagtggcagagctctgcacttgggacagaggtgtcctcaaggaatgcactaggttagcaagagaaagggccttgattatctaccatagctgtagacctgtaagacttcaatggcaccagggctccatcggaggcataaagctcctctttgtcttgctcacgctccacttgtctgcatatttcattcttcctggactcaggacaagaccttggtacctgctgaatggcaaggctaaaagctgtaatagaaacagggctgaaacatgccccttgcttgccacgttgtgggtgaagagaaggagagaaaagctgtggcccttcagggagcccagctctgggagctccctgagccagggcagtgactccctatttggggccctgaagttcctgacatctccaagcttccaggagctactgcattcgctggtgccagctggagaagctgtttgcagtcctcctggtccagctgtagcctcacagagagccagcacccacactggcacctggaactgcctgccccgcagcagcagcagccagtgtgtcttgctgtgcacactggccagaccccacactcactcacactcaccactccacgcctga

SEQ ID NO: 118041 - DNA, 1632 bp, Homo sapiens
atgtcttctgtgttgctccggctcatttatcaactgacccaaaagactgccagttttgaggggggtccagaacagaaggctctgcaacaaatccaggctgctgtgcaagctgctctgccacttgggccatatgacccagcaaatccaatggtgcttgaggtgtcagtggcagatagggatactgtttggagcctttggcaggtccccataggtgaatcacagctaggattttggagcaaggccctgccatcttctgcagataactactctccttttgagagacagctcttggcctgttactgggctttggtggaaactgaatatttgactatgggtcatgaagtcaccatgctccctgaactgcctatcatgacctgggtgctttctgatccatctagttataaacctgcaccaatggcctcatggggagttccctatggtcaacttacagaggaagagaagactagggcctggttcacagatggttctgcaagatacacagaaaccacccgaaagtggacagctgtagcaatacagcccctctctaggacatccttgaaagacagcaatgaagggaaatcttcccatcaacaggctaagaatggaattacagtgttggctggggtgattgacccggactatcaagatgaaattagtctactactccacaatggaggtgtcatcctgggagcagtgtgtggagggcttcttcgcttggcatctcccatccaccctgatgtggttatgttaatagccttcccaggggatatactcatgaggatgctaagaatgctcattctccctctaatcatctccagcttaatcacaggtgctgatgctactaaggatgacggtgtctactcaaggtatttcacaacttatgacacgaatggtagatacagtgtaaaagtgcgggctctgggaggagttaacgcagccagacggagagtgataccccagcagagtggagcactgtacatacctggctggattgagaatgatgaaatacaatggaatccaccaagacctgaaattaataaggatgatgttcaacacaagcaagtgtgtttcagcagaacatcctcgggaggctcatttgtggcttctgatgtcccaaatgctcccatacctgatctcttcccacctggccaaatcaccgacctgaaggcggaaattcacgggggcagtctcattaatctgacttggacagctcctggggatgattatgaccatggaacagctcacaagtatatcattcgaataagtacaagtattcttgatctcagagacaagttcaatgaatctcttcaagtgaatactactgctctcatcccaaaggaagccaactctgaggaagtctttttgtttaaaccagaaaacattacttttgaaaatggcacagatcttttcattgctattcaggctgttgataaggtcgatctgaaatcagaaatatccaacattgcacgagtatctttgtttattcctccacagactccgccagagacacctagtcctgatgaaacgtctgctccttgtcctaatattcatatcaacagcaccattcctggcattcacattttaaaaattatgtggaagtggataggagaactgcagctgtcaatagcctag

SEQ ID NO: 118042 - DNA, 387 bp, Homo sapiens
atgtggccgcagtggctattggcattcatctgtggccacgaaaataaccagactcaggatgctgaggccacgagagggaagaaagctgccaccaggagacataatgattccattgaactgaaagttaagattgccgccaggctcatcctacttttaagtcaccaggctaagaagggagttacaatgttggctggggtgactgacccagactatcaagatgaaatcagtctactactccacaatggaggaacagggaagtctccacatatttcggataccttttatgggagcaaggttgcctcatgccaaaacacaggaccagaaaagcaggatgagacacaagcacaggaaactgctgtctacaagagccaaatatttggatcctag

SEQ ID NO: 118043 - DNA, 1274 bp, Homo sapiens
agcagaggtttgtcctcactggaatagacacctactctggatatgagtttgcctctcctgcacgcaatgcttctgccaagactaccacccgtggactcgcggaaggccttatccatcatcatgctactccacacagcattgcctctgaacaaggcactcactttacggcaaaagcagtgcggcagtgggctcatgctcatggaattcactattcttaccatgttccccatcatcttgaagcagctggattgacagaatggtggaatgtccttttgaagtcacaattacaacgccaactagccaggattcacaggtccaggaatccaggggtaaaagtggaaatggcatcactcaccatcacccctagtgatccactagaaacatttttgcttcctgtccccatgacattacgttctgctggcctagtggtattagttccagagagacgaacgctgccaccaggagacacaacaatgattccattaaactggaagttaagattgccacttggacactttgggctcctcctacctttaagtcaacaggctaaggagggagttacagtgttggctggggtgactgacccagactatcaagatgaaatcagtctactactccacaatggaggtagaggcaactctaatggtttccatttggcctgtcccaccataatagccctcaccccaccagtcagggagccattgtgggggctctgccagctgttaagtatgtctatgccaattaatgcattctggcactggggaaatgaccacaggatgagtccggggacccactggaccgactcaccagacccgcggacaccgagcggcgacgcgggccaccggctgtgggcggaccctgcgggctgggcctggcgcagaccagtgcgggccgactggaaccggggctcgcgtccagctggcggaggactgggggatcccgaaggcctgagagtaattaacatggaaaaagataaacacagtcatttctacaaccaaaaaagtgacttcagaattgagcatagtatgctagaagaattggaaaatagattgattcacagcaggaaaacagaaaacattccaaaacagagcatccaacgcaacatgtctgccatggaatgcttctgcaacacggacaagagggccacgactgagggctccaacatggctttgaagatgctgcgccagaatagcatcactcaagtctctatttatgaggtggatgagaaagattgtcgcaaatattgcactactggcatcgatggagagccatga

SEQ ID NO: 118044 - DNA, 428 bp, Homo sapiens
ctggacttggccgcagacagccggcagggtcgtggccagaacgccggccgggaccatctgcacaggcgctcgacagctccaagacgctgcggccaagcagaaagttgaacagaacgcggctcccagccacaccaagttcagggacaaggaagatggggagtatgcatgaaaatcccttctcatagcggaaagtccccagatgtgtctgaagtcagcaagtcaagaaacagcatcataagcacagcagtcacacatgcggtggtggcaccagaaggactgaaaaggaatggtgggggcagccacttaagaagcagcagggggcacagagctgttattttttaaccatgtgttgtatttctttgatttttaaaaagtcgagacaattttaaataaaatctttcttctaattgcaaaaaaaaaaaaaaaaa

SEQ ID NO: 118045 - DNA, 449 bp, Homo sapiens
tcagtgtggtggaattcgtcaattcaagtcatgcaggctgtgagaaacgcggggtcgcggatcctgcggtcctggacttggccccagacagccggcagggtcgtggccagaacgccggccgggaccatctgcacaggcgctcgacagctccaagacgctgcggccaagcagaaagttgaacagaacgcggctcccagccacaccaagttcagagtccagatattgtctatggttgatgaaataagaaacagaggtttgactgtattttttaaattgtgggaagaggaacctacaaaggatctgaaaataatgaacacgggtatacctgcagggacaaggaagatggggagtatgcatgaaaatcccttctcatagcggaaagtccccagatgtgtctgaagtcagcaagtcaagaaacagcatcataagcacagcagtcacacatgcgg

SEQ ID NO: 118046 - DNA, 599 bp, Homo sapiens
tttcgtgcagctgtgactgtcgctgtagacggaaactgactggggtcaattcaagtcatgcaggctgtgagaaacgcggggtcgcggttcctgcggtcctggacttggccccagacagccgggtaacaaatgactgccccctcgagcccaccgccacctccaggactatgctcctactcgtgtcccttgagccaccctttctcccagtgaccgttaggccgtggccctcaccgagcttttcttcccagcagggtcgtggccagaacgccggccgggaccatctgcacaggcgctcgacagctccaagacgctgcggccaagcagaaagttgaacagaacgcggctcccagccacaccaagttcaggtgagccccacttggaccagccctctggagacccgcaacccctgactcttgcccgacaccctccagagtcagaaccagtgaattttcagctatgtcacttgctatccgtgggaccttatgcaaataaatctgagcctcagccttctcatctaaaaatgcggataatgctgagagaggttgtgagaatcacatgagccgtggtacagagtaaatgctcagtgaacattcgttaaa

SEQ ID NO: 118047 - DNA, 581 bp, Homo sapiens
  misc_feature (1)...(581): n = a,t,c or g
gctgccaactttgctggggcagtatccaaacatcctggtctccaaacttctctctgactaacaggacaaggttcccgttatagcttcttgttcagggatgttcgggtcattcttttcaatcagcttctgttattgcggagctccaagttttgaactgtagaaatttctgcctcccaaatatcttccaaaatcttgcgccagcaatatatcctgttcattcttcttcatcatgaagggtcagctttcttctttgccagtcgctggttttcatccagnggcacgaagctcgtggtctgaatacagggcttctctctatctcaatctgctgcagtagagacgccatctcttcctgcaatggggtcaacgggcttggagactacaggtggccgctgcaggcacaacgcgcccaacaagcgccatggggatccgttgcagtgagggtgcggctgcaagagccacggctgcgagagcttagactgccggcccagagcctctcgaaccgccgccaaccccccgccacccctaacagcgtccgccttacgggcgccgccatctttcgttctcccacaatgcacacgaaa

SEQ ID NO: 118048 - DNA, 2035 bp, Homo sapiens
  misc_feature (1)...(2035): n = a,t,c or g
gtcgccgcggctagggaggaagaccacttgctcttcgtttctttctggaagaaagcccctcaccacccagctgccggtactttgcttccccccaggagccgcagtgcaagtagcagcgcagtgcgggggagggggtggggtttgaggaagctgtttgtgaagtgccccttgaatacttgcctctctgaggccatcagtcctgtccgggtccgtagtcctggcatggtccgccgggtgcaaacacagtcgccgcggctgccgggccagaggagaacagctgctttaaagctgagaccaacccacgggtggcctgtcagggccacggatgttcatgacgtcatcctgaaggcgagcggagaaagcgagtggagaggggggagccgcgcttcacatcaaatgtcccctgtggccatggcaacagctttgggggagggggtgccggtccgcgggccagcagcgggcagcctgcgactcctgccagggtccagcgctccgctgggtagagacgccatctcttcctgcaatggggtcaacggcttggagactacaggtggccgctgcaggcacaacgcgcccaacaagcgccatggggatccgttgcttgagggtgcggctgcaagagccaggctgcgagagcttagactgccggcccagagcctctcgaaccgccgccaaccccccgccacccctaacagcgtccgccttacgggcgccgccatctttcgttctcccacaatgcaccgcggctcccagggatccctcagccgcgggagcggcaaactaggggaaagctcagtcccggaactgctagaacgaaccattcgcatatggagggggcactcatggtaccggcgccggcgcagctgtgactgtcgctgcagacggaaactgactggggtcaattcaagtcatgcaggctgtgagaaacgcggggtcgcggttcctgcggtcctggacttggccccagacagccgggccgtggccctcaccgagcttttcttcccagcagggtcgtggccagaacgccggccgggaccatctgcacaggcgctcgacagctccaagacgctgcggccaagcagaaagttgaacagaacgcggctcccagccacaccaagttcagcatttaccctcccattccaggagaggagagctctctgaggtgggcaggaaagaaatttgaggagatcccaattgcacacattaaagcatcccacaacaacacacagatccagggtagtcttttgttagttaattgaggcccctttgccttttgctttcctgtgggcacagaaggggattttcgggaattgccaaggaaggggcacagggcttcgcaggcacaggacaagcagggcatagccgcagcggccgagagcttaaacaaaaggggcgtgattcacatcccgagtttgtggttgaaagggcctggggccaggacgctttgttctgcccatgcacggacctgatcatgggccggccttgaaagtaatcttcaatcacagacaacacccacccaatcccaacaccaaacggctgccgccccaggaaggctcggaaagctgtgatgggaaggaggcctgcacttggacctgacctcaagcctcagctccagtgggaccttgtaaaatgctccctgtcagagctctccagaatatgcttgttggagatccttcagggagtaacgggagagttttgcctccttacacacgtggcctttgcttgcaccctccagctggagatggcgtgtgcctccagaagtcaagctttgcatcttctttacaagagggggagctacaggggcagccgtgggcttaggccccaaactctgctctgagaaaataaatatctgtaccacctgtnnnnnnnnnnnnnnnnnggggggcccgttttaaagaaaccagttttacgaccccggcctggcaacccaatattttttttatgggggccccaaagatcatttgcgggcccgggttttaaaaccgcctggacgggaaaaaccctggggttacccaattaaatcgcttttgagaaa

SEQ ID NO: 118049 - DNA, 741 bp, Homo sapiens
atgactaaaaggggccatggtacagcttgggctgtggcttcaaaaagtgcaagcccaaagccttggcagcttccacatagtgttgagcctgtgggcacagagaagtcaagaattgaggtttgggaacctctgcctagatttcagaggatgtatggaaacacttggatgtcaggcagcagtttgctacagggaaaccaaaatcttcatgctgaaagatactgcaattctactttagaaagaaatgatacgccaatagaaagcttaaaaccaaaaagggagagtgaagatggactaggagaacacaatggaagtacaatggaagaagtgggtgcagaaactagggtgcagcgccactgggttagggtctccatgactgagctggccttggcaagtgatgcccatatgtggggctcaaacccaggtcaaagggtcaccggagtgatggttggagaatgtggaactatgctgggggacacccaagtactcttaagcaatccctgtggtgacagagctaggagagcgtatagcacagctcctgattatgctgtatgtggaaatgggggaaaagtgaaattaaacgaacagcgatttggaagcacaaataaacaaggcaaagcagcttattggatggaagccctgagacctgagccactatgttggcagtccaactatcctgaagctgctgctgtggggaagcccaaagcagcctatacaaagaaacttcatggagaagactcctga

SEQ ID NO: 118050 - DNA, 711 bp, Homo sapiens
agtgccacagtagatttatactgcacaaaagctgtgagccttatgcttggggaatccccacaaaaagttccaataggggtctgtggatgcttgccggggggatgataggattacttctaggtagatctagtttaaatttaaaaggagtgcaagtacatacaggagtcattgattcagattacaatggggaaattcaaattgttatatttacttcttttccttggaaagcagagccaggaaagcgtatagcacaacttctgattgtgccgtatgtggaaatggggaaaagtgaaattaaacgaataggagaatttggaacgcacaaataaacaaggcaaagcagcttattgggggaatcaaattactgataaatgtcctatctgtgaaataactgttcagggaaagaaatttaaaagtttggtagatacaggaacagacatttcattcatttctctacagcactggctgtcctcatggccaattcaacctgctcaatttaacatagctgaagttcgtaaagcccctgaagtatatcaaaatagttatatcttgcattgtgaagggcctgatgggacaacctgggactattcaaccaattgtaacttctatacctataaatttatgggggagagatttattacaacaatgaggagaacaagttctaattccagagcaattatacagccctcaaagtcaacatatgatgcatga

SEQ ID NO: 118051 - DNA, 246 bp, Homo sapiens
aagaagaagaagaagaagaagaagaagaggaagaggaagaggaagaagaagaagaagaagaagaagaagaagaagaagaagaagaagaagaagaagaagaagaagaagaacaggccatgtgaggttgccacaccacctacaaaacagggataccacagtccccaggtaaggatcacaggagtttcctgcagcagcaacagcagcgacagcagcattttctatgcggttgaggaaaaaagccacagc

SEQ ID NO: 118052 - DNA, 159 bp, Homo sapiens; identical to SEQ ID NO: 117049

SEQ ID NO: 118053 - DNA, 353 bp, Homo sapiens
acccagtggagaaagcacatagcatctcagctgacttttgcagacagagctaaattgagaggtgtcaccttcgctggcaaggtcagaggaatcgtgtctgctaacctggagaggtgggaattgcaggcagcaaacaaaattgcactgccacttggaaatctgccaactgctacaatcagggtaaaaataattggaaaaacctcatctcttaaaaaagaagaagaagaagaagaagaagaagaagaggaagaggaagaggaagaggaggaggaagaagaagaagaagaagaagaagaagaagaagaagaagaagaagaagaagaagaagaagaagaagaagaagaagaagaaag

SEQ ID NO: 118054 - DNA, 201 bp, Homo sapiens
ttacgcaaaaaagaagaagaggaagaagaagaagaagaagaagaagaagaagaagaagaagaagaagaagaagaagaagaagaagaagaagaagaagacctaaacaaaagaacaaaaagctttgcatattcttttccatgtttttttgtggttattttgatcgtgattcttaaccttgtctttgctacctggcgggaggag

SEQ ID NO: 118055 - DNA, 210 bp, Homo sapiens
atgcattcctacttcacacatcccagtgaacctcagcacattagctggttactgagaagaaaagaaggagaaggagaaggagaaggagaaggagaaggagaagaagaagaagaagaagaagaagaagaagaagaagaagaagaagaagaagaagaagaagaggaagaggaagaagaagaagaagaagaagaagaagaagaagaagaataa

SEQ ID NO: 118056 - DNA, 174 bp, Homo sapiens
atgaatcgatgtgtcccaaatttcagtgtcagtgctagaggcatatttacagctcaaatgaagtccattaaaaagaagaagaagaagaagaagaagaagaagaagaagaagaagaagaagaagaagaagaagaagaagaagaagaagaagaagaaattccactttcttctctag

SEQ ID NO: 118057 - DNA, 278 bp, Homo sapiens
atgacaagctataagttcacagagcccaagaacgggatctggcaacttcatgaagcagcacaactagatacaacatataacaagttaaacaaaaaagaagaggaagaggaagaaggaggaagaagaagaggaagaagaggaagaagaaagaagaaggagaaggagaagaagaagaagaagaagaagaagaagaagaagaagaagaagaagaagaagaagaagaagaagaagaagaagaagaagaagaagaagaaggagtcatacttctatccccaaag

SEQ ID NO: 118058 - DNA, 429 bp, Homo sapiens
atgggctccaggttaaactggatggaagtgattccagagcagtgcacctaccttcatgtccttataaaatgcatgtttttctggaaccgacagcacagaggtggcatccaggagaaggcagcactgaagcagagaactcctaggatcttccacgagaagaatacgccctgctacctgctggtccaagaagaaggtgcagacacacgcataggtatgaacccaacccagagtttggagccaagcacagctgccctgcagcctgacacagagctgccccagccacctcagacacccaagagtgacacagatcaaatgctttcggtgaagaagaagaagaagaggaagaagaagaagaagaagaagaagaagaagaagaagaagaagaagaagaagaagaagaagaagaagaaactctattttcaaacatga

SEQ ID NO: 118059 - DNA, 767 bp, Homo sapiens; identical to SEQ ID NO: 117048

SEQ ID NO: 118060 - DNA, 300 bp, Homo sapiens
atgaagaagaagaagaagaagaagaagaagaagaagaagaagaagaagaagaagaagaagaagaagaagaagaagaactcacaaatagattatttccaaacatttttgggtgacacaactagggaactgctaccagcatctagtggggaggaacaagggatggtgctgaacattcgagatgcacaggacgacccccacagcaaagaattatgtggcccagatgtgaatggtgctgaggttgagacacactggtttaccgtttctaatggaagtgtaattgttttgggaatccttaagtga

SEQ ID NO: 118061 - DNA, 1233 bp, Homo sapiens
atgcctagcagcaaaggtgtacatgtacacagccccccaagatacctagcagcaaaggactttaaaatgataaataaagaattaacagcagctacatttatggaggtcatagcagaggataatcgtttcatatatgatggaattgacagcaactttgaacctgagctggttttcctggaattctttgaagctctcttaagctttgcattcatctgtgttactgaccaaatgactaaatcctatacaaatgttccagctgatgatgtgtctggaaataaacatgaaactatttatacaatactaaatcaggacgcccagaacaagagtcccagcgcggtcatgagccacgaatcggatgctgctcactctgacagtgccaggtcatcttccagcaagttagaactctcgcctgatgttaacaaaataaggaaatcagaggcaatggtgaaagaaaagaaaaaagcagacaaaaaaggggagaagtctgcccgctctccctcatctctctctgataatctagacttttccaaacaagatggcaacaccactaggcaagagatgtccccagctggtgtcccattgctgggaatgcagctcaacgaagtgaaacccaaaaaagaccgccaaaacgttcagcagaacgaagatgccacccaatacgaagagtccattctgaccaaactcatagtggaaagctatgaaggggaaaaggttcgtgggctgtatgagggagaaggcttcgcagcctttcaaggcggttgtacctatcgtgtaagttgcccatttgagaacctgcaggaaggggaggaagggcgactttgtgaagaatgtcccgatgaaccacggcgtgtacacgtggccggacggagcatgtatgaaggcgaagtggtcaacggcatgaggaacggattcgggatgttcaagtgcagcacccagcctgtgtcctacatcggccactggtgcaatggcaagcggcacgggaaggtgggcgaggtggccacgtggagggcagagaagaagaagaaagaagaagaagaagaggaagaggaagaagaagaagaagaaggaagaggaagaagaagaagaagaggaggaagaagaagaagaggaagaggaagaagaagaagaagaagaaagaagaagaagaagaagaagaagaagaagaagaagaagaagaagaagaagaagaagaagaagaagaagaagaagaaaaaatacgtccttgaggactaa

SEQ ID NO: 118062 - DNA, 708 bp, Homo sapiens
atggtggctgaatcatgtcagggagatttaagtacattggccaatgtggttacatcattagcgaatcttggaaaaactaaagatctttctcaaaatagtaatgaaatgtctatgattgaaagcttaagcaatgatgatacctctttgtgtgaatttcaagaaatgcagaccaacggtgatgtttcaagaataatgtcccccgacacatttccatcaggagcacaggagcagccaagacatacagggagacttgcacgtggctttgcgcaggagccttttctgccaaatcaaacagagcagagatacaaaacacaaaagcaagccatcagaaaagatctgtgtgactgggcacgatggatcatgtctgtaatcccagtgctttgggaggctgaggaaacaccatcagcatccattcaccctttagaattacagccaactcaagctcttcctgacttctcagtattgtacaagcagaggcagtgtcagaaaattcccatccaattttgccaagagtctctagaagtggttggggacagaaggaggaagaagaagaagaagaaagaagaagaagaagaagaagaagaagaagaagaagaagaagaagaagaagaagaagaagaagaagaagaaggaagaagaagaagaagaagcagcccatcttgttattctataacccctgaactaagttgtaaacttggccatcgttga

SEQ ID NO: 118063 - DNA, 708 bp, Homo sapiens
atggtgtctgccctcccagaggtaggtcgtgctcagattttaaggctgatagcttatattcgttcccctgcccctcccgttgtgggagttgagagagcagcacgcagacctgctcaggcttttggactggttgcactgccctccaccgttggagaggaatgcctgaaagatgccctccggagtccagagactcctaaactcggttccctcagtcctccctgccaggacacaagacctggagaaggaggaggaggagaatcggaaagaggaggaggaggaggagaaggagaaggagaaggagaagaagaagaagaagaagaagaagaagaagaagaagaagaagaagaagaagaagaagaagaagaaaaagaagaagaagaagaagaagaagaagaacaagaagaagaagaagacgacgaagaagaagaggaagaaaaatcctgtagtgtcaatgtctcactgatagaattaccctgggaccccaaggcctacagcaggctagctcctctatcctcacagcctggccctgctgtcaaggtgcccactgagcacctcattgcaaaactcgaggactgtgtccagggcttcacttacttgaccgtggaaaagcgttgggcccgggctgtcactggtgcccaggaacttggagttgattatcctagaaacgagaaatgcaagcctcataacaatggttatgacaatgactaa

SEQ ID NO: 118064 - DNA, 3192 bp, Homo sapiens
atgggagactttaacaccccactgtcaacattagacagatcaatgagacagaaagtcaaaaaggatacccaggaattgaactcagctctgcaccaagcagacctaatagacatctacagaactctccaccccaaatcaacagaatatacatttttttcagcaccacaccacacctattccaaaattgaccacatacttggaagtaaagctctcctcagcaaatgtaaaagaacagaaattataacaaactatctctcagacggcagtgcaatcaaactagaactcaggattaagaatctcactcaaaaccgctcaactacatggaaactgaacaacctgctcctgaatgactactgggtacctaacgaaatgaaggcagaaataaagatgttctttgaaaccaacgagaacaaagacacaacataccagaatctctgggacgcattcaaagcagtgtgtagagggaaatttatagcactaaatgcccacaagagaaagcaggaaagatccaaaattgacaccctaacatcacaattaaaagaactagaaaagcaagagcaaacacattcaaaagctagcagaaggcaagaaataactaaaatcagagcagaactgaaggaaatagagacacaaaaaacccttcaaaaaattaatgaatccaggagctggttttttgaaaggatcaacaaaatagatagaccgctagcaagactaataaagaaaaaaagagagaagaatcaaatagatacaataaaaaatgataaaggggatatcaccaccaatcccacagaaatacaaactaccatcagagaatactacaaacacctctacgcaaataaactagaaaatctagaagaaatggataaattccttgacacatacactctcccaagactaaaccaggaagaagttgaatctctgaatagaccaataacaggatctgaaattgtggcaataatcaatagcttaccaaccaaaaagagtccaggaccagatggattcacagccgaattctaccagaggtacaaggaggaactggtaccattccttctgaaactattccaatcaatagaaaaagagggaatcctcctgttggaagttctggccagggcaattaggcaggagaaggaaataaagggtattcaattaggaaaagaggaagtcaaattttccctgtttgcagacgacatgattgtatatctagaaaaccccattgtctcagcccaaaatctccttaagctgataagcaacttcagcaaagtctcaggatacaaaatcaatgtacaaaaatcacaagcattcttatacaccaacaacagacaaacagagagccaaatcatgagtgaactcccattcacaattgcttcaaagagaataaaatacctaggaatccaacttacaagggatgtgaaggacctcttcaaggagaactacaaaccactgctcaaggaaataaaagaggatacaaacaaatgcaagaacattccatgctcatgggtaggaagaatcaatatcgtgaaaatggccatactgcccaaggtaatttacagattcaatgccatccccatcaagctaccaatgcctttcttcacagaattggaaaaaactactttaaagttcatatggaaccaaaaaagagcccgcatcgccaagtcaatcctgagccaaaagaacaaagctggaggcatcacgctacctgacttcaaaccatactacaaggctacagtaaccaaaacagcatggtactggtaccaaaagagagatatagatcagtggaacagaacagagccctcagaaataacgccgcatatctacaactatctgatctttgacaaacctgagaaaaacaagcaatggggaaaggattccctatttaataaatggtgctgggaaaactggctggccatatgtagaaagctgaaactggatcccttccttacaccttatacaaaaatcaattcaagatggattaaagacttaaacgttagacctaaaaccataaaaaccctagaagaaaacctaggcaataccattcaggacataggcatgggcaaggacttcatgtctaaaacaccaaaagcaatggcaacaaaagacaaaattgacaaatgggatctaattaaacttaagagcttctgtacagcaaaagaaactaccatcagagtgaacaggcaacctacaaaatgggagaaaattttcacaacctactcatctgacaaagggctaatatccagaatctacaatgaactcaaacaaatttacaagaaaaaaacaaacaaccccatcaaaaagtgggcgaaggacatgaacagacacttctcaaaagaagacatttatgcagccaaaaaacacatgaaaaaatgctcatcatcactggccatcagagaaatgcaaatcaaaaccacaatgagataccatctcacaccagttagaatggcgatcattaaaaagtcaggaaacaacagggtcagcaatggccagttgagtctttctcctgatgacagctctttgattctagctctcctgcctcctgcttcttcatttaaggagtcttgtggttacactgggaccacctgcataactccacggattagcagtcttaattcccggggcgaggagggagcgcatcggagaggtacctgtgcgatgggcagcggtgcttggcacctgagcgtaggtacgatactcagcaaggcacctgggtgggacataggagaaggaaatctccaccccaaccccccaaaacaccgcccagaagtgggcggtgaggcccagtgccgcagccccagggaaatggcagtgacacaggtggcagccaccttcagagcgccaggcccccgccagcacatctgcagatttgctcctgggacacgcgttggccaggagcatgagggacacccagtggtgtccacccagcagtttgcagcagcagcctgtgggcagcttcccactgagttccaccagcatcccaggacacagctccctgcttaccagcactggctggtggcacttcggcaaacgtctccaccatccgaaaacaaaatgagacagacatgtacttccccaaaggagccccctgacactgctgagcagggtgtaagaggtgacactgaagagttggaaggaggagagatgagagaagagaaaatcatggaacttgagttggtctttgcagatgattggtgtctctga

SEQ ID NO: 118065 - DNA, 5130 bp, Homo sapiens; identical to SEQ ID NO: 116418

SEQ ID NO: 118066 - DNA, 3819 bp, Homo sapiens
atggaagacgaaatgaatgaaatgaagcgagaagggaagtttagagaaaaaagaataaaaagaaatgaacaaagccaccaagaaatatgggactatgtgaaaacaccaaatctacgtctgattggtgtacctgaaactgacggggagaatggaaccaagttggaaaacactctgcaggatattatccaggagaacttccccaatctagcaaggcaggccaacattcagattcaggaaatacagagaacaccacaaagatactcctcgagaagagcaactccaagacacataatcatcagattcaccaaagttgaaatgaaggaaaaaatgttaagggcagccagagagaaaggtcaagttacccacaaagggaagcccatcagactaaaagcggatctctcggcagaaactctacaagccagaagacagagctggttttttgaaaagatcaacaaaatcgatagaccacaagcaagactaataaagaagaaaagagagaagaatcaaatagacacaataaaaaatgataaaggggatatcaccaccgatcccacagaaatacaaattaccatcagagaatactacaaacacctctatgcaaataaactagaaaatctagaagagatggataaattcctcgacacatacaccctcccaagactaaaccaggaagaagttgaatctgtgaatagaccaataacaggctctgaaattgaggcaataaccaatagcttaccaaccaaaaaaagtccaggaccagatggattcacagccgaattctaccagaggtacaaggaggagctggtaccattccttctgaaactattccaaccaatagaaaaagagggaatcctccctaactcattttatgaggccagcatcatcctgataccaaaacctggcagagacacaaccaaaaaagggaattttagaccaatatccttgatgaacattgatgcaaaaatcctcaataaaatactggcaaaccaaatccagcagcacatcaaaaagcttatccaccatgatcaagtgggcttcatccctgggatgcaaggctgtgttggaagttctggccagggcaataggcaggagaaggaaataaagggtattcaattaggaaaagaggaagtcaaattgtccctgtttgcagatgacatgattgtatatctagaaaaccccactgtctcagcccaaaatctccttaagctgataagcaacttcagcaaagtctcaggatacaaaatcaatgtacaaaaatcacaagcattcttatacaccaacaacagacaaacggagagccaaatcatgagtgaactcccattcacaattgcttcaaagagaataaaatacctaggaatccaacttacaagggatgtgaaggacctcttcaaggagaactacaaaccactgctcaatgaaataaaagaggatacaaacaagtggaagaacattccatgctcatggataggaagaatcaatatcgtgaaaatggccatactgcccaaggtaatttatacattcaatgccatccccatcaagctaccaatgactttcttcacagaattggaaaaaactactttaaagttcatatggaaacaaaaaagatcccacatcgccaagtcaatcctaagccaaaagaacaaagctggagacatcacactacctgacttcaaactacactacaaggctacagtaaccaaaacagcatggtactggtaccaaaacagagatatagatcaatggaacacaacagagccctcagaaataatgctgcatatctacaaccatctgatctttgacaaacctgacaaaaacaagcaatggggaaatgattccctatttaataaatggtgctgggaaaactggctagccatatgtagaaagctgaaactggatcccttccttacatcttatacaaaaatcaattcaagatggattaaagacttaaatgttagacctaaaaccataaaaaccctagaagaaaacctaggcaataccattcaggacataggcatgggcaaggacttcatgtctaaaacaccaaaagcagtggcaacaaaagccaaaattgacaaatgggatgtaattaaactaaagagcttctgcacagcaaaggaaactaccatcagagtgaacaggcaacctacagaatgggagaaaattttcgcaacctactcatcggacaaagggctaatatccagaatctacaatgaactcaaacaaatttacaagaaaaaaacaaacaaccccatcaaaaagtgggcaaaggatatgaacagacacttctcaaaagaagacatttatgcagccaaaagacacatgaaaaaatgctcatcatcactggccatcagagaaatgcaaatcaaaaccacaatgagataccatctcacaccaattagaatggtgatcattaaaaagtcaggaaacaacagagcacctgggggaaggggtggctgtgggtgcagctttggcagacttaaacgttcctgcgtgccagctctgaaaagagtagcagatctcccagcacaacgctcgagctctgctaagggagagactgcctcctcaagtgggtccctgaaccccgtgccccctgactgggagaaacctcccagcaggggtcgacagacacctcatactggagaactccggctagcatctgacgggtgcctctctgggatgaagcttccagaggaaggaataggcagcagtctttgctgttctgcagcctctgctggtgatacccaggcaaatggggtccggagtggactgccagcaaactccagcagacctgcagcagaggggcctgttagaaggaaaactaacagacagaaaggaatagtatcaacttcaacaaaaaggacgtccacaccaaaaccccatccaaaggatcacaactcctcgccagcaatggaacaaaactggatggagaatgcgtttgacgaattgacagaagtaggcttcagaaggtgggtaataacaaacttctccaagctaaaggagcatgttctaactcaatgcaaggaagctaagaagcttgaaaaaaggttagaggaattgctaactagaataaccagtttagagaagaacataaatgacctgatggagctgaaaaacacatcacaagaacttcgtgaagcatacacaacggaagaaaggatatcagagattgaagatcaacttaatgaaataaagcatgaagacaggattagagaaaaaaatgaaaaggaacgaacaaagcctccaagaaatatgggactacgtgaaaagaccaaacctacatttgactgtgtacctgaaagtgatggggagaatggaaccaagttggaaaacactctgcaggatattatccaggagaacttccccaacctagcaaggcaggccaacattcaaattcaggaaatacagagaacaccacaaagatactcctcgagaagagcaaccccaagacacataatcatcagattcaccaaagttgaaatgaaggaaaaaatgttaagggcagccagagagaaaggtcaggttacccacaaagggaagcccatcagactaacagctgaccccttggcagaaactctacaagccagaagagagtgggggccaatattcaacattcttaaagaaaagaattttcaacacagaatgtcatatccagccaaactaagcttcataagtgtgggagaaataaaatactttacagacaagcaaatgctgagagattttgtcaccaccaggcctgccctacaagagctcctgaaggacgcgctaaacatggaaaggaacaaccagaaccagtcactgcaaaaacatgccaaattgtaa

SEQ ID NO: 118067 - DNA, 3570 bp, Homo sapiens; identical to SEQ ID NO: 116242

SEQ ID NO: 118068 - DNA, 3441 bp, Homo sapiens
atggagctgaaaaccaaggcacgagaactacatgacgaatgcacaagcctcagtagccgatttgatcaactagaagaaagggtatcagtgatggaagatgaaatgaatgaaatgaacttaccaaccaaaaaaagtccaggaccagatggattcacagccgaattctaccagaggtacaaggaggagctggtaccattccttctgaaattattccaatcaatagaaaaagagggaatcctccctaactcattttatgagcccagcatcatcctgatagcaaagcctggcagagacacaacaaaaaaagagaactttagacccatatccctgatgaacatcaatgcaaaaatcctcaataaaatgctggcaaaccaaatccagcagcacatcaaaaagcttatccaccatgatcaagtgggcttcatccctgggatgcaaggctggttcaatatacgcaaatcaataaatgtaatccagcatataaacagaaccaaagacaaaaaccacatgattatctcaatagatgcagaaaaggcctttgacaaaattcaacaacacttcatgctaaaaactctcaataaattagtgttggaagttctggccagggcaatcaggcaggagaaggaaataaagggtattcaattaggaaaagaggaagtcaaagtgtccctgtttgcagatgacatgattgtatatctagaaaaccccactgtctcagcccaaaatctccttaagctgataggcaacttcagcaaagtctcaggatacaaaatcaatgtgcaaaaatcacaagcattcttatacaccaataacagacaaacagagagacaaatcatgagtgaactcccattcacaattgcttcaaagagaataaaatacctaggaatccaacttacaagggacgtgaaggaccttttcaaggagaacaacaaaccactgctcaaggaagtaaaagaggatacaaacgaatggaagaacattccatgctcatgggtaggaagaatcaatatcgtgaaaatggccatactgcccaaggtaatttacagattcaatgccatccccatcaagctaccaatgactttcttcacagaattggaaaaaactactttaaagttcatatggaaccaaaaaagagcctgcattgccaagtcaatcttcagccaaaagaacaaagctggaggcatcacgctacctgacttcaaactatactacaaggctacagtaaccaaaacagcatggtactggtaccaaaacagagatatagctcaatggaacagaacagagccctcagaaataatgctgcatatctacaactatctgatctttgacaaacctgagaaaaacaagcaatggggaaaggattccctatttaataaatggtgctgggaaaactggctagccatatgtagaaaggtgaaactggatcccttccttacaccttatacaaaaatgaattcaagatggattaaagatttaaacgttagacctaaaaccataaaaaccctagaagaaaacctaggcattaccattcaggacataggcgtgggcaaggacttcatgtccaaaacaccaaaagcaatggcaacaaaagccaaaattgacaaatgggatctaattaaactaaagagcttctgcacagcaaaagaaactaccatcagagtgaacaggcaacctacaacatgggagaaaattttcgcaacctactcatctgacaaagggctaatatccagaatctacaatgaactcaaacaaatttacaagaaaaaaacaaacaaccccatcaaaaagtgggcgaaggacgtgaacagacacttctcaaaagaagacatttatgcagccaaaaaacacatgaaaaaatgctcatcatcactggccatcagagaaatgcaaatcaaaaccactatgagatatcatctcacaccagttagaatggcaatcattaaaaagtcaggaaacaacaggaaaatccaagtggaatatggtgtgacaggatcctttaaagataaaccacttgcagagtggctaaggaaatacaatccctctgaagaagaatatgaaaaggcttcagagaactttatctattcctgtgctggatgctgtgtagccacctatgttttaggcatctgtgatcgacacaatgacaatataatgcttcgaagcacgggacacatgtttcacattgactttggaaagtttttgggacatgcacagatgtttggcagcttcaaaagggatcgggctccttttgtgctgacctctgatatggcatatgtcattaatgggggtgaaaagcccaccattcgttttcagttgtttgtggacctctgctgtcaggcctacaacttgataagaaagcagacaaacctttttcttaacctcctttcactgatgattccttcagggttaccagaacttacaagtattcaagatttgaaatacgttagagatgcacttcaaccccaaactacagacgcagaagctacaattttctttactaggcttattgaatcaagtttgggaagcattgccacaaagtttaacttcttcattcacaaccttgctcagcttcgtttttctggtcttccttctaatgatgagcccatcctttcattttcacctaaaacatactcctttagacaagatggtcgaatcaaggaagtctctgtttttacatatcataagaaatacaacccagataaacattatatttatgtagtccgaattttgagggaaggacagattgaaccatcatttgtcttccgaacatttgacgaatttcaggaacttcacaataagctcagtattatttttccactttggaagttaccaggctttcctaataggatggttctaggaagaacacacataaaagatgtagcagccaaaaggaaaattgagttaaacagttacttacagagtttgatgaatgcttcaacggatgtagcagagtgtgatcttgtttgtactttcttccaccctttacttcgtgatgagaaagctgaagggatagctaggtctgcagatgcaggttccttcagtcctactccaggccaaataggaggagctgtgaaattatccatctcttaccgaaatggtactcttttcatcatggtgatgcatatcaaagatcttgttactgaagatggagctgacccaaatccatatgtcaaaacatacctacttccagataaccacaaaacatccaaacgtaaaaccaaaatttcacgaaaaacgaggaatccgacattcaatgaaatgcttgtatacagtggatatagcaaagaaaccctaagacagcgagaacttcaactaagtgtactcagtgcagaatctctgcgggagaattttttcttgggtggagtaaccctgcctttgaaagatttcaacttgagcaaagagacggttaaatggtatcagctgactgcggcaacatacttgtaa

SEQ ID NO: 118069 - DNA, 5076 bp, Homo sapiens
atggctcagttccatgtctctcatcctccagcagagtggcccagacatgttctcctgctgatggcagacagcaagaatgagcttcagaatatgaatacaggccagacctgtgggacaagacagaccctgaagtcaaagctgcagggttggaacaagccagggattcagtctgatcctggaagtcaggggcatcccaggtgcctgaagacctttcctcttgttgctcaatctagcacacaggaaagaaatcatgtcatggaaaaggcagttttgaagagtcagaattgggctataattgaagagttcattaccaagatcggttggttccctgattacagtggcaaggtgaaatatttatcctctccaaaaagctcctgcacaactgttctccaagtcacccacttctcactcttttttcatccgaacccggatgagcttgtcagcaaaattaaagtgtggtctaagcatcgtctgtatcagaacaattcagaggctttcttagaagtgcagattccagagcccaaatgtgaggtgtacagcatgagaacaatgggaagaagacagccggggactgctatggacctgaatgcagggggctccatctgcaatgtcccacgcaccttactgcatctcacaggggaatccacttttcgtgataggcagagggtaggggcttatcttgacattcggggttggtatatcttggttttggtggttgataaagaaaaactggggattcctggacagaaacagaattcttccaagatcctctttgggtcagagaagctgaaacagtgggtctatgtgaagaatcatgcaaaggagtcaattacacaagaagcaatgggaatctgggtagggcagcagaggaagagacagcctttaggatatgaagaacgaaaactaacaaacaggaaggacatccacatcaaaaacccatctgtatgtcaccatcatcaaagaccaaaggtagataaaaccacaaagatggggaaaaaacagagcagaaaaactggaaactctaaaaatcagagcacatctcctactctaaaggaaagcagctcctcaccagcaacagaacaaagctggacagagaatgactttgacgagttgagagaagaaggcttcagaagatcagactactccgagctacaggaggaagttcaaaacaatggcaaagaagttaaaaactttggaaaaaaattagatgaatggataactagaataaccaatgcaaagaagtccttaaaggacctgatggagctgaaaaccaaggcacgagaactatgtgatgaacgcacaagcctcagtagccaatgcaatcaactggaagaaagggtatcagtgatggaagatgaaatgaatgaaataaagcaagaagagaagtttagagaaaaaagaataaaaagaaacgaacaaagcctccaagaaatatgggactatatgaaaagaccaaatctacgtctgattggtgtacctgaaagtgacggggagaatggaaccaagttggaaaacactctgcaggatattatccaggagaacttccccaatctagcaaggcaggccaacattcaaattcaggaaatacagagaacgccacaaagatactccttgagaagagcaaccccaagacacataattgtcagattcaccaaagttgaaatgaaggaaaaaatgttaagggtagccagagagaagggtcgggttacccacaaagggaagcctgtcagactaacagctgatctcttggcagaaactctacaagccagaagacaagacacacataggctcaaaataaagggatggaggaagatttaccaagcaaatggaaaacagaaaaaggcaggggttgcaatcctagtctcagataaaacagaatttaaaccaacaaagatcaaaagagacaaagaaggccattacataatggtaaagggatcaattcaacaagaagagctaactatcctaaatatatatgcacccaatacaggagcacccagattcacaaagcaagtccttagagacctacaaagagacttagactccaacacaataataacgggagactttaacaccccactgtcaacattagacagatcaatgagacagaaagttaacaaggatatccaggaattgaactcagctctgcaccaagcagacctaatagacatctacagaactctccaccccaaatcaacagaaaatacattcttttcggcaccacaccacacctattccaaaattgaccacatagtgggaagtaaagcactcctcagcaaatgtaaaagaaaagaaattataacaaactgtctctcagaccacagtgcaatcaaactagaactcaggattaagaaactccctcaaaactgctcaactatatggaaactgaacaacctgctcctgaatgactactgggtacataacgaaatgaaggcagaaataaagatgttgtttgaaaccaatgagaacaaagacacaacataccagaatctctgggacacattgaaagcagtgtgtagagggaaatttatagcactaaatgcccacgggagaaaacaggaaagatctaaaattgacaccctaacatcacaattaaaagaactagcaaagcaagagcaaacacattcaaaagctagcagaaggcaagaaataactaagatcagagcagaactgaaggaaatagagacacaaaaaacccttcaaaaaattaatgaatccaggagctggtttttaccactagcaagactaataaagaagaaaacagagaagaatcaaatagacgcaataaaaaatgacaaaggggatatcaccaccaatcccacagacatacaaactgccatcagagaatactataaacacctctatgcaaataaactagaaaatctagaagaaatggataaactcctcaacacatataccatcccaagactaaaccaggaagaagttgaacctcggaatagaccaataacaggctctgaaattgaggcaataatcaatagattaccaaccaaaaaatgtccaggaccagatggattcacagccgaattctaccagaggtacaagcaggtaccattccttctgaaactattccaatcaacagaaaaagggggaatcctccctaagtcattttatgaggccagcatcatcctgataccaaagcctggcaaagacacaacaaaaaaagagaattttagaccaatatccctgatgaacattgatgtaaaaatcctcaataaaatactggcaaagcaaatccagcagcacatcaaaaagcttatccaccatgatcaagtgggcttcatccctgggatgcaacgctggttcaacatacgcaaatcaataaatgtaatccagcatataaacagaaccaaagacaaaaaccgcatgattatctcaatagatgcagaaaaggcctttgacaaaattcaacaacgcttcatgctaaaaactctcaataaattaggtattgatgggacgtatctcaaaacaataagagctatctatgacaaacccacagccaatatcatactgaatgggcaaaaactggaagcattccctttgaaaactggcacaagacagggatgccctctctcaccactcctattcaacatggtgttggaagttctggccagggcaattagtcaggagaaggaaataaaggatattcaattaggaaaagaggaagtcaaattgtccctgtttgcagatgacatgattgtatatctagaaaaccccattgtctcagcccaaaatcgccttaagctgataagcaacttcagaaaagtctcaggatacaaaatcaatgtacagaaatcacaagcattcttatacaccaataacagccaaacagagagccaaatcatgagtgaactcccgttcacaactgcttcaaagagaataaaatacctaggaatccaacttacaagggatgtgaaggacctcttcaaggagaactacaaaccactgctcagtgaaataaaagaggatacaaacaaatgcaagaacgttccatgctcatgggtaggaagaatcaatatcatgaaaatggccatactgcccaaggtaatttatagattcaatgccatccccatcaagctaccaatgactttcttcacagaattggaaaaaactactttaaagttcatatggaaccaaaaaagagcctgcatagccaagtcaatcctaagccaaaagaacaaagctggaggcatcacgctacctgacttcaaactatactacaaggccacagtaaccaaaacaacatggtactggtaccaacacagagctgtagaccaatggaacagaacagggccctcagaaataatgccgcatatctacaactatctgatctttgacaaacctgacaaaaacaagcaatggggaaaggattccctatttaataaatggtgctgggaaaactggctagccatatgtagaaagctgaaactgaatcccttccttacaccttatacaaaaattaattcaagatggattaaagacttacatgttagacctaaaaccataaaaaccttagaagaaaacctaggcaataccattcaggtcataggcatgggcaaggacttcatgtctaaaacaccaaaagcaatggcaacaaaagccaaaattgacaaatgggatctaattaaactaaagagtttctgcacagcaaaagaatctaccatcagagtgaacaggcaacctacagaatgggagaaaatttttgcaacctactcatctgacaaagggcaaatatccagaatctacaatgaactcaaacaaatttacaagaaaaaaacaaacaaccccatcaaaaagtgggcaaaggataggaacagacacttctcagaagaagacatttatgcagccaaaaaacacatgaaaaaatgctcaccatcactggccatcagagaagtgcaaatcaaaaccacaatgagataccatctcacaccagttagaatggcgatcattaaaaagtcaggaaccaacagggaagccagctgccatgtcatgaggacactcaagcagcccatgttggaagaactgaggcgctatggagaggcctatgctaagaagaactga

SEQ ID NO: 118070 - DNA, 3300 bp, Homo sapiens
atgaaaaatgataaaggggatatcaccactgatcccacagaaatacaaactaccttcagagaatactacaaacacctctatgcaaataaactagaaaatctagaagaaatggataaattcctcgatacatacagtctcccaagactaaaccaggaagaagttgaatctctgaatagaccaataacgggagctgaaattgtggcaataatcaatagtttaccaaccaaaaagagtccaggaccagatggattcacagccgaattctaccagaggtacaaggaggaactgaattttagaccaatatccttgatgaacattgatgcaaaaatcctcaataaaatactggcaaaccgaatccagcagcacatcaaaaagcttatccaccatgatcaagtgggcttcatccctgggatgcaaggctggttcaatatacgcaaatcaataaatgtaatccagcatataaacagagccaaagacaaaaaccacatgattatctcaatagatgcagaaaaagcctttgacaaaattcaacaacccttcatgctaaaaactctcaataaattaggtattgatgggacgtatttcaaaataataagagctatctatgacaaacccacagccaatatcatactgaatgggcaaaaactggaagcattccctttgaaaactggcacaagacagggatgccctctctcaccactcctattcaacatagtgttggaagttctggccagggcaaataggcaggagaaggaaataaagggtattcaattaggaaaagaggaagtcaaattgtccctctttgcagatgacatgattgtatatctagaaaaccccattgtctcagcccaaaatctccttaagctgataagcaacttcagcaaagtctcaggatacaaaatcaatgtacaaaaatcacaagcattcttatacaccaataacagacaaacagagagccaaatcatgagtgaactcccattcacaattgcttcaaagagaataagatacctaggaatccaacttacaagggatgtgaaggacctcttcaaggagaactacaaaccactgctcaaggaaataaaagaggatacaaacaaatggaagaacattccatgctcatgggtaggaagaatcaatatcgtgaaaatggccatactgcccaaggtaatttacagattcaatgccatccccatcaagctaccaatgactttcttcacagaattggaaaaaactactttcaagttcatgtggaaccaaaaaagagcctgcatggccaaggcaatcctaagccaaaagaacaaagctggaggcatcacactacctgacttcaaactatactacaaggctacagtaaccaaaacagcatggtactggtaccaaaacagagatatagatcaatggaacagaacagagccctcagaaataacgccgcatatctacaactatctgatctttgacaaacctgagaaaaacaagcaatggggaaaggattccctatttaataaatggtgctgggaaaactggctagccatatgtagaaagctgaaactggatcccttccttacaccttacacaaaaatcaattcaagatggattaaagacttaaacgttagacctaaaaccataaaaaccctagaagaaaacctaggcattaccattcaggacataggcatgggcaaggacttcatgtctaaaacaccaaaagcaatggcaacaaaagacaaaattgacaaatgggatctaattaaactaaagagcttctgcacagccaaagaaactaccatcagagtgaacaggcaacctacaaaatgggaaaaaattttcgcaacctactcatctgacaaagggctaatatccagaatctacaatgaactcaaacaaatttacaagaaaaaaacaaacaaccccatcaaaaagtgggcaaaggacatgaacagacacttctcaaaagaagacatttatgcagccaaaaaacacatgaaaaaatgctcatcatcactggccatcagagaaatgcaaatcaaaaccacaattagataccatctcacaccagttagaatggcaagcattaaaaagtcaggaaacaacagtctcgtttctgatgcccccaacatactccatcagaaaaatcaatctgaacttcagctgaggacagagttaaagctttccctaggatcatgtgtggttggattgggggttgaagtctttctttcagagcaaggcactattaccatgaggactatgctaagaatgtatgagagaaagcaagagagagctgtctcagacaacctctcattcccatctggatctcccactgaacaagaatacgataagtgcatggattctacgtgtttccagtccttgagcagtgattgctcatggccagtgcacaaagtggctttggattgtttggctcccgagcagtctgacaacaaccagagaaggcttggagcatgggcccagaatgtcaggatacccaagagagtggaggaagaattgggagaactaaatataggcctcctttggcctaagcatgcaactgctgcaaaggttactctgatggagcccatcaatgttgatgtgagggaaagaggggcatctatattccactgctggcttgagctgggtcctgaacactgtcctttcctggtcttgctggcgaaggcatcctgtgccagcaggcagcttcattgccttcctctcctctccgagcccctacgtagccatcctgcttatcaggtgcacacagttctggtcagcagccttgcccatgaagtcatgcctgtggctccactgagaaattcgattaagtattccaatactgctgtgaaacgaagtgatctgattccggtgcacaggagagagggtgcgtgcacctttgtacagtggagaagcacacacctgcttcctgcaccccctggtgtctctcagaaccaccagccagaggagagggtaccgggaagcaaatgggggctaggtttgacaaacgctggatgcctgtgttcagtgatggtggacatcaatggtggaaggcttccaaccttcatgcgacaagcagaccaagcactgggtttaacagttgaagatgagaagctacaaggcaagcaaaaaccagcagccaaggttaatggtcagaattcatgctgtggagtgaacagcccatcacagtctgaggcattaccatggaggatgagctttagggaacaatgggataaagacagaccagacaggacaggccgtccagaacactgcccagaaaaattcccaccacctctgccagctcctaaactgcccgtgtag

SEQ ID NO: 118071 - DNA, 3543 bp, Homo sapiens
atggagctgaaaaccaaggctcgagaactacgtgaagaatgcagaagccttaggagccgatgcgatcaactggaagaaagggtatcagcaatggaagatgaaatgaatgaaatgaagcgagaagggaagtttagagaaaaaagaataaaaagaaatgagcaaagcctccaagaaatatgggactatgtgaaaagaccaaatctacgtctgattggtgtacctgaaagtgatgtggagaatggaaccaagttggaaaacactctgcaggatattatccaggagaacttccccaatctagcaaggcaggccaacattcagattcaggaaatacagagaacgccacaaagatactccttgagaagagcaactccaagacacataattgtcagattcaccaaagttgaaatgaaggaaaaaatgttaagggcagccagagagaaagacagatcaacgagacagaaagtcaacaaggatacccaggaattgaactcagctctgcaccaagcggacctaatagacatctacagaactctccaccccaaatcaacagaatatacatttttttcagcaccacaccacacctattccaaaactgaccacatagttggaagtaaagctctcctcagcaaatgtaaaagaacagaaattataacaaactatctctcagaccacagtgcaatcaaactagaactcaggattaagaatctcactaaaagccgctcaactacatggaaactgaacaacctgctcctgaatgactactgggtacataacgaaatgaaggcagaaataaagatgttctttgaaaccaacgagaacaaagacaccacataccagaatctctgggacgcattcaaagcagtgtgtagagggaaatttatagcactaaatgcctacaagagaaagcaggaaagatccaaaattgacaccctaacatcacaattaaaagaactagaaaagcaagagcaaacacattcaaaagctagcagaaggcaagaaataactaaaatcagagcagaactgaaggaaatagagacacaaaaaacccttcaaaaaatcaatgaatccaggagctggttttttgaaaggatcaacaaaattgatagaccgctagcaagactaatgaagaaaaaaagagagaagaatcaaatagacacaataaaaaatgataaaggggatatcaccaccaatcccacagaaatacaaactaccatcagagaatactacaaacacctctatgcaaataaactagcaaatctagaagaaatggatacattcctcgacacatacactctcccaagactaaaccaggaagaagttgaatctctgaatagaccaataacaggatctgaaattgtggcaataatcaatagtttaccaaccaaaaagagtccaggaccagatggattcacagccgaattctaccagaggtacaaggaggaactgccgggcagagacacaaccaaaaaagagaattttagaccaatatccttgatgaacattgatgcaaaaatcctcaataaaatactggcaaaccgaatccagcagcacatcaaaaagcttatccgccatgatcaagtgggcttcatccctgggatgcaaggctggttcaatatacgcaaatcaataaatgtaatccagcatataaacagagccaaagacaaaaaccacatgattatctcaatagatgcagaaaaagcctttgacaaaattcaacaacccttcatgctaaaaactctcaataaattaggtattgatgggacgtatttcaaaataataagagctatctatgacaaacccacagccaatatcatactgaatgggcaaaaactggaagcattccctttgaaaactggcacaagacagggatgtcctctctcaccgctcctattcaacatagtgttggaagttctggccagggcaatcaggcaggagaaggaaataaagggtattcaattaggaaaagaggaagtcaaattgtccctgtttgcagacgacatgattgtttatctagaaaaccccattgtctcagcccaaaatctccttaagctgataagcaacttcagcaaagtctcaggatacaaaatcaatgtacaaaaatcacaagcattcttatacaccaacaacagacaaacagagagccaaatcataagtgaactcccattcacaattgcttcaaagagaataaaatacctaggaatccaacttacaagggatgtgaaggacctcttcaaggagaactacaaaccactgctcaaggaaataaaagaggacacaaacaaatggaagaacattccatgctcatgggtaggaagaatcaatatcgtgaaaatggccatactgcccaaggtaatttacagattcaatgccatccccatcaagctaccaatgactttcttcacagaattggaaaaaactactttaaagttcatatggaaccaaaaaagagcccgcatcgccaagtcaatcctaagccaaaagaacaaagctggaggcatcacactacctgacttcaaactatactacaaggctacagtaaccaaaacagcatggtactggtaccaaaacagagatatagatcaatggaacagaacagagccctcagaaataatgccgcatatctacaactatctgatctttgacaaacctgagaaaaacaagcaatggggaaaggattccctatttaataaatggtgctgggaaaactggctagccatatgtagaaagctgaaactggatcccttccttacaccttatacaaaaatcaattcaagatggattaaagatttaaacgttagacctaaaaccataaaaaccctagaagaaaacctaggcattaccattcaggacataggcgtgggcaaggacttcatgtccaaaacaccaaaagcaatggcaacaaaagccaaaattgacaaatgggatctaattaaactaaagagcttctgcacagcaaaagaaactaccatcagagtgaacaggcaacctacaacatgggagaaaattttcgcaacctactcatctgacaaagggctaatatccagaatctacaatgaactcaaacaaatttacaagaaaaaaacaaacaaccccatcaaaaagtgggtgaaggacatgaacagacacttctcaaaagaagacatttatgcagccaaaaaacacatgaaaaaatgctcatcatcactggccatcagagaaatgcaaatcaaaaccactatgagatatcatctcacaccagttagaatggcaatcattaaaaagtcaggaaacaacaggatgcagagccacaaaaactttccaacaatcgctgatgggactgcaaaaggtagagacactatggaaaacagggtagcagtttctcataaaggtgtacatggaagaggaacatggcatacaagtcaagaggacctgctcaaagatgttggctgcttcaagcagtacacagccgaactgggtcctgttacaactgcagctgcttcccatatctacgggatccccattggtgtggtgctgaccgcctggaagtcctgcagggactcctaa

SEQ ID NO: 118072 - DNA, 3291 bp, Homo sapiens; identical to SEQ ID NO: 116410

SEQ ID NO: 118073 - DNA, 3693 bp, Homo sapiens
atggggaaaaaacaggacagaaaaactggaaactgtaaaacgcagagcgcctctcctcctccaaaggaacgcagttcctcaccagcaacggaacaaagctggatggagaatgactttgacgagctgagagaagaaggcttcagacgatcaaattactctgagctacgggaggacattcaaacgaaaggcaaagaagttgaaaactttgaaaaaaatttagaagaatgtataactagaagaaccaatacagagaagtgcttaaaggagctgatggagctgaaaaccaaggctcgagaactacaaatatgggactatgtgaaaagaccaaatctacgtctgattggtgtacctgaaagtgatgcggagaatggaaccaagttggaaaacactctacaggatattatccaggagaacttccccaatctagcaaggcaggccaacgttcagattcaggaaatacagagaacgccacaaagatactcctcgagaagagcaactccaagacacataattgtcagattcaccaaagttgaaatgaaggaaaaaatgttaagggcagccagagagaaaggtcgggttaccctcaaagggaagcccatcagactaacagcggatctctcggcagaaaccctacaagctagaagagagtgggggccaatattcaacattcttaaagaaaagaattttcaacccagaatttcatatccagccaaactaagcttcataagtgaaggagaaataaaatactttacagacaagcaaatgctgagagattttgtcaccaccaggcctgccctaaaagagctcctgaaggaagcgctaagcatggaaaggaacaaccgacagatcaacgagacagaaagtcaacaaggatacccaggaattgaattcagctctgcaccaagcggacctaatagacatctacagaactctccaccccaaatcaacagaatatacattttttcagcaccacaccacacctattccaaaattgaccacatagttggaagtaaagctctcctcagcaaatgtaaaagaacagaaattataacaaactatctctcagaccacagtgcaatcaaactagaactcaggattaagaatttcactcaaagccgctcaactacatggaaactgaacaacctgctcctgaatgactactgggtacataacgaaatgaatgcagaaataaagatgttctttgaaaccaacgagaacaaagacacaacataccagaatctctgggacgcattcaaagcagtgtgtagagggaaatttatagcactaaatgcccacaagagaaagcaggaaagatccaaaattgacaccctaacatcacaattaaaagaactagaaaagcaagagcaaacacattcaaaagctagcagaaggcaagaaataactaaaatcagagcagaactgaaggaaatagagacacaaaaaacccttcaaaaaattaatgaatccaggagctggttttttgaaaggatcaccaaaagtgataggccgctagcaagactaataaagaaaaaaagagagaagaatcaaatagacacaataaaaaatgataaaggggatatcaccactgatcccacagaaatacaaactaccatcagagaatactacaaacaactctatgcaaataaactagaaaatctagaagaaatgaataaattcctcgacacatacactctcccaagactaaaccaggaagaagttgaatctctgaatagaccaataacaggatctgaaattgtggcaataatcaatagtttaccaaccaaaaagagtccaggaccagatggattcacagccgaattctaccagaggtacaaggaggaactggtaccattccttctgaaactattccaatcaatagaaaaagagggaatcctccctaactcattttatgaggccagcatcattctgataccaaagccgggcagagacacaaccaaaaaagagaattttagaccaatatccttgatgaacattgatgcaaaaatcctcaataaaatactggcaaaccgaatccagcagcacatcaaaaagcttatccaccatgatcaagtgggcttcatccctgggatgcaaggctggttcaatatacgcaaatcaataaatgtaatccagcatataaacagagccaaagacaaaaaccacatgattatctcaatagatgcagaaaaagcctttgacaaaattcaacaacccttcatgctaaaaactctcaataaattaggtactgatgggacatatctcaaaataataagagctatctatgacaaacccacagccaatatcatactgaatgggcaaaaactggaagcattccctttgaaaactggcacaagacagggatgccctctctcaccgctcctattcaacatagtgttggaagttctggccagggcaatcaggcaggagaaggaaataaagggtattcaattaggaaaagaggaagtcaaattgtccctgtttgcagacgacatgattgtttatctagaaaaccccattgtctcagcccaaaatctccttaagctgataagcaacttcagcaaagtctcaggatacaaaatcaatgtacaaaaatcacaagcattcttatacaccaacaacagacaaacagagagccaaatcatgagtgaactcccattcacaattgcttcaaagagaataaaatacctaggaatccaacttacaagggatgtgaaggacctcttcaaggagaactacaaaccactgctcacggaaataaaagaggatacaaacaaatggaagaacattccatgctcatgggtaggaagaatcaatatcgtgaaaacggccatactgcccaaggtaatttatagagtcaatgccatccccatcaagctaccaatgactgtcttcacagaattggaaaaaactactttaaagttcatatggaaccaaaaaagagcccgcattgccaagtcaatcctaagccaaaagaacaaagctggaggcatcacactacctgacttcaaactatactacaaggctacagtaaccaaaacagcatggtactggtaccaaaacagagatatagatcaatggaacagaacagagccctcagaaataacgccgcatacctacaactatctgatctttgacaaacctgagaaaaacaagcaatggggaaaggattccctatttaataaatggtgctgggaaaactggctagccatatgtagaaagctgaaactggatcccttccttacaccttatacaaaaatcaattcaagatggattaaagatttaaacgttagacctaaaaccataaaaaccctagaagaaaacctaggcattaccattcaggacataggcatgggcaaggacttcatgtccaaaacaccaaaagcaatggcaacaaaagctaaaattgacaaatgggatctaattaaactaaagagcttctgcacagcaaaagaaactaccatcagagtgaacagatgttcaaaaggaattccaaagagtgaaagaagaaattatcttgccacagcttgtgaagatattttgggtcaaaaactttgtaaccaaggaaaagaaagaaaggaagaaaggaagaaggaaagaaggagagaaagagaaggaaaagagagagagagagagagaaagaaaaagaaaggaaggaaggaaggagagaaagagaaagaaagaaaggtgaagaag

SEQ ID NO: 118074 - DNA, 3765 bp, Homo sapiens
atgagacagaaagtcaacaaggatacccaggaattgaactcagctctgcaccaagcagacctaatagacatctacagaactctccacccgaaatcaacagaatatacatttttttcagcaccacaccacacctattccaaaattgaccacatagttggaagtaaagctctcctcagcaaatgtaaaataacagaaattataacaaactatctctcagaccacagtgcaatcaaactagaactcaggattaagaatcccactcaaagccgctcaactacatggaaactgaacaacctgcccctgaatgactactgggtacataacgaaatgaaggcagaaataaagatgttctttgaaaccaacgagaacaaagacacaacataccagaatctctgggacacattcaaagcagtgtgtagagggaaatttatagcactaaatgcccacaagagaaagcaggaaagatccaaaattgacaccctagcatcacaattaaaagaactagaaaagcaagagcaaacacattcaaaagctagcaggaggcaagaaataactaaaatcagagcagaactgaaggaaatagagacacaaaaaacccttcaaaaaatcaatgaatccaggagctggttttttgaaaggatcaacaaaattgatagaccgctagcaagactaataaagaaaaaaagagagaagaatcaaatagacacgataaaaaatgataaaggggatatcaccactgatcccacagaaatacaaactagcatcagagaatactacaaacacctctacgcaaataaactagaaaatctagaagaaatggataaattcctcgacacatacaccctcccaagactaaaccaggaagaagttgaatctctgaatagaccaataacaggagctgaagttgtggcaataatcaatagtttaccaaccaaaaagagtccaggaccagagaattttagaccaatatccttgatgaacattgatgcaaaaatcctcaataaaatactgggagccaaagacaaaaaccacatgattatctcaatagatgcagaaaaagcctttgacaaaattcaacaacccttcatgctaaaaactctcaataaattaggtattgatgggacgtatttcaaaataataagagctatctatgaccaacccacagccaatatcatactgaatgggcaaaaactggaagcattccctttgaaaactggcacaagacagggatgccctctctcaccactcctattcaacatagtgttggaagttctggccagggcaattaggcaggagaaggaaataaagagtattcaattaggaaaagaggaagcgaaattgtccctgtttgcagacaaaatgattgtatatctagaaaaccccattgtctcagcccaaaatctccttaagctgataagcaacttcagcaaagtctcaggatacaaaatcaatgtacaaaaatcacaagcattcttatacaccaacaacagacaaacagagagccaaatcatgagtgaactcccattcacaattgcttcaaagagaataaaatacctaggaatccaacttacaagggatgtgaaggacctcttcaagcagaactacaaaccactgctcaaggaaataaaagaggatacaaacaaatggaagaatattccatgctcatgggtaggaagaatcaatatcgtgaaaatggccatactgcccaaggtaatttacagattcaatgccatccccatcaagctaccaatgcctttcttcacagaattggaaaaaactactttaaagttcatatggaaccaaaaaagagcccgcatcgccaagtcaatcctaagccaaaagaacaaagctggaggcatcacactacctgacttcaaactatactacaaggctacagtaaccaaaacagcatggtactggtaccaaaacagagatatagatcaatggaacagaacagagccctcagaaataatgccgcatatctacagctatctgatctttgacaaacctgagaaaaacaagcaatggggaaaggattccctatttaataaatggtgctgggaaaactggctagccatatgtagaaagctgaaactggatcccttccttacaccttatacaaaaatcaattcaagatggattaaagacttaaacgttagacctaaaaccataaaaaccctagaagaaaacctaggcatcaccattcaggacctaggcatgggcaaggacttcatgtccaaaacaccaaaagcaatggcaacaaaagacacaattgacaaatgggatctaattaaactaaagagcttctgcacagcaaaagaaactaccatcagaatgaacaggcaacctacaaaatgggagaaaattttcacaagctactcatctgacaaagggctaatatccagaatctacaatgaactcaaacaaatttacaagaaaaaaacaaacaaccccatcaaaaaatgtcaacaggcctcacagctgaaggctttacccacccaatcctgctccccctcttctaacagctatgaaaccttcctagtttcaccccttcacccgttccagttttacataagttttcctcactacacagagatggttcctcccttgacacctgaggattacaattcgagaggagattttggtggggacacagagacaaaccatattatttcaaagttccacaggtctctagagcaggtgcaaaatgctgccagtcggaggagccaagatggccgaataggaacagctccggtctacagctcccagcgtgagcgacgcagaagacgggtgatttctgcatttccatctgaggaacgcagttcctcaccagcaatggaacaaagctggatggagaatgactttgaggagctgagagaagaaggcttcagacgatcaaattactctgagctacgggaggacattcaaaccaaaggcaaagaagttgaaaactttgaacaaaatttagaagaatgtataactagaataaccaatacagagaagtgcttaaaggagctgatggagctgaaaaccaaggctcgagaactacgtgaagaatgcagaagcctcaggagccgatgtgatcaactggaagaaaggatatcagtgatggaagatgaaatgaatgaaatgaagcgagaagggaagtttagagaaaaaagaataaaaagaaatgagcaaagcctccaagaaatatgggactatgtgaaaagaccaaatctacgtctgattggtgtacctgaaagtgatggggagaatggaaccaagttggaaaacactctgcagcatattatccaggagaacttccccaatctagcaaggcaggccaacgttcagattcaggaaattcagagaacgccacaaagatactcctcgagaatagcaattccaagacacataattgtcagattcaccaaagttgaaatgaaggaaaaaatgttaagggcagccagagagaaaggtcgggttaccctcaaagggaagcccatcagactaacagcagatctctcggcagaaaccctacaagccagaagagagtgggggccaatattcaacattcttaaagaaaataattttcaacccagaatttcatatccagccaaactaagcttcataagtgaagaagaaataaaataccttacagacaagcaaatggtgagagattttgtcaccaccaggcctgccctaaaagagctcctgaaggaagcactaaacatggaaaggaacaaccggtaccagctgctgcaaaatcatgccaaattctaa

SEQ ID NO: 118075 - DNA, 4794 bp, Homo sapiens
atgggagactttaacaccccactgtcaacattagacagatcaacgagacagaaagtcaacaaggatacccaggaactgaactcagctctgcaccaagcggacctaatagacatctacagaacactccaccccaaatcaacagaatatacatttttttcagcaccacaccacacctattccaaaattgaccacatactgggaagtaaagctctcctcagcaaatgtaaaagagcagaaattataacaaactatctctcagaccacagtgcaatcaaactagaactcaggattaagaatctcactcaaagccgctcaactacatggaaactgaacaacctgctcctgaatgactactgggtaaataacgaaatgaaggcagaaataaagatgttctttgaaaccaaagagaacaaagacacaacataccagaatctctgggacgcattcaaagcagtgtgtagagggaaatttatagcactaaatgcgcacaagagaaagcaggaaagatctaaaattgacaccctaacatcacaattaaaagaactagaaaagcaagagcaaacacattcaaaagctagcagaaggcaagaaataactaaaatcagagcagaactgaaggaaatagagacacaaaaaacccttcaaaaaatcaatgaatccaggagctggttttttgaaaggatcaacaaaattgatagaccgctagcaagactaataaagaaaaaaagagagaagaatcaaatagacacaataaaaaatgataaaggggatatcaccactgatcccacagaaatacaaactaccatcagagaatactacaaacacctctacgcaaataaactagaaaatctagaacaaatggatgcattcctcgacacatacactctcccaagactaaaccaggaagaagttgagtctctgaatagaccaataacaggagctgaaattgtggcaataatcaatagtttaccaaccaaaaagagtccaggaccagatggattcacagccgaattctcccagaggtacaaggaggaactggtaccattccttctgaaactattccaatcaatagaaaaagagggaatcctccctaactcattttatgaggccagcatcattctgataccaaagccaggcagagacacaaccaaaaaagagaattttagaccaatatccttgatgaacatcgatgcaaaaatcctcaataaaatactggcaaaccgaatccagcagcacatcaaaaagcttatccaccatgatcaagtgggcgtcatccctgggatgcaaggctggttcagtatacgcaaatcaataaatgtaatccagcatataaacagagccaaagacaaaaaccatatgattatctcaatagatgcagaaaaagcctttgacaaaattcaacaacccttcatgctaaaaactctcaataaattagcccaaaatctccttaagctgataagcaacttcagcaaagtctcaggatacaaaatcaatgtacaaaaatcacaagcattcctatacaccaacaacagacaaacagagagccaaatcatgagtgaactcccattcacaattgcttcaaagagaataaaatacctaggaatccaacttacaagggatgtgaaggacctcttcaaggagaactacaaaccactgctcaaggaaataaaagaggatacaaacaaatggaagaacattccatgctcatgggtaggaagaatcaatatcgtgaaaatggccatactgccccaggtaatttacagattcaatgccatccccatcaagctaccaatgactttcttcacagaattggaaaaaactactttcaagttcatatggaaccaaaaaagagcccgcatcgccaagtcaatcctaagccaaaagaacaaagctggaggcatcacactacctgacttcaaactatactacaaggctacagtaaccaaaacagcatggtactggtaccaaaacagagatatagatcaatggaacagaacagagccctcagaaataacgccgcttacctacaactatctgatctttgacaaacctgacaaaaacaagcaatggggaaaggattccctatttaataaatggtgctgggaaaactggctagccatatgtagaaagctgaaactggatcccttccttatgccttatacaaaaattaattcaagatggattaaagatttaaacattagacctaaaaccataaaaaccctagaagaaaacctaggcattaccattcaggacataggcatgggcaaggacttcatgtccaaaacaccaaaagcaatggcaacaaaagccaaaattgacaaatgggatctaattaaactaaagagcttctgcacagcaaaagaaactaccatcagagtgaacaggcaacctacaacatgggagaaaattttcgcaacctactcatctgacaaagggctaatagccagaatctacaatgaactcaaacaaatttacaagaaaaaaacaaacaaccccatcaaaaagtgggcgaaggacatgaacagacacttctcaaaagaagacatttatgcagccaaaaaacacatgaagaaatgctcatcatcactggccatcagagaaatgcaaatcaaaaccactatgagatatcatctcacaccagttagaatggcaatcatgaaaaagtcaggaaacaacaggtgctggagaggatgtggagaaataggaacacttttacactgttggtgggactgtaaactagttcaaccattgtggaagtcagtgtggcgattcctcagggatctagaactagaaataccatttgacccagccatcccattactgggtatatacccaaaggactataaatcatgctgctataaagatacatgcacacctctcaagaaacacatcagctttcatctttatcagtatgacactgacatgataggaaatgctgggctggtgattcagcagccatccattttacagtcagaggacaagtcgtacaatggtggaggaataggttcttcaaataggatcatggacttcttggaggagccaatccctggtgtagggacctatgatgatttcaatacaattgattgggtgagagagaagtctcgagaccgggataggcaccgagagggagcctttgcctacatagtcaattatttcatgtacgtcctctgggctctcctatttgccttccttgccgtatctcttgtcaaggtgtttgcgccttatgcctgtggctctggaatccctgagataaaaactatcttgagtggtttcattattaggggctatttgggtaagtggactctggttatcaaaaccatcaccttggtgctggcagtgtcgtctggcttgagcctgggcaaagagggccctctagtgcacgtggcttgctgctgtgggaacatcctgtgccactgcttcaacaaatacaggaagaatgaagccaagcgcagagaggtcttgtcggctgcagcagcagctggtgtatctgtagcctttggagcacctataggtggagtattattcagccttgaagaggtcagctactattttcccctcaaaacattgtggcgttcattctttgctgccttggtggcagcattcactctacgctccatcaatccatttgggaacagccgcctggtactattttatgtggagtttcacaccccatggcatctctttgagctcgtgccattcattctgctgggcatatttggtggtctgtggggagcactgtttatccgcacaaacattgcctggtgtcggaagcgaaagaccacccagttgggcaagtatcctgttatagaggtactcgtcgtgacagccatcactgccatcctggctttccccaatgaatacactcggatgagcacaagtgagctcatttctgagctgtttaatgactgtggccttctggactcctccaagctctgtgattatgagaaccgtttcaacacaagcaaagggggtgaactgcctgacagaccggctggcgtgggagtctacagtgcaatgtggcagctggctttaacactcatactgaaaattgtcattactatattcacctttggcatgaagatcccttctggcctctttatccctagcatggctgttggtgctatagcaggtcgacttctaggagtaggaatggaacagctggcttattaccaccaggaatggaccgtcttcaatagctggtgtagtcagggagctgattgcatcacccccggcctttatgcaatggttggggctgcagcctgcttagccaaagaagagtttgctcataagaccctggcaatggatgtgatgaaaccccggagaaatgatcctttgttgactgtccttactcaggacagtatgactgtggaagatgtagagaccataatcagtgaaaccacttacagtggcttcccagtggtggtatcccgggagtcccaaagacttgtgggctttgtcctccgaagagatctcattatttcaattgaaaatgctcgaaagaaacaggatggggttgttagcacttccatcatttatttcacggagcattctcctccattgccaccatacactccacccactctaaagcttcggaacatcctcgatctcagccccttcactgtgactgaccttacacccatggagatcgtagtggatattttccgaaagctgggactgcggcagtgcctggttacacacaacgggcgattgcttggaatcattaccaaaaaggatgtgttaaagcatatagcacagatggcgaaccaagatcctgattccattctcttcaactag

SEQ ID NO: 118076 - DNA, 3300 bp, Homo sapiens
atgggagactttaacaccccactgtcaacattagacagatcaacgagacagaaagtcaacaaggatacccaggaattgaactcagctctgcaccaagcagacctaatagacatctacagaactctccaacccaaatcaacagaatatacatttttttcagcaccacaccacacctattccaaaattgaccacatagttggaagtaaagctctcctcagcaaatgtaaaagaacagaaattataacaaactatctctcagaccacagtgcaatcaaactagaactcaggattaagaatctcactcaaagccgctcaactacatggaaactgaacaacctgctcctgaatgactactgggtacataacgaaatgaaggcagaaataaagatgttctttgaaaccaacgagaacaaagacacaacataccagaatctctgggacgcattcaaagcagtgtgtagagggaaatttatagcactaaatgcccacaagagaaagcaggaaagatccaaaattgacaccctaacatcacaattaaaagaactagaaaagcaagagcaaacacattcaaaagctagcagaaggcaagaaataactaaaatcagagcagaactgaaggaaatagagacacaaaaaacccttcaaaaaatcaatgaatccaggagctggttttttgaaaggatcaacaaaattgatagaccactagcaagactaataaagaaaaaaagagagaagaatcaaatagacacaataaaaaatgataaaggggatatcaccactgatcccacagaaatacaaactaccatcagagaatactacaaacacctctacgcaaataaactagaaaatctagacgaaatggataaattcctccacacatacactctcccaagactaaaccaggaagaagttgaatctctgaatggaccaataacaggagctgaaattgtggcaataatcgatagtttaccaaccaaaaagagtccaggaccagatggattcacagctgaattctaccagaggtacaaggaggaactggtaccattccttctgaaactattccaatcaatagaaaaagagggaatcctccctaactcattttatgaggccagcatcattctgataccaaagctgggcagagacacaaccaaaaaagagaattttagaccactatccttgatgaacattgatgcaaaaatcctcaataaaatactggcaaaacgaatccagcagcacatcaaaaagcttatccaccatgatcaagtgggcttcatccctgggatgcaaggctggttcaatatacgcaaatcaataaatgtaatccagcatataaacagaggcaaagacaaaaaccacatgattatctcaatagatgcagaaaaagcctttgacaaaattcaacaacccttcatgctaaaaactctcaataaattaggtattgatgggacgtatttcaaaataataagagctatctatgacaaacccacagccaatatcatactgaatgggcaaaaactggaagcattccctttgaaaactggcacaagacagggatgccctctctcaccactcctattcaacatagtgttggaagttctggccagggcaattaggcaggagaaggaaataaagctgataagcaacttcagcaaagtctcaggatacaaaatcaatgtacaaaaatcacaagcattcttatacaccaacaacagacaaacagagagccaaatcatgagtcaactcccattcacaattgcttcaaagagaataaaatacctaggaatccaacttacaagggatgtgaaggacctcttcaaggagaactacaaaccactgctcaaggaaataaaagaggatacaaacaaatggaagaacattccatgctcatgggtaggaagaatcaatatcatgaaaatggccatactgcccaaggtaatttacagattcaatgccatccccatcaagctaccaatgactttcttcacagaattggaaaaaactactttcaagttcatatggaaccaaaaaagagcctgcatcaccaagtcaatcctaagccaaaagaacaaagctggaggcatcacgctacctgacttcaaactatactacaaggctacagtaaccaaaacagcatggtactggtaccaaaacagagatatagatcaatggaacagaacagagccctcagaaataatgctgcatatctacaactatctgatctttgacaaacctgagaaaaacaagcaatggggaaaggattccctatttaataaatggtgctgggaaaactggctagccatatgtagaaagctgaaactggatcccttccttacaccttatacaaaaatcaattcaagatggattaaagatttaaacgttagacctaaaaccataaaaaccctagaagaaaacctaggcattaccattcaggacataggcatgggcaaggacttcatgtccaaaacaccaaaagcaatggcaacaaaagccaaaattgacaaatgggatctaattaaactaaagagcttctgcacagcaaaagaaactaccatcagagtgaacaggcaacctacaaaatgggagaaaattttcgcaacctactcatctgacaaagggctaatatccagaatctacaatgaactcaaacaaatttacaagaaaaaaacaaacaaccccatcaaaaagtgggcgaaggacatgaacagacacttctcaaaagaagacatttatgcagccaagaaacacatgaaaaaatgctcatcatcactggccatcagagaaatgcaaatcaaaaccacaatgagataccatctcacaccagttagaatggcaatcattaaaaagtcaggaaacaacaggtgctggagaggatgtggagaaataggaacacttttacactgttggtgggactgtaaactagttcaaccattgtggaagtcagtgtggcgattcctcagggatctagaactagaaataccatttgacccagccatcccattactgggtatatacccaaaggactataaatcatgctgctataaagacacatgcacacgtatgtttattgcggcattattcacaatagcaaagacttggaaccaacccaaatgtccaacaatgatagactggattaagaaaatgtggcacatatacaccatggaatactatgcagccataaaaaatgatgagttcatgtcctttgtagggacatggatgaaattggaaatcatcattctcagtaaactatcacaagaacaaaaaaccaaacacggcatattctcactcataggtgggaattga

SEQ ID NO: 118077 - DNA, 5175 bp, Homo sapiens
atggtaaagggatcaattcaacaagaggagctaactatcctaaatatttatgcacccaatacaggagcacccagattcataaagcaagtcctgagtgacctacaaagagacttagactcccacacattaataatgggagactttaacaccccactgtcaacattagacagatcaacgagacagaaagtcaacaaggatacccaggaattgaactcagctctgcaccaagcagacctaatagacatctacagaactctccaccccaaatcaacagaatatacatttttttcagcaccacaccacacctattccaaaattgaccacatacttggaagtaaagctctcctcagcaaatgtaaaagaatagaaattataacaaactatctctcagaccacagtgcaatcaaactagaactcaggattaagaatctcactcaaagccgctcaactacatggaaactgaacaacctgctcctgaatgactactgggtacataacgaaatgaagacagaaataaagatgttctttgaaaccaacgagaacaaagacaccacataccagaatctctgggacgcattcaaagcagtgtgtagagggaaatttatagcactaaatgcctacaagagaaaggaggaaagatccaaaattgacaccctaacatcacaattaaaagaactagaaaagcaagagcaaagacattcaaaacctagcagaaggcaagaaataactaaaatgagagcagaactgaaggaaatagagacacaaaaaacccttcaaaaaatcaatgaatccagtagctggttttttgaaaggatcaacaaaattgatagaccgctagccagactaataaagaaaaaaagagagaagaatcaaatagacacaataaaaaatgataaaggggatatcaccaccgatcccacagaaatacaaactaccatcagagaatactacaaacacctctacacaaataaactagaaaatctagaagaaatggatacattcctcgacacatacactctcccaagactaaaccaggaagaagttgaatctctgaatagaccaataacaggctctgaaattgtggcaataaccaatagcttaccaaccaaaaagagtccaggaccagaaggattcacagccgaattctaccagaggtacaaggaggaattggtaccattccttctgaaactattccaatcaatagaaaaagagggaatcctccctaactcattttatgaagccagcatcattctgataccaaagccgggcagagacacaaccaaaaaagagaattttagaccaatatccttgataaacattgatgcaaaaatcctcaataaaatactggcaaaccgaatccagcagcacatccaaaagcttatccaccatgatcaagtgggcttcatccctgggatgcaaggctggttcaatatacgcaaatcaataaatgtaatccagcatataaacagagccaaagacaaaaaccacatgattatctcaatagatgcagaaaaagcctttgacaaaattcaacaacgcttcatgctaaaaactctcaataaattaggtattgatgggacgtatttcaaaataataagagctatctatgacaaacccacagccaatatcatactgaatgggcaaaaactggaagcattccctttcaaaactggcacaagacagggatgccctctctcaccactcctattcaacatagtgttggaagttctggccagggcaatcaggcaggagaaggaaataaagggtattcaattaggaaaagaggaagtcaaattgtccctgtttgcagacgacatgattgtttatctagaaaaccccatcgtctcagcccaaaatctccttaagctgataagcaacttcagcaaagtctcaggatacaaaatcaatgtacaaaaatcacaagcattcttatacaccaacaacagacaaacagagagccaaatcatgagtgaactcccattcacaattgcttcaaagagaataaaatacctaggaatccaatttacaagggatgtgaaggacctcttcaaggagaactacaaaccactgctcaaggaaataaaagaggacacaaacaaatggaagaacattccatgctcacgggtaggaagaatcaatatcgtgaaaatggccatactgcccaaggtaatttacagattcaatgccatccccatcaagctaccaatgactttcttcacagaattggaaaaaactactttaaagttcatatggaaccaaaatagagcccgcatcgccaagtcaatcctaagccaaaagaacaaagctggaggcatcacactacctgacttcaaactatactacaaggctacagtaaccaaaacagcatggtactggtaccaaaacagagatatagatcaatggaacagaacagagccctcagaaataatgccgcatatctacaactgtctgatctttgacaaacctgagaaaaacaagcaatggggaaaggattccctatttaacaaatggtgctgggaaaactggctagccatatgtagaaagctgaaactggatcccttccttacaccttataccaaaatcaattcaagatggattaaagatttaaacgttagacctaaaaccataaaaaccctagaagaaaacctaggcattaccattcaggacataggcgtgggcaaggacttcatgtccaaaacaccaaaagcaatggcaacaaaagccaaaattgacaaatgggatctaattaaactaaagagcttctgcacagcaaaagaaactaccatcagagtgaacaggcaacctacaacatgggagaaaattttcgcaacctactcatctgacaaagggctaatatccagaatctacaatgaactcaaacaaatttacaagaaaaaaacaaataaccccatcaaaacgtgggcgaaggacatgaacagacacttctcaaaagaagacatttatgcagccaaaaaacacatgaagaaatgctcatcatcactggccatcagagaaatgcaaatcaaaaccactatgagatatcatctcacaccagttagaatggcaatcattaaaaagtcaggaaacaacaggtggaatattggtggacttgtccccaagttaaattatgatttaaagagacacttagaaaaagaggaaaagcctactaaaactgagcaggctatcagcaaagacaaaaatgcagagaagaacaaccgtttatctcttcagggagaaattattattgcaattatattgataacagaacctgggttgaaagggagaggaatcccaattttcataattgaagatggaggaacaagttatgtggttgctctgcagatactatgcaaattagttgaactaactcagaaaccagttgatcagccctttgattacatttgtggtgtgagcacagctttactcctgaagtcagcaagaccacgaacccactggaaggaagaagctccagacacatctgaacatctgaaggaacaaactccggacacaccatctttaagaactgtaacactcactgctagagtctgcggcttcattcttgaagtcagcgagaccaagaactcaccggaaggaaccaattccggacatattttgacatcccagatgggactatcacctattgccaagcggagggaaactagtgcttctgctgctgcgttggtgagtgcaactattccaatctgcagggtccagggaccattgcgggttcttgggcaagaggtgtttctgctgctgcttcgccttcctacagctccccttcctattaatgataagcctcctctaatctcccctgcccagaaggaaacaagcaaagaaatctccaaaggaccacaaaaacccctgggctatcggttatgtccccttcaagcagtagggggaggggaatttggcctaacccgggtacatgtccccttctccctctatgatttaaagcagatcaaggcagacttggggaagttttcagatgatcctgataggtacatagatgtcctacagggtctagggcaaactttctatctcacttggagagatgtcatgctattgttagatcaaaccctggcctttaatgaaaagaacgcagctttagctgcagcccgagagtttggagatatctgggaccaaggggaacagtccaaaaaggaaaagcaagatcagagaaagaccgtagccttagtcatggccctcagacaaataaaccttggtggttcagagaggacagaaaatggagcaggtcaatcagccgggtttagggatagccctcaactgtttggtcaggcactggcccaagatctaggccacttctcaagtccaggcactcttgtccttcaatatgtggatgatttacttttggctaccagtttggaagcctcatgccagcaggctactctagatctcttgaactttctagctaatcaagggtacaaggtgtctaggtcgaaggcccagctttgcctacagcaggtcaaatatctaggcctaatcttagccagagggaccagtgcccagttagcagaactactggcacttaccctagccttagaactgggaaatggaaaaagaataaatgtgtatacagatagcaagtatgcttatctaatcctgcatgatcatgctgcaatatggaaagaaagggcgttcttaacctctgggggaacccccattaaataccacaaggaaattatggagttattgcacacagtgcaaaaacccaaggaagtggcagtcttacactgccaaagccatcaacaagctcaaggctctgtggctctacaatcagcagatggaaaaggcagccaggcttttgtcattttcttcaagtcagcaggttccctctggccaaagatatgttcagaaatgccatccaggatccatggcctggaaatggaagccttcagaatccacttggtgctctattccactgtggctgaggtggaacccaaaaaacaagacaaaattcttctcactattcccacccatttttataagcacatgagtctctctccacgaccaccactggcccaggcccacagaatggagcttcctgagagtcgaactgcagtgattgtttttgctcttctggatctagccacccagtggagctaccgagctctgggctggtactggggactgtctgcaaagagtcctgtgatgtaa

SEQ ID NO: 118078 - DNA, 3033 bp, Homo sapiens
atggggaaaaaacagagcagaaaaaccggaaactctaaaaagcagagcgcctctcctcctccaaaggaatgcagctcctcaccagcaacggaacaaagctggacggagaatgactttgacgagttgagagaagaagacttcagacgatcaaactactccgagctacaggaggaaattcaaaccaaaggcaaagaagttgaaaactttgaaaaaaattcagacgaatgtataactggaataaccaatacagagaagtgcttaaaggagctgacggagctgaaagccaaggctcgagaactacatgaagaacgcagaagcctcaagagccgatgcgatcaactggaagaaagggtatcagtgatggaagacaaaatgaatgaaatgaagcgagaagggaagtttagagaaaaaagaataaaaagaaacaaacaaagcctccaagaaatatgggactatgtgaaaagaccaaatctacgtctgattagtgtacctgaaagtgacagggagaatggaaccaagttggaaaacactctgcaggatattatccaggagaacttccccaatctagcaaggcaggccaacattcagattcaggaaatacagagaacgccacaaagatactcctcgagaagagcaactccaaggcacataattgtcagattcagcaaagttgaaatgaaggaaaaaatgttaagggcagccagagagaaagaaatacaaactaacatcagagaatactacaaacaccgctacgcaaataaactagaaaatctagaagaaatggataaattcctcaacatatacacccttcgaagactaaaccaggaagaagttgaatctctgaacagaccaataagaggctctgaaattgtggcaataatcaatagtttaccaaccaaaaagagtccaggaccagatggattcacagccgaatactaccagaggtataaggaggaactggtaccattccttctgaaactattccaatcaatagaaaaagagggaatcctccctaactcattttatgaggccagcatcatcctgataccaaagccgggcagagacacaaccaaaaaagagaattttagaacaatatccttgatgaacattgatgcaaaaatcctcaataaaatactggcaaaccgaatccagcagcacatcaaaaagcttatccaccatgatcaagtgggcttcatccctgggatgcaaggctggttcaatatacgcaaatcaataaatgtaatccagcatataaacagaaccaaagacaaaaaccacgtgattatctcaatagatgcagaaaaggcctttgacaaaattcaacaactcttcttgctaaaaactctcaataaattaggtattgatgggacatatctcaaaataaaaagagctatctatgacaaacccacagccaatatcatactgaatgggcaaaaactggaagcattccctttgaaaactggcacaagacagggatgccctctctcaccactcctattcaacatagtgttggaagttctggccagggcaattaggcaggagaaggaaataaagggtattcaattaggaaaagaggaagtcaaattgtccctgtttgcagatgacatgattgtatatctagaaaaccccattgtctcagcccaaaatctccttaagctgataagcaacttcagcaaagtctcaggatacaaaatcaatgtacaaaaatcacaagcattcttatacaccaataacagacaaacagaaacccaaatcatgagtgaactcccattcacaattgcttcaaagagaataaaatacctaggaatccaacttacaagggacgtgaaggacctcttcaaggagaactacaaaccactgctcaatgaaataaaagaggatacaaagaaatggaagaatattccatgctcatgggtaggaagaatcaatatcatgaaaatggccatactgcacaaggtaatttatagattcaatgccatccccatcaagctaccaatgactttcttcacagaattggaaaaaactactttaaagttcacatggaaccaaaaaagagcccgcattgccaagtcaatcctaagccaaaagaacaaagctggaggcatcatgctacctgacttcaaactatactacaaggctacagtaaccaaaacagcatggtactggtaccaaaacagagatatagatcaatggaacagaacagagccctcagaaataacgccgcatatctacaactatctgatctttgacaaacctgagaaaaacaagcaatggggaaaggattccctattcaataaatggtgctgggaaaactggctagccatatggagaaagctgaaactggatcccttctttacaccttatacaaaaattaattcaagatggattaaagacttaaacgttagacctaaaaccataaaaaccctagaagaaaacctaggcattaccattcaggacataggtatgggcaaggacttcatgtctaaaacaccaaaagcaatagcaacaaaagccaaaattgacaaattggatctaattaaactaaagagcttctgcacagcaaaagaaactaccatcagagtgaacaggcaacctacagaatgggagaaaattttcgcaacctactcatctgacaaagggctaatatccagaatctacaatgaactcaaacaaatttacaagaaaaaaacaaacaaccccatcaaaaagtgggcaaaggacatgaacagacacttctcaaaagaagacatttatgcagccaaaaaacacatgaaaaaatgctcaccatcactggctatcagagaaatgcaaatcaaaaacacaatgagataccatctcacaccacttagaatggcaatcattaaaaagtcaggaaacaacagagcctcaaggtcagccagaggtgagagcttagggccttctcaatcctttcctgagcacgtgcattgccctgggccgttgcacacagccctacacagacccatgacctttcagattcccagggatatgttggaagtttctagtgcccactag

SEQ ID NO: 118079 - DNA, 3471 bp, Homo sapiens
atgggagaattgatcaccccactgtcaacattagacagatcaacaagacagaaagtcaacaaggatacccaggaattgaactcagctctgcaccaaggggacctaatagacatctacagaactctccaccccaaatcaacagaatatacatttttttcagcaccacaccacacctattccaaaattgaccacatacttggaagtaaagctctcctcagcaaatgtaaaagaacagagattataacaaactatctctcagaccacagtgcaatcaaactagaactcaggattaagaatctcactcaaaaccgctcaactacatggaaactgaacaacctgctcctgaatgactactggatacataacgaaatgaaggcagaaataaagatgttctttgaaaccaatgagaacaaagacacaacataccagaatctctgggacgcattcaaagcagtgtgtagagggaaatttatagcactaaatgcccacaagagaaagcaggaaagatccaaaattgacaccctaacatcacaattaaaagaactagaaaagcaagagcaaacacattcaaaagctagcagaaggcaagaaataactaaaatcagagcagaactgaaggaaatagagacacaaaaaacccttcaaaaaattaatgaatccaggagctggttttttgaaaggatcaacaaaattgatagaccgctagcaagactaataaagaaaaaaagagagaagaatcaaatagacacaataaaaaatgataaaggggatatcgccaccaatcccacagaaatacaaactaccatcagagaatactacaaacacctctacgcaaataaactagaaaatctagaagaaatggataaattcctcgacacatacactctcccaagactaaaccaggaagaagttgaatctctgaatagaccaataacaggagctgaaattgtggcaataatcaatagtttgccaaccaaaaagagtccaggaccagatggattcacagccgaatcctaccagaggtacaaggaggaactggtaccattccttctgaaactattccaatcaatagaaaaagagggaatcctccctaactcattttatgaggccagcatcattctgataccaaagccgggcagagacacaaccaaaaaagagaattttagactaatatccttgatgaacattgatgcaaaaatcctcaataaaatactggcaaaccgaatccagcagcacatcaaaaagcttatccaccatgatcaagtgggcttcatccctgggatgcaaggctggttcaatatacgcaaatcaataaatgtaatccagcatataaacagagccaaagacaaaaaccacatgattatctcaatagatgcagaaaaagcctttgacaaaattcaacaacccttcatgctaaaaactctcaataaattaggtattgatgggacatatttcaaaataataagagctatctatgacaaacccacagccaatatcatactgaatgggcaaaaactggaagcattccctttgaaaactggcacaagacagggatgccctctctcaccactcctattcaacatagtgttggaagttctggccagggcaattaggcaggagaaggaaataaagggtattcaatcaggaaaagaggaagtcaaattgtccctgtttgcagacgacatgattgtatatctagaaaaccccattgtctcagaccaaaatctccttaagctgataagcaacttcagcaaagtctcaggatacaaaatcaatgtacaaaaatcacaagcattcttatacaccaataacagacaaacagagagccaaatcatgagtgaactcccattcacaattgcttcaaagagaataaaatacctaggaatccaacttacaagggatgtgaaggacctcttcaaggagaactacaaaccactgctcaaggaaataaaagaggatacaaacaaatggaagaacattccatgctcatgggtaggaagaatcagtatcgtgaaaatggccatactgcccaaggtaatttacagattcagtgccatccccataaagctaccaatgactttcttcacagaattggaaaaaactactttaaagttcatatggaaccaaaaaagagcccgcatcgccaaggcgatcctaagccaaaagaacaaagctggaggcatcacactacctgacttcaaactatactacaaggctacagtaaccaaaacagcacggtactggtaccaaaacagagatatagatcaatggaacagaacagagccctcagaaataacgccacatatctacaactatctgatctttgacaaacctgagaaaaacaagcaatggggaaaggattccctatttaataaatggtgctgggaaaactggctagccatatgtagaaagctgaaactggatcccttccttacaccttatacaaaaattaattcaagatggattaaagacttaaacattagacccaaaaccataaaaaccctagaagaaaacctaggcagtaccattcaggacataggcatgggcaaggacttcatgtccaaaacaccaaaagcaatggcaacaaaagacaaaattgacatatgggatctaattaaactaaagagcttctgcacagcaaaagaaactaccatcagagtgaacgggcaacctacaaaatgggagaaaattttcgcaacctactcatctgacaaagggctaatatccagaatctgcaatgaactcaaacaaatttacaagaaaaaaacaaacaaccccatcaaaaagtgggcgaaggatatgaacagacacttctcaaaagaagacatttatgcagccaaaaaacacatgaaaaaatgctcatcatcactggccatcagacaaatgcaaatcaaaaccacaatgagataccatctcacaccagaaagttccgctccacatcccatcaatcaccctaaagagaagccaggggacccgggccactcgccaatgcagggtctcctgggctcaggcagatacccgaaacttgccacctcaagcacccacttggaatgcttctgctgtcacatcactctgctctatctgccacccacaacccaaccccatgcaagctccaatcttcagtcatgtttactacatcagcagccatgcttagcgatccctggggacttaggaaggggctggggagagagatgttcagctgcaagaccaccgaaggtaaccaactggaagctggagcagctgagcaaagtctctatgcccttcccaaaccttcagaccttcagacctagcttggtgcttttccttgagcatcctagctcacatcctagtgagaccgctcctggggctgccgctgctggcacagatgggacccatgctaacacaggggaaagaagtggttctgacaagagaactagaattgctggaaaactacaaaccacacgtcatgttggtgtccatgaaacattttga

SEQ ID NO: 118080 - DNA, 3576 bp, Homo sapiens
atgggagactttaacaccccactgtcaacattagacagatcaacgaggcagaaagtcaaaaaggataaccaggaattaaactcagctctgcaccaagtggacctaatagacatctacagaactctccaccccaaatcaacagaatatacatttttttcagcaccacaccacacctattccaaaattgaccacatagttggaagtaaagctctcctcagcaattgtaaaagaacagaaattataacaagctatctctcagaccacagtgcaatcaaactagaactcaggattaagaatctcactcaaaaccgctcaactacatggaaactgaacaacctgctcctgaatgactactgggtacataacgaaatgaaggcagaaataaagatgttctttgaaaccaacgagaacaaagacacaacataccagaatctctgggacgcattcaaagcagtgtgtagagggaaatttatagcactaaatgcccacaagagaaagcaggaaagatccaaaattgacaccctaacatcacaattaaaagaactagaaaagcaagagcaaacacattcaaaagctagcagaaggcaagaaataactaaaatcagagcagaactgaaggaaatagagacacaaaaaaccctgcaaaaaattaatgaatccaggagctggttttttgaaaggatcaacaaaattgatagaccgctagcaagactaataaagaaaaaaagagagaagaatcaaatagacgcaataaaaaatgataaaggggataccaccaacgatcccacagaaacacaaactaccatcagagaatactacaaacacctctatgcaaataaactagaaaatctagaagaaatggataaattcctcgacacatacactctcccaagactaaaccaggaagaagttgaatatctgaatagaccaataacaggatctgaaattgtggcaataatcaatagcttaccaaccaaaaagagtccaggaccagatggattcacagccgaattctaccagaggtacaaggaggaactggtaccattccttctgaaactattccaatcaatagaaaaagagggaatcctccctaactcattttatgaggccagcatcattctgataccaaagccaggcagagacacaacaaaaaaagagaattttagaccaatatccttgatgaacatggatgcaaaaatcctcaataaaatactggcaaaccgaatccagcagcatatcaaaaagcttatccaccatgatcaagtgggcttcatccctgggatgcaaggctggttcaatatacgcaaatcaagaaatgtaatccagcatataaacagagccaaagacaaaaaccacatgattttctcaatagatgcagaaaagccctttgacaaaattcaacaacctttcatgctaaaaactctcaataaattaggtattgatgggacgtatttcaaaataataagagctatctatgacaaacccacagccaatatcatactgaatgggcaaaaactggaagcattccctttgaaaactggcacaagacagggatgccctctctcaccactcctattcaacatagtgctggaagttctggccagggcaattaggcaggagaaggaaataaagggtattcaattaggaaaagaagaagtcaaattgtccctgtttgcagacgacatgattgtatatctagaaaaccccattgtctcagcccaaatcttctttaagctgataagcaacttcagcaaagtctcaggaaacaaaatcaatgtacaaaaatcacaagcattcttatacaccaacaacaggcaaacagagagccaaatcatgagtcaactcccatacacaattgcttcaaagagaataaaatacctaggaatccaacttacaagggatgtgaaagacctcttcaaggagaactacaaaccactgctcaaggaaataaaagaggacacaaacaaatggaagaacattccatgctcatgggtaggaagaatcaatatcgtgaaaatggccatactgcccaaggtaatttacagattcaatgccatccccatcaagctaccaatgactttcttcacagaattggaaaaaactaccttaaagttcatatggaaccaaaaaagagcccacatcgccaagtcaatcctaagccaaaagaacaaagctggaggcatcacactacctgacttcaaactatactacaaggctacagtagccaaaacagcatggtactggtaccaaaacagagatatagatcaatggaacagaacagagccctcagaaataacgccacatatctacaactatctgatctttgacaaacctgagaaaaacaagcaatggggaaaggattccctatttaataaatggtgctgggaaaactggctaaccatatgtagaaagctgaaactggatcccttccttacaccttatacaaaaatcaattcaagatggattaaagacttaaacgttagacctaaaaccataaaaaccctagaagaaaacctaggcattaccattcaggacataggcatgggcaaggacttcatgtctaaaacaccaaaagcaatggcaacaaaagacaaaattgacaaacgggatctaattaaactaaagagcttctgcacagcaaaagaaactaccatcagagtgaacaggcaacctacaaaatgggagaaaattttcgcaacctactcatctgacaaagggctaatatccagaatctacaatgaactcaaacaaatttacaagaaaaaaacaaacaaccccatcaaaaagtgggcaaaggacatgaacagacacttctcaaaagaagacatttatgcagccaaaaaacacatgaaaaaatgctcatcatcactggccatcagagaaatgcaaatcaaaaccacaatgagataccatctcacaccagttagaatggcaatcattaaaaagtcaggaaacaacagctattcagctagtgggttttctattatgacggtaaaagtgccctttacactggcgtccaaggtgtgtccttctaaatctttccttttgcaagtcttcccagactcacagtgtaatgaaggcgataaagatgaaagcactggttttgatgataacaacctccttctgccctggatctctccagtcagttctgcacactacagcccaaaccccagcaggtcagggccatctcttgtagaagatgctctcacggcttcctggctctcaggattaagacacaacactggccggagctggtcaggcactctcccccaatggaccaagggagcagatgggggtaaagctgtgcctggctgtacacttaaggagcacttaagactgactgtaaaagtgtcagaaagctttacagagaaggtttttgaaaggagggttaaaagatgcaaaggaattttcaagactattgaggaagccagggtatggagggagtatctccaggaagagggtcgttcgtgggcaggcacagagctgtgtgaggacatgagttgttctgaggctagcagtgtgggagatgaggccaaaaagaggctctggcagcaagaatttgatagagtattttga

SEQ ID NO: 118081 - DNA, 4251 bp, Homo sapiens
atggcgcgatctcggctcaccgcaacctccgcctcccgggttcaagcgattcttctgcctcatcctcccaacccggtgtcgttccccgcggtaggtggtccccgacgagctgcagccatgggaaacaccaccagcgaccgggtgtccggggagcgccacggcgccaaggctgcacgctccgagggcgcaggcggccatgccccggggaaggagcacaagatcatggtggggagtacggacgaccccagcgtgttcagcctccctgactccaaggtggaagagccaatgattccacgacttgtttactcctcagtagtacttcaaaatgttgcgtggctaaaaaaacgacaacccacagctgccctgaagaccttgctctcaattccaaggactttcaggaagagaacaacttgttttcactctctccctggggacaaagagtttgtatcatggcagcaggatttggaggactccgtaaagcccacacagcaggcccggcccactgttatccgctggtctgaaggaggcaaggaggtcttcatctctgggtccttcaacaattggagcaccaagattccactgattaagaggattaagaaacccactcaaaaccgctcaactacatggaaactgaacaacctgctcctgaatgactactgggtacttaacaaaatgaaggcagaaataaagatgttctttgaaaccaacgagaacaaagacacaacataccagaatctctgggacacattcaaagcagtgtgtagagggaaatttatagcactaaatgcccacaagagaaagcaggaaagatccaaaattgacaccctaacatcacaattaaaagaactagaaaagcaagagcaaacacattcaaaagctagcagaaggcaagaaataactaaaatcagagcagaactgaaggaaattgagacacaaaaaacccttcaaaaaattaatgaatccaggagctggttttttgaaaagatcaacaaaatcgatagactgctagcaagactagtaaagaagaaaagagagaggaatcaaatagatgcaataaaaaatgataaaggggatatcaccaccaatcccacagaaatacaaactaccatcagagaatactacaaacacctctatgcaaataaactagaaaatctagaagaaatggataaattcctcaacacatacaccctcccaagactaaaccaggaagaagttgaatctctgaatagaccaataacaggatctgaaattgtggcaataatcaatagcttaccaaccaaaaaaagtccaggaccagatggattcacagccgaattctaccagaggtacaaggaggaactgcatataaacagagccaaagacaaaaaccacatgattatctcaatagatgcagaaaaagcctttgacaaaattcaacaacccttcatgctaaaaactctcaataaattaggtattgatgggacgtatctcaaaataataagagctatctatgacaaacccacagccaatatcatactgaatgggcaaaaactggaagtattccctttgaaaactggcacaagacagggatgtcctctctcaccactgctattcaacatagtgttggaagttctggccagggcaattaggcaggagaaggaaataaagggtattcaattaggaaaagaggaagtcaaattgtccctgtttgcacatgacatgattgtatatctagaaaaccccattgtctcagcccaaaatctccttaagctgataagcaacttcagcaaagtcttaggatacaaaatcaatgtacaaaaatcacaagcattcttatacaccaataacagacaaacagagacccaaatcatgagtgaactcccattcacaattgcttcaaagagaataaaatacctaggaatccaacttacaagggatgtgaaggacctcttcaaggagaactacaaaccattgctcaaggaaataaaagaggatacaaacaaatggaagaacattccatgctcatgggtaggaagaatcaatatcgtgaaaatggccatactgcccaaggtaatttatagattcaatgtcatccccatcaagctaccaatggctttcttcacagaattgggaaaaactactttaaagttcacatggaaccaaaaaagagcctgcattgccaagtcaatcttaagcaaaaagaacaaagccagaggcgtcacgctacctgacttcaaactatactacaaggctacagtaaccaaaacagaatggtactggtaccaaaacagacatatagatcaatggaacagaacagagccctcagaaataatgccgcatatctacaaccatctgatctttgacaaacctgagaaaaacaagaaatggggaaaggattccctatttaataaatggtgctgggaaaactggctagccatatgtacaaagctgaaactggatcccttccttacaccttatacaaaagttaactcaagatggattaaagacttacatgttagacctaaaaccataaaaaacctagaagaaaacctaggcaataccattcaggacataggcatgggcaaggacttcatgtctaaaacaccaaaagccatggcaacaaaagccaaaattgacaaatgggatttaattaagctaaagagcttctgcacagcaaaagaaactaccatcagagtgaacaggaaacctacagaatgggagaaaatttttgcaaactactcatctgacaaagggctaatatccagaatctacaatgaactcaaacaaatttacaagaaaaaaacaaacaaccccatcaaaaagtggacgaaggatatgaacagacacttctcaaaagaagacttttacgcagcccaaagacacatgaaaaaatgttcatcatcactggccatcagagaaatgcaaatcaaaaccacataccatgctggaccagatggatttacagccgaattctaccagaggtacaaggaggaactggtaccattccttctgaaactattccaatcaatagaaaaagagggaatcctccctaactcattttatgaggccagcatcatcctgataccaaagcctggtagagacacaaccaaaaaagagaattttagaccaatatccttgatgaacattgatgcaaaaatcctcaataaaatactggcaaaacgaatccagcagcacatcaaaaagcttatccaccatgatcaagtgggtttcatccctgggatgcaaggctggttcaatatatgcaaatcaataaacgtaatccagcatataaacagaaccaaagacaaaaaccacatgattatctcaatagatgcagaaaaggcctttgacaaaattcaacaactcttcatgctaaaaactctcaataaattaggtattgatgggacgtatctcaaaataataagagctatctatgacaaacccacagccaatatcatactgaatgggcaaaaactggaagcattccctttgaaaactggcacaagacagggatgccctctctcaccactcctattcaacatagtgtgggaagttctggccagggcaatgaggcaggagaaggaaataaagggtattcaattaggaaaagaggaagtcaaattgtccctgtttgcagacgacatgattgtgtatctagaaaaccccattgtctcagcccaaaatctccttaagctgataagcaacttcagcaaagtctcaggatacaaaatcaatgtacaaaaatcacaagcattcttatacaccaataacagacaaacagagagccaaatcatgagtgaactcccattcacaactgcttcaaagagaataaaatacctaggaatccaacttacaagggatgagaaggacctcttcaaggagaactacaaaccactgctcaatgaaataagaggatacaaacaaatggaagaacattccatgctcacgggtaggaagaatcaatatcgtgaaaatgctcatactgcccaagctaaggcgaaccacaggccagccacatccaaaaaggtttacctgattacggcaatgaagccactgtccagtcctattcctgaaggtttggggctagaaaacagaacaggaaaggaaatcaagagtagagaatggaccaccatgttaagattggctgtagctgctgaactaacctttagagattggaaggagcggtctcggaggactttggacacacatgaaacaaaggggattcccttaagtaaaagcagagcaggcattctggtgattgacattagatag

SEQ ID NO: 118082 - DNA, 3195 bp, Homo sapiens
atgtatgatgtatcacgttttcagacatatcagagccttgctgctgaatggagaagaaattatcaaaaatcattaagcctgaaaaggtcctattatgaaagtcttccacaagtcttacttggatacactcgtaaagagggttcgggagctgccaccatctccttaatgacagacgagcctggcctagacaaccctgcctacgtgtcctcggcagaggacgggcagccagcaatcagcccagtggactctggccggagcaaccgaactagggcacggccctttgagagatccactattagaagcagatcatttaaaaaaataaatcgagctttgagtgttcttcgaaggacaaagagcgggagtgcagttgccaaccatgccgaccagggcagggaaaattctgaaaacaccactgcccctgaagcaccacaccacacctattccaaaattgaccacatagttggaagtaaagctctcctcagcaaatgtaaaagaacagaaattataacaaactatctctcagaccacagtgcaatcaaactagaactcaggattaagaatctcactcaaaaccactcaactacatggaaactgaacaacctgctcctgaatgactactgggtacataacgaaatgaaggcagaaataaagatgttctttgaaaccaatgagaacaaagacacaacataccagaatctctgggacgcatgcaaagcagtgtgtagagggaaatttatagcactaagtgcccacaagagaaagcaggaaagatctaaaattgacaccctaacatcacaattaaaagaactagaaaagcaagagcaaacacattccaaagctagcagaaggcaagaaataactaaaatcagagcagaactgaaggaaatagagacacaaaaaacccttcaaaaaattgatgaatccaggagctggtttattgaaaggatcaacaaaattgatagactgctaacaagactaataaagaaaaaaagagagaagaatcaaatagatgcaataaaaaatgataaaggggatatcaccaccgatcccacagaaatacaaactaccatcagagaatactacaaacacctctatgcaaataaactagaaaatctagaagaaatggataaattccttgacacatacactctcccaagactaaaccaggaagaagttgaatctctgaatagaccaataacaggatctgaaattgtggcaataatcagtagcttaccacccaaaaggagtccaggaccagatggattcacagccgaattctaccagaggtacaaggaggaactggtaccattccttctgaaactattccaattgatagaaaaagagggaatcctccctaactcattttatgaggccagcttcattctgataccaaagccgggcagagacacaaccaaaaaagagaattttagaccaatatccttgatgaacattgatgcaaaaatcctcaataaaatactggcaaaccaaatccagcagcacatcaaaaagcctctccaccatgatcaagtgggcttcatccctgggatgcaaggctggttcaatatacgcaaatcaataaatgtaatccagcatataaacagagccaaagacaaaaaccacatgattatctcaatagatgcagaaaaggcctttgataaaattcaacaacctttcatgctaaaaactctcaataaattaggtattgatgggacatatttcaaaataataagagctatctatgacaaacctacagccaatatcatactgaatgggcaaaaactggaagcattccctttgaaaacgggcacaagacaggggggcacaagacagggatgccctctctcaccactcctattcaacatagtgttggaagttctggccagggcaattaggcaggagaaggaaataaagggtattcaattaggaaaaaaggaagtcaaattgtccctgtttgcagatgacatgattgtatatctagaaaaccccattgtctcagcccaaaatctccttaagctgataagcgacttcagcaaagtctcaggacacaaaatcaatgtgcaaaaatcacaagcattcttatacaccaataacagacaaacagagagccaaatcatgagtgaactcccattcacaattgcttcaaagagaataaaatacctaggaatccatcttacaagggatgtgaaggacctcttcaaggagaactacaaaccactgctcaaggaaataaaagaggatacaaacaaatggaagaacattccatgctcatgggtaggaagaatcaatatcgtgaaaatggccatactgcccaaggtaatttacagattcagtgccatccccatcaagctaccaatgcctttcttcacagaattggaaaaaactactttaaagttcatatggaaccaaaaaagagcccccattgccaagtcaatcctaagccaaaggaacaaagctggaggcatcacactacctgacttcaaactatactacaaggctacagtaaccaaaacagcatggtactggtaccaaaacagagatatagatcaatggaacagaacagagccctcagaaataacgccgcatatctacaactatctgatctttgacaaacctgagaaaaacaagcaatggggaaaggattccctatttaataaatggtgctgggaaaactggctagccatatgtagaaagctgaaactggatcccttccttacaccttatacaaaaatcaattcaagatggattaaagacttaaacgttagacctaaaaccataaaaaccctagaagaaaacctaggcattaccattcaggacataggcatgggcaaggacttcatgtttaaaacaccaaaagcaatggcaacaaaagacaaaattgagaaatgggatctaattaaactaaagagcttctgcacagcaaaagaaactaccatcagagtgaacaggcaacctacaaaatgggagaaaatttttgcaacctactcatctgacaaagggctaatatccagaatctacaatgaactcaaacaaatttacaagaaaaaaacaaacaaccccatcaaaaagtgggcgaaggacatgaacagacacttctcaaaagaagacatttatgcagcccagaaacacatgaaaaaatgctcaccattactgggagataaatatttatatacagagagaaaaggggggagagagtga

SEQ ID NO: 118083 - DNA, 4092 bp, Homo sapiens
atggggaaaaaacagaacagaaaaactggaaactctaaaacgcagagtgcctctcctcctccaaaggaacgcagttcctcaccagcaacggaaaaaagctggatggagaatgactttgacgagctgagagaagaaggtttcagacgatcaaattactctgagctacgggaggacattcaaaccaaaggcaaagaagttgaaaactttgaaaaaaatttagaagaatgtataactagaataaccaatacagagaagtgcttaaaggagctgatggagctgaaaaccaaggctcgagaactacgtgaagaatgcagaagcctcaggagccgatgtgatcaactggaagaaagggtatcagcaatggaagatgaaatgaatgaaatgaagcgagaagggaagtttagagaaaaaagaataaaaagaaatgagcaaagcctccaagaaatatgggactatgtgaaaagaccaaatctacgtctgactggtgtacctgaaagtgacggggagaatggaaccaagttggaaaacactctgcaggatattatccaggagaacttccccaatctagcaaggcaggtcaatgttcagattcaggaaatacagagaacgccacaaagatactcctcgagaagagcaactccaagacacataattgtcagattcaccaaagttgaagtgaaggaaaaaatgttaagggcagccagagagaaaggtcgggttaccctcaaagggaagcccatcagactaacagcggatctctcggcagaaaccctacaagccagaagagagtgggggccaatattcaacattcttaaagaaaagaattttcaacccagaatttcatatccagccaaactaagcttcataagtgaaggagaaataaaacactttacagacaagcaaatgctgagagattttgtcaccaccaggcctgccctaaaagagctcctgaaggaagtgctaaacatggaaaggaacaaccagtaccagccgctgcaaaatcatgccaaaatacagatcaacgagacagaaagtcaacaaggatacccaggaattgaactcagctctgcaccaagcggacctaatagacatctacagaactctccacaccaaatcaacagaatatactttttttcagcaccacaccacacctattccaaaattgaccacatagttggaagtaaagctctcctcagcaaatgtaaaagaacagaaattataacaaactatctctcagaccacagtgcaatcaaactagaactcaggattaagaatctcaatcaaagccgctcaactacatggaaactgaacaacctgctcctgaatgactactgggtacataacgaaatgaaggcagaaataaagatgttctttgaaaccaacgagaacaaagacacaacataccagaatctctgggacgcattcaaagcagtgtgtagagggaaatttatagcactaaatgcccacaagagaaagcaggaaagatccaaaattgacaccctaacatcacaattaaaagaactagaaaagcaagagcaaacacattcaaaagctagcagaaggcaagaaataactaaaatcagagcagaactgaaggaaatagagacacaaaaaacccttcaaaaaatcaatgaatccaggagctggttttttgaaaggatcaacaaaattgatagaccgctagcaagactaataaagaaaaaaagagaggagaatcaaatagacacaataaaaaatgataaaggggatatcaccaccgatcccacagaaatacaaactaccatcagagaatactacaaacacctctatgcaaataaactagaaaatctagaagaaatggataaattccttgacacatacactctcccaagactaaaccaggaagaagttgaatctctgaatagaccaataacaggagctgaaattgtggcaataatcaatagtttaccaaccaaaaagagtccaggaccagatggattcacagctgaattctaccagaggtacaaggaggaactggtaccattccttctgaaactattccaatcaatagaaaaagagggaatcctccctaactcattttatgaggccagcatcattctgataccaaagccgggcagagacacaaccaaaaaagagaattttagaccaatatccttgatgaacattgatgcaaaaatcctcaataaaatactggcaaaccgaatccagcagcacatcaaaaagcttatccaccatgatcaagtgggcttcatccctgggatgcaaggctggttcaatatacgcaaatcaataaatgtaatccagcatataaacagagccaaagacaaaaaccacatgattatctcaatagatgcagaaaaagcctttgacaaaattcaacaacccttcatgctaaaaactctcaataaattaggtattgatgggacgtatttcaaaataataagagctatctatgacaaacccacagccaatatcatactgaatgggaaaaaactggaagcattccctttgaaaactggcacaagacagggatgccctctctcactgctcctattcaacatagtgttggaagttctggccagggcaatcaggcaggagaaggaaataaagggtattcagttaggaaaagaggaagtcaaattgtccctgtttgcagacgacatgattgtttatctagaaaaccccatcgtctcagcccaaaatctccttaagctgataagcaacttcagcaaagtctcaggatacaaaatcaatgtacaaaaatcacaagcattcttatacaccaacaacagacaaacagagagccaaatcatgagtgaactcccattcacaattgcttcaaagagaataaaatacctaggaatccaacttacaagggatgtgaaggacctcttcaaggagaactacaaaccactgctcaaggaaataaaagaggatacaaacaaatggaagaacattccatgctcatgggtaggaagaatcaatatcgtgaaaatggccatactgcccaaggtaatttacagattcaatgccatccccatcaagctaccaatgactttcttcacagaattggaaaaaactactttaaagttcatatggaaccaaaaaagagcccgcatcgccaagtcaatcctaagccaaaagaacaaagctggaggcatcacactacctgacttcaaactatactacaaggctacagtaaccaaaacagcatggtactggtaccaaaacagagatatagatcaatggaacagaatagagccctcagaaataacgccgcatacctacaactatctgatctttgacaaacctgagaaaaacaagcaatggggaaaggattccctatttaataaatggtgctgggaaaactggctagccatatgtagaaaactgaaactggatcccttccttacaccttatacaaaaatcaattcaagatggattaaagatttaaacgttagacctaaaaccataaaaaccctagaagaaaacctaggcattaccattcaggacataggcgtgggcaaggacttcatgtccaaaacaccaaaagcaatggcaacaaaagccaaaattggcaaatggtacctaattaaactaaagagcttctgcacagcaaaagaaactaccatcagagtgaacaggcaacctacaacatgggagaaaattttcgcaacgtactcatctgacaaagggctaatatccagaatctacaatgaactcaaacaaatttacaagaaaaaaacaaacaaccccatcaaaaagtgggcgaaggacatgaacagacacttctcaaaagaagacatttatgcagccaaaaaatacgtgaaaaaatgctcatcatcactggccatcagagaaatgcaaatcaaaaccactatgagataccatctcacaccagttagaatggcaatcattaaaaagtcaggaaacaacagtgatctctaccttatgtctgcaggaaccagttgtttaatgggcagacactgggacagtggacaagaaacgtgtgtccaaaatgtcgtgctggacacgtgcagcccctctgaacaactcttaagagctattgctgatcttgtcccgcaaccctga

SEQ ID NO: 118084 - DNA, 3984 bp, Homo sapiens
aaatatgggactatgtgaaaagaccaaatctacgtctgattggtgtacctgaaagtgatgcggagaatggaaccaagttggaaaacactctacaggatattatccaggagaacttccccaatctagcaaggcaggccaacgttcagattcaggaaatacagagaacgccacaaagatactcctcgagaagagcaactccaagacacataattgtcagattcaccaaagttgaaatgaaggaaaaaatgttaagggcagccagagagaaaggtcgggttaccctcaaagggaagcccatcagactaacagcggatctctcggcagaaaccctacaagctagaagagagtgggggccaatattcaacattcttaaagaaaagaattttcaacccagaatttcatatccagccaaactaagcttcataagtgaaggagaaataaaatactttacagacaagcaaatgctgagagattttgtcaccaccaggcctgccctaaaagagctcctgaaggaagcgctaagcatggaaaggaacaaccgacagatcaacgagacagaaagtcaacaaggatacccaggaattgaattcagctctgcaccaagcggacctaatagacatctacagaactctccaccccaaatcaacagaatatacatttttttcagcaccacaccacacctattccaaaattgaccacatagttggaagtaaagctctcctcagcaaatgtaaaagaacagaaattataacaaactatctctcagaccacagtgcaatcaaactagaactcaggattaagaatctcactcaaagccgctcaactacatggaaactgaacaacctgctcctgaatgactactgggtacataacgaaatgaagacagaaataaagatgttctttgaaaccaacgagaacaaagacaccacataccaaaatctctgggacgcattcaaagcagtgtgtagagggaaatttatagcactaaatgcctacaagagaaagcaggaaagatccaaaattgacaccctaacatcacaattaaaagaactagaaaagcaagagcaaacacattcaaaagctagcagaaggcaagaaataactaaaatcagagcagaactgaaggaaatagagacacaaaaagcccttcaaaaaatcaatgaatccaggagctggttttttgaaaggatcaacaaaattgatagaccgctagcaagactaataaagaaaaaaagagagaagaatcaaatagacacaataaaaaatgataaaggggatatcaccaccgatcccacagaaatacaaactaccatcagagaatactacaaacacctctacgcaaataaactagaaaatctagaagaaatggatacattcctcgacacatacactctcccaagactaaaccaggaagaagttgaatctctgaatagaccaataacaggctctgaaattgtggcaataatcaatagtttaccaaccaaaaagagtccaggaccagatggattcacagccgaattctaccagaggtacaaggaggaactggtaccattccttctgaaactattccaatcaatagaaaaagagggaatcctccctaactcattttatgaggccagcatcattctgataccaaagccgggcagagacacaaccaaaaaagagaattttagaccaatatccttgatgaacattgatgcaaaaatcctcaataaaatactggcaaaccgaatccagcagcacatcaaaaagcttatccaccatgatcaagtgggcttcatccctgggatgcaaggctggttcaatatacgcaaatcaataaatgtaatccagcatataaacagagccaaagacaaaaaccacatgattatctcaatagatgcagaaaaagcctttgacaaaattcaacaacccttcatgctaaaaactctcaataaattaggtattgatgggacgtatttcaaaataataagagctatctatgacaaacccacagccaatatcatactgaatgggcaaaaactggaagcattccctttgaaaactggcacaagacagggatgccctctctcaccgctcctattcaacatagtgttggaagttctggccagggcaatcaggcaggagaaggaaataaagggtattcaattaggaaaagaggaagtcaaattgtccctgtttgcagacgacatgattgtttatctagaaaaccccattgtctcagcccaaaatctccttaagctgataagcaacttcagcaaagtctcaggatacaaaatcaatgtacaaaaatcacaagcattcttatacaccaacaacagacaaacagagagccaaatcatgagtgaactcccattcacaattgcttcaaagagaataaaatacctaggaatccaacttacaagggatgtgaaggacctcttcaaggagaactacaaaccactgctcaaggaaataaaagaggacacaaacaaatggaagaacattccatgctcatgggtaggaagaatcaatattgtgaaaatggccatactgcccaaggtaatttacagattcaatgccatccccatcaagctaccaatgactttcttcacagaattggaaaaaactactttaaagttcatatggaaccaaaaaagagcccgcatcgccaagtcaatcctaagccaaaagaacaaagctggaggcatcacactacctgacttcaaactatactacaaggctacagtaaccaaaacagcatggtactggtaccaaaacagagatatagatcaatggaacagaacagagccctcagaaataatgctgcgtatctacaactatctgatctttgacaaacctgagaaaaacaagcaatggggaaaggattccctatttaataaatggtgctgggaaaactggctagccatatgtagaaagctgaaactggatcccttccctacaccttatacaaaaatcaattcaagatggattaaagatttaaacgttagacctaaaaccataaaaaccctagaagaaaacctaggcattaccattcaggacataggcgtgggcaaggacttcatgtccaaaacaccaaaagcaatggcaacaaaagccaaaattgacaaatgggatctaattaaactaaagagcttctgcacagcaaaagaaactaccatcagagtgaacaggcaacctacaaaatgggagaaacttttcgcaacctactcatctgacaaagggctaatatccagaatctacaatgaactcaaacaaatttacaagaaaaaaacaaacaaccccatcaaaaagtgggcgaaggacatgaacagacacttctcaaaagaagacatttatgcagccaaaaaacacatgaagaaatgctcatcatcactggccatcagagaaatgcaaatcaaaaccactatgagatatcatctcacaccagttagaatggcaatcattaaaaagtcaggaaacaacaggaaggaggaaaaaggtgctagagatataaacaaacaattcacagaagaagcaacactgatggctaatcaacctatgaaaaggtgtttaaccttcccagcaatcacagagaggcaaacacctgctctttcaccccagccacatggaatctttttggtcaacctgataaaagcatttattgcctcacctgtgtctgtgcagccatctagagttctaatggccctcagacccacaaccccagtgcaggtgtgcaataaagaagcaggcaacatggcgctggccaggacttcaggctccctggagctgaagggtttccaaggacaaacaaacccatgtggacaaacccatggggacatgaccatgtgcggaagcctggaccgacttgctgggctctacctgctgcaggccctggcacggtacctgaaaaatgaaaggatccacttccaagatgcttcgctcatgtcaatgtcagcaggaagactcagttcctcaccagcagctccttcaaaggctgcttga

SEQ ID NO: 118085 - DNA, 3432 bp, Homo sapiens
atgggagactttaacaccccactgtcaacattagacagatcaacgagacagaaagtcaacaaggatacccaggaattgaactcagctctgcaccaagcagacctaatagacatctacagaactctccaccccaaatcaacagaatatacatttttttcagcaccacaccacacctattccaaaattgaccacatactgggaagtaaagctctcctcagcaaatgtaaaagaacagaaattatagcaaactatctctcagaccacagtgcaatcaaactagaactcaggattaagaatctcactcaaaaccgctcaactacatggaaactgaacaacctgctcctgaatgactactgggtacataacgaaatgaaggcagaaataaagatgttctttgaaaccaacgagaacaaagacacaacataccagaatctctgggacgcattcaaagcagtgtgtagagggaaatttatagcactaagtgcccacaagagaaagcaggaaagatccaaaattgacaccctaacatcacaattgaaagaactagaaaagcaagagcaaacacattcaaaagctagcagaaggcaagaaataactaaaatcagagcagaactgaaggaaatagagacacaaaaaacccttcaaaaaattaatgaatccaggagctggttttttgaaaggatcaacaaaattgatagaccactagcaagactaataaagaaaaaaagagagaagaatcaaatagatgcaataaaaaatgataaaggggatatcaccatcgatcccacagaaatacaaactaccatcagggaatactacaaacacctctacgcaaataaactagaaaatctagaagaaatggataaattcctggacacatacactctcccaagactaaaccaggaagaagttaaatctctgaatagaccaataacaggagctgaaattgtggcaataatcaatagcttagcaatcaaaaagagtccaggaccagatggattcacagccgaattctaccagcggtacaaggaggaactggtaccattccttctgaaactattccaatcaatagaaaaagagggaatcctccctaactcattttatgaggccagcatcattctgataccaaagccaggcagagacacaacaaaaaaagagaattttagaccaatatccttgatgaacattgatgcaaaaatcctcaataaaatactggcaaaccgaatccagcagcacatcaaaaagcttatccaccatgatcaagtgggcttcatccctgggatgcaaggctggttcaatatacacaaatcaataaatgtaatccaacatataaacagagccagagacaaaaaccacatgattatctcaatagatgcagaaaaagcatttgacaaaattcaacaacccttcatgctaaaaactctcaataaattaggtattgatgggacgtatctcaaaataataagagctatctatgacaaacccacagccaatatcatactgaatgggcaaaaactggaagcattccctttgaaaactggcacaagacagggatgccctctctcaccactcctattcaacatagtgttggaagttctggccagggcaattaggcaggagaaggaaataaagggtattcaattaggaaaagaggaagtcaaattgtccctgtttgcagacgacatgattgtatatctagaaaaccccattgtctcagcccaaaatctccttaagctgataagcaacttcagcaaagtctcaggatacaaaatcaatgtacaaaaatcacaagcattcttatacaccaacaacagacaaacagagagccaaatcatgagtgaactcccattcacaattgcttcaaagagaataaaatacctaggaatccaacttacaagggatgtgaaggacctcttcaaggagaactacaaaccactgctcaaggaaataaaagaggatacaaacaaatggaagaacatgccatgctcatgggtaggaagaatcaatatcgtgaaaatggccatactgcccaaggtaatttacagattcaatgccatccccatcaagctaccaatggctttcttcacagaattggaaaaaactactttaaagttcatatggaaccaaaaaagagcccgcatcgccaagtcaatcctaagtcaaaagaacaaagctggaggcatcacactacctaacttcgaactatactacaaggctacagtaaccaaaacagcatggtactggtaccaaaacagatatatagaccaatggaacagaacagagccctcagaaataacaccgcatatctacaactatctgatctttgacaaacctgggaaaaacaagcaatggggaaaggattccctatttaataaatggtgctgggaaaactggctagccatatgtagaaagctgcaactggatcccttccttacaccttatacaaaaatcaattcaagatggattaaagacttaaacgttagacctaaaaccataaaaaccctagaagaagacctaggcattaccattcaggacataggcatgggcaaggacttcatgtctaaaacaccaaaagcaatggcaacaaaagacaaaattgacaaatgggatctaattaaactcaagagcttctgcacagcaaaagaaaccaccatcagagtgaacaggcaacctacaaaatgggagaaaattttcgcaacctactcatttgacaaagggctaatatccagaatctacaatgaactccaacaaatttacaagaaaaaaacaaacaaccccatcaaaaagtgggcgaaggacatgaacagacacttctcaaaagaagacatttatgcagccaaaaaacacatgaaaaaatactcatcatcactggccattagagaaatgcaaatcaaaaccacaatgagataccatctcacacccgttagaatggcaaccattaaaaactcaggaaacaacaggtcattgtgtttttataaggaaaacctaagcctttgtctggcgatccttctctctgttcctgtgcaagaaggaggggccagaagttttctggccccagcaggaggcgtggcaggccgagcaacaagtcactatggcggacacatggcgactgcagagaggctgtcagtggagctatctgggcaagccctgaaggaattccaaaagggccctttatctccaaaacagtttaagggtcatcacagccagcagctccgatggactcatagattaaacccctcctatggccaatcaaagacccccaagaacacactgttgaagatgagagggcccaccacttgggcccttggagggaccgatgtggcagcttccactgataataatggaaacgcacattttgagacgttgcaagtcatggacatgcccaggccatggtgctgcctgttggacggtgctttgcttgtttctgtctga

SEQ ID NO: 118086 - DNA, 3159 bp, Homo sapiens
atggtaaagggatcaattcaacaagaggagctaactatcctaaatatttatgcacccaatacaggagcacccagattcataaagcaactcctgagtgacctacaaagagacttagactcccacacattaataatgggagactttaacaccccactgtcaacattagacagatcaacgagacagaaagtcaacaaggatacccaggaattgaactcagctctgcaccaagcagacctaatagacatctacagaactctccaccccaaatcaacagaatatacattgttttcagcaccacaccacacctattccaaaattgaccacatacttggaagtaaagctctcctcagcaaatgtaaaagaacagaaattataacaaactatctctcagaccacagtgcaatcaaactagaactcaggattaagaatctcactcaaagccgctcaactacatggaaactgaacaacctgctcctgaatgactactggagaaagcaggaaagatccaaaactgacaccctaacatcacaattaaaagaactagaaaagcaagagcaaacacattcaaaagctagcagaaggcaagaaataactaaaatcagagcagaactgaaggaaatagagacacaaaaaacccttcaaaaaatcaatgaatccaggagctggttttttgaaaggatcaacaaaattgatagaccgctagcaagactaataaagaaaaaagagaagaatcaaatagacacaataaaaaatgataaaggggatatcaccaccgatcccacagaaatacaaactaccatcagagaatactacaaacacctctacgcaaataaactagaaaatctagaagaaatggatacattcctcgacacatacactctcccaaggctaaaccaggaagaagttgaatctctgaatagaccaataacaggctctgaaattgtggcagtaatcaatagtttaccaaccaaaaagagtccaggaccagatggattcacagccgaattctaccagaggtacaaggaggaactggtaccattccttctgaaactattccaatcaatagaaaaagagggaatcctccctaactcattttatgaggccagcatcattctgataccaaagtcgggcagagacacaaccaaaaaagagaattttagaccgatatccttgatgaacattgatgcaaaaatcctcaataaaatactggcaaaccgaatccagcagcacatcaaaaagcttatccaccatgatcaagtgggcttcatccctgggatgcaaggctggttcaatatacgcaaatcaataaatgtaatccagcatataaacagagccaaagacaaaaaccacatgattatctcaatagatgcagaaaaagcctttgacaaaattcaacaacccttcatgctaaaaactctcaataaattaggtattgatgggacgtatttcaaaataataagagctatctatgacaaacccacagccaatatcatactgaatgggcaaaaactggaagcattccctttgaaaactggcacaagacagggatgccctctctcaccgctcctattcaacatagtgttggaagttctggccagggcaatcaggcaggagaaggaaataaagggtattcaattaggaaaagaggaagtcaaattgtccctgtttgcagacgacatgattgtttatctagaaaaccccattgtctcagcccaaaatctccttaagctgataagcaacttcagcaaagtctcaggatacaaaatcaatgtacaaaaatcacaagcattcttatacaccaacaacagacaaacagagagccaaatcatgagtgaactcccattcacaattgcttcaaagagaataaaatacctaggaatccaacttacaagggatgtgaaggacctcttcaaggagaactacaaaccactgctcaaggaaataaaagaggacacaaacaaatggaagaacattccatgctcatgggtaggaagaatcaatatcgtgaaaatggccatactgcccaaggtaatttacagattcaatgccatccccatcaagctaccaatgactttcttcacagaattggaaaaaactactttaaagttcatatggaaccaaaaaagagcccgcatcgccaagtcaatcctaagccaaaagaacaaagctggaggcatcacactacctgacttcaaactatactacaaggctacagtaaccaaaacagcatggtactggtaccaaaacagagatatagatcaatggaacagaacagagccctcagaaataatgccgcatatctacaactatctgatctttgacaaacctgagaaaaacaagcaatggggaaaggattccctatttaataaatggtgctgggaaaactggctagccatatgtagaaagctgaaactggatcccttccttacaccttatacaaaaatcaattcaagatggattaaagatttaaacgttagacctaaaaccataaaaaccctagaagaaaacctaggcattaccattcaggacataggcgtgggcaaggacttcatgtccaaaacaccaaaagcaatggcaacaaaagccaaaattgacaaatgggatctaattaaactaaagagcttctgcacagcaaaagaaactaccatcagagtgaacaggcaacctacaacatgggagaaaattttcgcaacctactcatctgacaaagggctaatatccagaatctacaatgaactcaaacaaatttacaagaaaaaaacaaacaaccccatcaaaaagtgggcgaaggacatgaacagacacttctcaaaagaagacatttatgcagccaaaaaacacatgaagaaatgctcatcatcactggccatcagagaaatgcaaatcaaaaccactatgagatatcatctcacaccagccaaaattcagaatgggtcgagaaatatagttaagagcaacatgaattgcttaatatcgcaaaacagtcctcaggtaccgtgtacaactgttgcaaaatatcatcctaattcccgtgtaactccagaaccacgaagtggaacaccaaaggaagacagaagatggatacttatgacttctgggaaattatacttccttattcaaaaatctactgaacacatgctgtctgggagaaaagattga

SEQ ID NO: 118087 - DNA, 4945 bp, Homo sapiens
agacacacataggctcaaaataaagggatggaggaagatttaccaagcaaatggaaaacagaaaaaggcaggggttgcaatcctagtctcagataaaacagaatttaaaccaacaaagatcaaaagagacaaagaaggccattacataatggtaaagggatcaattcaacaagaagagctaactatcctaaatatatatgcacccaatacaggagcacccagattcacaaagcaagtccttagagacctacaaagagacttagactccaacacaataataacgggagactttaacaccccactgtcaacattagacagatcaatgagacagaaagttaacaaggatatccaggaattgaactcagctctgcaccaagcagacctaatagacatctacagaactctccaccccaaatcaacagaaaatacattcttttcggcaccacaccacacctattccaaaattgaccacatagtgggaagtaaagcactcctcagcaaatgtaaaagaaaagaaattataacaaactgtctctcagaccacagtgcaatcaaactagaactcaggattaagaaactccctcaaaactgctcaactatatggaaactgaacaacctgctcctgaatgactactgggtacataacgaaatgaaggcagaaataaagatgttgtttgaaaccaatgagaacaaagacacaacataccagaatctctgggacacattgaaagcagtgtgtagagggaaatttatagcactaaatgcccacgggagaaaacaggaaagatctaaaattgacaccctaacatcacaattaaaagaactagcaaagcaagagcaaacacattcaaaagctagcagaaggcaagaaataactaagatcagagcagaactgaaggaaatagagacacaaaaaacccttcaaaaaattaatgaatccaggagctggttttttgaaaggatcaacaaaattgatagaccgctagcaagactaataaagaaaaaaagagagaagaatcaaatagacacaataaaaaatgataaaggggatatcaccaccgatcccacagaaatacaaactaccatcagagaatactacaaacacctctacgcaaataaactagaaaatctggaagaaatggatacattcctcgacacatacactctcccaagactaaaccaggaagaagttgaatctctgaatcgaccaataacaggctctgaaattgtggcaataatcaatagtttaccaaccaaaaagagtccaggaccagatggattcacagccgaattctaccagaggtacaaggaggaactggtaccattccttctgaaactattccaatcaatagaaaaagagggaatcctccctaactcattttatgagaccagcatcattctgataccaaagccgggcagagacacaaccaaaaaagagaattttagaccaatatccttgatgaacattgatgcaaaaatcctcaataaaatactggcaaaccgaatccagcagcacatcaaaaagcttatccaccatgatcaagtgggcttcatccctgggatgcaaggctggttcaatatacgcaaatcaataaatgtaatccagcatataaacagagccaaagacaaaaaccacatgattatctcaatagatgcagaaaaagcctttgacaaaattcaacaacccttcatgctaaaaactctcaataaattaggtattgatgggacgtatttcaaaataataagagctatctatgacaaacccacagccaatatcatactgaatggacaaaaactggaagcattccctttgaaaactggcacaagacagggatgccctctctcaccgctcctattcaacatagtgttggaagttctggccagggcaatcaggcaggagaaggaaataaagggtattcaattaggaaaagaggaagtcaaattgtccctgtttgcagacgacatgattgtttatctagaaaaccccatcgtctcagcccaaaatctccttaagctgataagcaacttcagcaaagtctcaggatacaaaatcaatgtacaaaaatcacaagcattcttatacaccaacaacagacaaacagagagccaaatcatgagtgaactcccattcacaattgcttcaaagagaataaaatacctaggaatccaacttacaagggatgtgaaggacctcttcaaggagaactacaaaccactgctcaaggaaataaaagaggagacaaacaaatggaagaacattccatgctcatgggtaggaagaatcaatatcgtgaaaatggccatactgcccaaggtaatttacagattcaatgccatccccatcaagctaccaatgactttcttcacagaattggaaaaaactactttaaagttcatatggaaccaaaaaagagcccgcattgccaagtcaatcctaagccaaaagaacaaagctggaggcatcacactacctgacttcaaactatactacaaggctacagtaaccaaaacagcatggtactggtaccaaaacagagatatagatcaatggaacagaacagagccctcagaaataatgccgcatatctacaactatctgatctttgacaaacctgagaaaaacaagcaatggggaaaggattccctgtttaataaatggtgctgggaaaactggctagccatatgtagaaagctgaaactggatcccttccttacaccttatacaaaaatcaattcaagatggattaaagatttaaacgttaaacctaaaaccataaaaaccctagaagaaaacctaggcattaccattcaggacataggcgtgggcaaggacttcatgtccaaaacaccaaaagcaatggcaacaaaagacaaaattgacaaatgggatctaattaaactaaagagcttctgcacagcaaaagaaactaccatcagagtgaacaggcaacctacaacatgggagaaaatttttgcaacctactcatctgacaaagggctaatatccagaatctacaatgaactcaaacaaatttacaagaaaaaaacaaacaaccccatcaaaaagtgggcgaaggacatgaacagacacttctcaaaagaagacatttatgcagccaaaaaacacatgaagaaatgctcatcatcactggccatcagagaaatgcaaatcaaaaccactatgagatatcatctcacaccagttagaatggcaatcattaaaaagtcaggaaacaacaggccagaaaagaccaaaagttttttacctcctttgccaacacaaagttcaattcacagtggtttcctagagcattgtgttgaacaggattctgaggctctgtctggagaggctggtaaaagtctgatgtttgccatgggtgtaggaagtgaacgagcaaagcatagcctcagtgacgatggccagctccgtggtgccaaggtggctacagcactgacaccctctccaacgccgcattctgatgcagatgataacacccacctcgccctccgccacgatgagcaaatgagcgcgagcgagggcatgaaatttaaattccactcaggggagaaagtgctgtgcttcgagcctgaccccaccaaggcgcgagtgctgtacgatgccaagattgttgatgttattgttgggaaagacgaaaaaggcagaaagatcccagaatatctgatccattttaatggttggaacagaagctgggatagatgggcagcagaagatcatgtgcttcgtgataccgatgaaaatcgtagattacagcgtaaattggcaagaaaagctgtagctcgcctgaggagcacaggaagaaagaagaagcgctgcaggttgcctggtgtggactctgtcttaaaaggcctccccactgaagaaaaagatgaaaatgatgaaaactcattaagcagttcctctgactgtagtgaaaacaaggatgaagaaataagtgaagaaagtgatattgaagaaaagactgaagtgaaagaagaaccagagcttcaaacaagaagggaaatggaagaaagaacaataactatagaaatccctgaagttctgaagaagcagctggaggatgattgttactacattaacaggaggaaacggttagtgaaacttccatgccagaccaacatcataacgattttggaatcctatgtgaagcattttgctatcaatgcagccttttcagccaatgagaggcctcgtcaccatcacgttatgccacatgccaacatgaacgtgcattatatcccagcagaaaagaatgttgacctttgtaaggagatggtggatggattaagaataacctttgattacactctcccgttggttttactctatccatatgaacaagctcagtataaaaaggtgacttcgtctaaattttttcttccaattaaggaaagtgccacaagcactaacaggagccaggaggaactctctcccagtccgcctttgttgaatccatccacgccacagtccacagagagtcagccgaccaccggtgaaccagccacccccaaaaggcgcaaagctgagccagaagcattgcagtctctgaggcggtccacgcgccacagtgccaactgtgacaggctttctgagagcagcgcttcacctcagcccaagcgccggcagcaggacacatccgccagcatgcccaagctcttcctgcacctggaaaagacctcgcctgctgtgctgactccttcaggggtccttctaagcatcatcctgttggaactcccaaaagtcatcccagtgccattctgtgttcaggtgcccatttccttgtgtacatcctgtccctgccacatccataagctcctgagagaaaggtttttagcagaataccacgatgacttcttcccagagtcggcttatgtcgctgcctgtgaggcacattacagcaccaagaacccccgggcaatttattaa

SEQ ID NO: 118088 - DNA, 6750 bp, Homo sapiens
atggtaaagggatcaattcaacaagaggagctaactatcctaaatatttatgcacccaatacaggagcacccagattcataaagcaagtcctgagtgacatacaaagagacttagactcccacacattaataatgggagactttaacaccccactgtcaacattagacagatcaacgagacagaaagtcaacaaggatacccaggaattgaactcagctctgcaccaagcggacctaatagacatctacagaactctccaccccaaatcaacagaatatacatttttttcagcaccacaccacacctattccaaaattgaccacatagttggaagtaaagctctcctcagcaaatgtaaaagaacagaaattataacaaactgtctctcagaccacggtgcaatcaaactagaactcaggattaagaatctcactcaaagccgctcaactacatggaaactgaacaacctgctcctgaatgactactgggtacataacgaaatgaaggcagaaataaagatgttctttgaaaccaacgagaacaaagacaccacataccagaatctctgggacgcattcaaagcagtgtgtagagggaaatttatagcactaaatgcctacaagagaaagcaggaaagatccaaaatcgacaccctaacatcacaattaaaagaactagaaaagcaagagcaaacacattcaaatgctagcagaaggcaagaaataactaaaatcagagcagaactgaaggaaatagagacacaaaaaacccttcaaaaaatcaatgaatccaggagctggttttttgaaaggatcaacaaaattgatagaccgctagcaagactaataaagaaaaaaagagagaagaatcaaatagacacaataaaaaatgataaaggggatatcaccaccgatcccacagaaatacaaactaccatcagagaatactacaaacacctctacgcaaataaactagaaaatctagaagaaatggatacattcctcgacacatacactctcccaagactagaccaggaagaagttgaatctctgaatagaccaataacaggctctgaaattgtggcaataatcaatagtttaccaaccaaaaagagtccaggaccagatggattcacagccgaattctaccagaggtacaaggaggaactggtaccattccttctgaaactattccaatcaatagaaaaagagggaatcctccctaactcattttatgaggccagcatcattctgataccaaagccgggcagagacacaaccaaaaaagagaattttagaccaatatccttgatgaacattgatgcaaaaatcctcaataaaatactggcaaaacgaatccagcagcacatcaaaaagcttatccaccatgatcaagtgggcttcatccctgggatgcaaggctggttcaatatatgcaaatcaataaatgtaatccagcatataaacagagccaaagacaaaaaccacatgattatctcaatagatgcagaaaaagcctttgacaaaattcaacaacccttcatgctaaaaactctcaataaattaggtattgatgggacgtatttcaaaataataagagctatctatgacaaacccacagccaatatcatactgaatgggcaaaaactggaagcattccctttgaaaactggcacaagacagggatgccctctctcaccgctcctattcaacatagtgttggaagttctggccagggcaatcaggcaggagaaggaaataaagggtattcaattaggaaaagaggaagtcaaattgtccctgtttgcagacgacatgattgtttatctagaaaaccccatcgtctcagcccaaaatctccttaagctgataagcaacttcagcaaagtctcaggatacaaaatcaatgtacaaaaatcacaagcattcttatacaccaacaacagacaaacagagagccaaatcatgagtgaactcccattcacaattgcttcaaagagaataaaatacctaggaatccaacttacaagggatgtgaaggacctcttcaaggagaactacaaaccactgctcaaggaaataaaagaggacacaaacaaatggaagaacattccatgctcatgggtaggaagaatcaatattgtgaaaatggccatactgcccaaggtaatttacagattcaatgccatccccatcaagctaccaatgactttcttcacagaattggaaaaaactactttaaagttcatatggaaccaaaaaagagcccgcatcgccaagtcaatcctaagccaaaagaacaaagctggaggcatcacactacctgacttcaaactatattacaaggctacagtaaccaaaacagcatggtactggtaccaaaacagagatatagatgaatggaacagaacagagccctcagaaataatgccgcatatctacaactatctgatctttgacaaacctgagaaaaacaagcaatggggaaaggattccctatttaataaatggtgctgggaaaactggctagccatatgtagaaagctgaaactggatccctttcttacaccttatacaaaaatcaattcaagatggattaaagatttaaacgttagacctaaaaccataaaaaccctagaagaaaacctagacattaccattcaggacataggcgtgggcaaggacttcatgtccaaaacaccaaaagcaatggcaacaaaagacaaaattgacaaatgggatctaattaaactaaagagcttctgcacagcaaaagaaactaccatcagagtgaacaggcaacctacaacatgggagaaaattttcgcaacctactcatctgacaaagggctaatatccagaatctacaatgaactcaaacaaatttacaagaaaaaaacaaacaaccccatcaaaaagtgggtgaaggacatgaacagacacttctcaagagaagacatttatgcagccaaaaaacacatgaaaaaatgctcatcatcactggccatcagagaaatgcaaatcaaaaccactatgaggttttactgggatttaataatgcttataatgatggttggaaatctagtcatcataccagttggaatcacattctttacagagcaaacaacaacaccatggattattttcaatgtggcatcagatacagttttcctattggacctgatcatgaattttaggactgggactgtcaatgaagacagttctgaaatcatcctggaccccaaagtgatcaagatgaattatttaaaaagctggtttgtggttgacttcatctcatccatcccagtggattatatctttcttattgtagaaaaaggaatggattctgaagtttacaagacagccagggcacttcgcattgtgaggtttacaaaaattctcagtctcttgcgtttattacgactttcaaggttaattagatacatacatcaatgggaagaggaacgcagctcctcaccagcaacagaacaaagctggacggagaatgactttgacgagctgagagaagaaggtttcagacgatcaaattactctgagctacgggaggacattcaaaccaaaggcaaagaagttgaaaactttgaaaaaaatttagaagaatgtataactagaataaccaatacagagaagtgcttaaaggagctgatggagctgaaaaccaaggctcgagaactacgtgaagaatgcagaagcctcaggagccgatgcgatcaactggaagaaagggtatcagcaatggaagatgaaatgaatgaaatgaagcaagaagggaagatcaaaagagacaaagaaggccattacataatggtaaagggatcaattcaacaagaagagctaactatcctaaatatatatgcacccaatacaggagcacccagattcataaagcaagttctgagtgacctacaaagagacttagactcccacacattaataatgggagactttaacacctcactgttaacattagacagatcaatgagacagaaagtcaacaaggatacccaggaattgaactcatctctgcaccaagcggacctaatagacatctacagaactctccaccccaaatcaatagaatatacatttttttcagcaccacaccacacctattccaaaattgaccacatagttggaagtaaagctctcctcagcaaatgtaaaagaacagaaattataacaaactatctctcagaccacagtgcaatcaaactagaactcaggattaagaatctcactcaaagccgctcaactacatggaaactgaacaacctgctcctgaatgactactgggtacataacgaaatgaaggcagaaataaagatgttctttgaaaccaacgagaacaaagacacaacataccagaatctctgggacgcattcaaagcagtgtgtagagggaaatttatagcactaaatgcccacaagagaaagcaggaaagatccaaaattgacaccctaacatcacaattaaaagaactagaaaagcaagagcaaacacattcaaaagctagcagaaggcaagaaataactaaaatcagagcagaactgaaggaaatagagacacaaaaaacccttcaaaaaatcaatgaatccaggagctggttttttgaaaggatcaacaaaattgatagaccgctagcaagactaataaagaaaaaaagagaggagaatcaaatagacacaataaaaaatgataaaggggatatcaccaccgatcccacagaaatacaaactaccatcagagaatactataaacacctctacgcaaataaaccagaaaatctagaagaaatggataaattcctcgacacatacactctcccaagactaaagcaggaagaagttgaatctctgaatagaccaataacaggagctgaaattgtggcaataatcaatagtttaccaaccaaaaagagtccaggaccagatggattcacagccgaattctaccagaggtacaaggaggaactggtaccattccttctgaaactattccaatcaatagaaaaagagggaatcctccctaactcattttatgaggccagcatcattctgataccaaagccgggcagagacacaaccaaaaaagagaattttagaccaatatccttgatgaacattgatgcaaaaatcctcaataaaatactggcaaaccgaatccagcagcacatcaaaaagcttatccaccatgatcaagtgggcttcatccctgggatgcaaggctgccaatatcatactgaatgggcaaaaactggaagcattcctttgaaaactggcacaagacagggatgccctctctcaccactcctattcaacacagtgttggaagttctggccagggcaatcaggcaggagaaggaaataaagggtattcaattaggaaaagaggaagtcaaattgtccctttttgcagacgacatgattgtttatctagaaaaccccatcgtctcagcccaaaatctccttaagctgataagcaacttcagcaaagtctcaggatacaaaatcaatgtacaaaaatcacaagcattcttatacaccaacaacagacaaacagagagccaaatcatgagtgaactcccattcacaattgcttcaaagagaataaaatacctaggaatccaatttacaagggatgtgaaggacctcttcaaggagaactacaaaccactgctcaaggaaataaaagaggatacaaacaaatggaagaacattccatgctcatgggtaggaagaatcaatatcgtgaaaatggccatactgcccaaggtaatttacagattcaatgccatccccatcaagctaccaatgactttcttcacagaattggaaaaaactactttaaatttcatatggaaccaaaaaagagcccgcatcgccaagtcaatcctaagccaaaagaacaaagctggaggcatcacactacctgacttcaaactatactacaaggctacagtaactaaaacagcatggtactggtaccaaaacagagatatagatcaatggaacagaacagagccctcagaaataacgccgcatacctacaattatctgatctttgacaaacctgagaaaaacaagcaacggggaaaggattccctatttaataaatggtgctgggaaaactggctagccatatgtagaaagctgaaactggatcccttccttacaccttatacaaaaatcaattcaagatggattaaagatttaaacgttagacctaaaaccataaaaatcctagaagaaaacctaggcattaccattcaggacataggcgtgggcaaggacttcatgtccaaaacaccaaaagcaatggcaacaaaagccaaaattgacaaatgggatctaattaaactaaagagcttctgcacagcaaaagaaactaccatcagagtgaacaggcaacctacaacatgggagaaaattttcgcaacctactcatctgacaaagggctaatatccagaatctacaatgaactcaaacaaatttacaagaaaaaaacaaacaaccccatcaaaaagtgggcgaaggacatgaacagacacttctcaaaagaagacatttatgcagccaaaaaatacatgaaaaaatgctcatcatcactggccatcagagaaatgcaaatcaaaaccacaatgagataccatctcacaccagccccggtgtgtgatgttcgccttcctgtatccaagtgttctcattgttcagttcccacctatgagtga

SEQ ID NO: 118089 - DNA, 4545 bp, Homo sapiens
atggctgcctggaacctgctacttaaatcatatgcatattggggaggtctaaggaaggaagatttccactgtttagaccggaagaccctgaggacagtatcctttctggctgccctgctgtcatatgagtccatagggggcaaaggaaaactaacaaccagaaaggacatctacaccgaaaacccatctgtacatcaccatcatcaaagaccaaaagtagataaaaccacaaagatggggaaaaaacagaacagaaaaactggaaactctaaaatgcagagcgcctctcctcctccaaaggaacgcagttcctcaccagcaacagaacaaagctggatggagaatgattttgaagagctgagagaagaaggcttcagacgatcaaattactctgagctacgggaggacattcaaaccaaaggcaaagaagttgaaaactttgaaaaaaatttagaagaatgtataactagaataaccaatacagagaagtgcttaaaggagctgatggagctgaaaaccaaggctcgagaactacgtgaagaatgcagaagcctcaggagccgatgcgatcaactggaagaaagggtatcagcaatggaagatgaaatgaatgaaatgaagcgagaagggaagtttagagacaaaagaataaaaagaaatgagcaaagcctccaagaaatatgggactatgtgaaaagaccaaatctacgtctgattggtgtacctgaaagtgatgtggagaatggaaccaagttggaaaacactctgcaggatattatccaggagaacttccccagtctagcaaggcaggccaacgttcagattcaggaaatacagagaacgccacaaagatactcctcgagaagagcaactccaagacacataattgtcagattcaccaaagttgaaatgaaggaaaaaatgttaagggcagccagagagaaaggtcgggttaccctcaaaggaaagcccatcagactaacagcggatctctcggcagaaaccctacaagccagaagagagtgggggccaatattcaacattcttaaagaaaagaattttcaacccagaatttcatatccagccaaactaagcttcataagtgaaggagaaataaaatactttatagacaagcaaatgctgagagattttgtcaccaccaggcctgccctaaaagagctcctgaaggaagcgctaaacatggaaaggaacaaccggagaaagcaggaaagatccaaaattgacaccctaacatcacaattaaaagaactagaaaagcaagagcaaacacattcaaaagctagcagaaggcaagaaataactaaaatcagagcagaactgaaggaaatagagacacaaaaaacccttcaaaaaatcaatgaatccaggagctggttttttgaaaggatcaacaaaattgatagaccgctagcaagactaataaagaaaaaaagagagaagaatcaaatagacacaataaaaaatgataaaggggatatcaccactgatcccacagaaatacaaactaccatcagagaatactacaaacacctctacgcaaataaactagaaaatctagaagaaatggatacattcctcgacacatacactctcccaagactaaaccaggaagaagttgaatctctgaatagaccaataacaggctctgaaattgtggcaataatcaatagtttaccaaccaaaaagagtccaggaccagatggattcacagccgaattctaccagaggtacaaggaggaactggtaccattccttctgaaactattccaatcaatagaaaaagagggaatcctccctaactcattttatgaggccagcatcattctgataccaaagccgggcagagacacaaccaaaaaagagaattttagaccaatatccttgatgaacattgatgcaaaaatcctcaataaaatactggcaaaccgaatccagcagcacatcaaaaagcttatccaccatgatcaagtgggcttcatccctgggatgcaaggctggttcaatatacgcaaatcaataaatgtaatccagcatataaacagagccaaagacaaaaaccacatgattatctcaatagatgcagaaaaagcctttgacaaaattcaacaacccttcatgctaaaaactctcaataaattaggtattgatgggaagtatttcaaaataataagagctatctatgacaaacccacagccaatatcatactgaatgggcaaaaactggaagcattccctttgaaaactggcacaagacagggatgccctctctcaccgctcctattcaacatagtgttggaagttctggccagggcaatcaagcaggagaaggaaataaagggtattcagttaggaaaagaggaagtcaaattgtccgtgtttgcagacgacatgattgtttatctagaaaaccccatcgtctcagcccaaaatctccttaagctgataagcaacttcagcaaagtctcaggatacaaaatcaatgtacaaaaatcacaagcattcttatacaccaacaaccgacaaacagagagccaaatcatgagtgaactcccattcacaattgcttcaaagagaataaaatacctaggaatccaacttacaagggatgtgaaggacctcttcaaggagaactacaaaccactgctcaaggaaataaaagaggacacaaacaaatggaagaacattccatgctcatgggtaggaagaatcaatatcgtgaaaatggccatactgcccaaggtaatttacagattcaatgccatccccatcaagctaccaatgactttcttcacagaattggaaaaaactactttaaagttcatatggaaccaaaaaagagcccgcatcgccaagtcaatcctaagccaaaagaacaaagctggaggcatcacactacctgacttcaaactatactacaaggctacagtaaccaaaacagcatggtactggtaccaaaacagagatatagatcaatggaacagaacagagccctcagaaataatgccgcatatctacaactatctgatctttgacaaacctgagaaaaacaagcaatggggaaaggattccctatttaataaatggtgctgggaaaactggctagccatatgtagaaagctgaaactggatcccttccttacaccttatacaaaaatcaattcaagatggattaaagatttaaacgttagacttaaaaccataaaaaccctagaagaaaacctaggcattaccattcaggacataggcgtaggcaaggacttcatgtccaaaacaccaaaagcaatggcaacaaaagccaaaattgacaaatgggatctaattaaactaaagagcttctgcacagcaaaagaaactaccatcagagtgaacaggcaacctacaacatgggagaaaattttcgcaacctactcatctgacaaagggctaatatccagaatctacaatgaactcaaacaaatttacaagaaaaaaacaaacaaccccatcaaaaagtgggcaaaggacatgaacagacacttctcaaaagaagacatttatgcagccaaaaaacacatgaagaaatgctcatcatcactggccatcagagaaatgcaaatcaaaaccactatgagatatcatctcacaccagttagaatggcaatcattaaaaagtcaggaaacaacagccctggcgtcaaagccagttcccggcccagtctcgtcctgcagcagcctgccgcctgcctcctctttcctttcaacatgacagatgccgctgtgtccttcaccaaggacttcctggcaggtggagtggcagcagccatctccaagatgggggtagcgcccatcgagagggtcaagctgctgctggaggtacagcatgccagcaagcagatcaccgcagatatgcaatacaagggcattatagactgcgtggtccatattctcaaggagcagggagtcctgtccttctggcaccgtaacctggtcaatgtcctcagatacttccccacccaggctctcaacttggccttcaaagataaacacaagcagatcttcctgggtggtgtggacaagaggacccagtttgggagctactttgcagggaatccggcatcaggtggtgccgctggggccacatccttgtgttttgtgtaccctcttgattttgcccatacctgtctagcagctgacggtattatcatctaccgagctgcctactttggtatctatgacactgcaaagggaatgcttccggatcccaggaacactcacatcatcatcagctggatgatcactcagactgtcactgccattgctgggttgacttcccatccatttgacaccgttcgatgccgcatgatgatgcagtcagggcgcaaaggaattgacgtcatgtacacaggcacgcttgactgctggaggaagattgttggtgatgaaggaggcaaagattttttcaagggtgcatggtccagtgttctcagaggcatggatggtgcttttgtgcttgtcttgtatggtgaaatcaagaagtacacataa

SEQ ID NO: 118090 - DNA, 3638 bp, Homo sapiens
atggggaaaaaacagaacagaaaaactggaaactctaaaacgcagagcgcctctcctcctccaaaggaacgcagttcctcaccagcaacagaacaaagctggatggagaatgattttgacgagctgagagaagaaggcttcagacgatcaaattactctgagctatgggaggacattcaaaccaaaggcaaagaagttgaaaactttgaaaaaaatttagaagaatgtataactagaataaccaatacagagaagtgcttaaaggagctgatggagctgaaaaccaaggctcgagaactacatgaagaatgcagaagcctcaggagccgatgcgatcaactggaagaaagggtatcagcaatggaagatgaaatgaatgaaatgaagcgagaagggaagtttagagaaaaaagaataaaaagaaatgagcaaagcctccaagaaatatgggactatgtgaaaagaccaaatctacgtctgattggtgtacctgaaagtgatgtggagaatggaaccaagttggaaaacactctgcaggatattatccaggagaacttccccaatctagcaaggcaggccaacgttcagattcaggaaatacagagaatgccacaaagatactcctcgagaagagcaactccaagacacataattgtcagattcaccaaagttgaaatgaaggaaaaaatgttaagggcagccagacagaaagcaccacaccacacctattccaaaattgaccacatagttggaagtaaagctctcctcagcaaatgtaaaagaacagaaattataacaaactatctctcagaccacagtgcaatcaaactagaactcaggattaagaatctcactcaaagccgctcaactacatggaaactgaacaacctgctcctgaatgactactgggtacataacgaaatgaaggcagaaataaagatgttctttgaaaccaacgagaacaaagacaccacataccagaatctctgggacacattcaaagcagtgtgtagagggaaatttatagcactaaatgcctacaagagaaagcaggaaacatccaaaattgacaccataacatcacaattaaaagaactagaaaagcaagagcaaacacattcaaaagctagcagaaggcaagaaataactaaaatcagagcagaactgaaggaaatagagacacaaaaaacccttcaaaaaatcaatgaatccaggagctggttttttgaaaggatcaacaaaattgatagaccgctagcaagactaataaagaaaaaaagagagaagaatcaaatagacacaataaaaaatgataaaggggatatcaccaccgatcccacagaaatacaaactaccatcagagaatactacaaacacctctacgcaaataaactagaaaatctagaagaaatggatacattcctcgacacatacactctcccaagactaaaccaggaagaagttgaatctctgaatagaccaataacaggctctgaaattgtggcaataatcaatagtttaccaaccaaaaagagtccaggaccagatggattcacagccgaattctaccagaggtacaaggaggaactggtaccattccttctgcaactattccaatcaatagaaaaagagggaatcctccctaactcattttatgaggccagcatcattctgataccaaagccgggcagagacacaaccaaaaaagagaattttagaccaatatccttgatgaacattgatgcaaaaatcctcaataaaatactggcaaaccgaatccagcagcacatcaaaaagcttatccaccatgatcaagtgggcttcatccctgggacgcaaggctggttcaatatacgcaaatcaataaatgtaatccagcatataaacagagccaaagacaaaaaccacatgattatctcaatagatgcagaaaaagcctttgacaaaattcaacaacccttcatgctaaaaactctcaataaattaggtattgatgggacatatttcaaaataataagagctatctatgacaaacccacagccaatatcatactgaatgggcaaaaactggaagcattccctttgaaaactggcacaagacagggatgccctctctcaccgctcctattcaacatagtgttggaagttctggccagggcaatcaggcaggagaaggaaataaagggtattcaattaggaaaagaggaagtcaaattgtccctgtttgcagacgacatgattgtttatctagaaaaccccatcgtctcagcccaaaatctccttaagctgataagcaacttcagcaaagtctcaggatacaaaatcaatgtacaaaaatcacaagcattcttatacaccaataacagacaaacagagagccaaatcatgagtgaactcccattcacaattgcttcaaagagaataaaatacctaggaatccaacttacaagggatgtgaaggacctcttcaaggagaactacaaaccactgctcaaggaaataaaagaggacacaaacaaatggaagaacattccatgctcatgggtaggaagaatcaatatcgtgaaaatggccatactgcccaaggtaatttacagattcaatgccatccccatcaagctaccaatgactttcttcacagaattggaaaaaactactttaaagttcatatggaaccaaaaaagagcctgcatctccaagtcaatcctaagccaaaagaacaaagctggaggcatcacactacctgacttcaaactatactacaaggctacagtaaccaaaacagcatggtactggtaccaaaacagagatatagatcaatggaacagaacagagccctcagaaataatgccacatatctacaactatctgatctttgacaaacctgagaaaaacaagcaatggggaaaggattccctatttaataaatggtgctgggaaaactggctagccatatgtagaaagctgaaactggatcccttccttacaccttatacaaaaatcaattcaagatggattaaagatttaaacgttagacctaaaaccataaaaaccctagaagaaaacctaggcattaccattcaggacataggcgtgggcaaggacttcatgtccaaaacaccaaaagcaatggcaacaaaagccaaaattgacaaatgggatctaattaaactaaagagcttctgcacagcaaaagaaactaccatcagagtgaacaggcaacctacaacatgggagaaaattttcacaacctactcatctgacaaagggctaatatccagaatctacaatgaactcaaacaaatttacaagaaaaaaacaaacaaccccatcaaaaagtgggcgaaggacatgaacagacacttctcaaaagaagacatttatgcagccaaaaaacacatgaagaaatgctcatcatcactggccatcagagaaatgcaaatcaaaaccactatgagatatcatctcgcaccagttagaatggcaatcattaaaaagtcaggaaacaacagagatcagagagctgggaagatcagtgaaagacttgtgattacctcagaaatgattgaaaatatccaatctgttaaggcatactgctgggaagaagcaatggaaaaaatgattgaaaacttaagaca

SEQ ID NO: 118091 - DNA, 3588 bp, Homo sapiens
gatcaaattcacacataacaatattaaccttaaatgtaaatgggctaaatgctccaattaaaagacacagactggcaaattggataaagagtcaagacccatcagtgtgctgtattcaggagacccatctcacgtgcagagacacacacaggatcaaaataaagggatggagggagatctaccaagcaaatggaaaacaaaaaaaggcaggggttgcaatcctagtctctgataaaacggactttaaaccaacaaagatcaaaagagacaaagaaggccattacatgatggtaaagggatcaattcaacaagaagagctaactaccctaaatatatatgcacccaatacaggagcacccagattcataaagcaagtccttagagacctacaaagagacttagactcccacacattaataatgggagactttaacaccccactgtcaacattagacagatcaacgagacagaaagttaacaaggatatccaggatttgaactcagctctgcaccaagtggacctaatagacatctacagaactctccaccccaaatcaacagaatatacattcttctcagcactacaccacatttattccaaaattgaccacatagttggaagtaaagcactcctcagcaaatataaaacaacagaaattataacaaactgtctctcagaccacagtgcaatcaaactcgaactcaggattaagaaactcactcaaaaccgctcaactacatggaaactgaacaacctgctcctgaatgactactgggtacataacaaaatgaaggcagaaataaatacattatttgaaaccaacgagaacaaagacacaacataccagaatctctgggacacattcaaagcagtgtgtagagggaaattcatagcactaaatgcccacaagagaaagcaggaaagatctaaaattgacaccctaacatcacaattaaaagaactagagaagcaagaacaaacacattcaaaagctagcagaaggcaagaaataactaagatcagagcaaaactgaaggaaatagagacacaaaaaatccttcaaaaaatcaatgaatccaggagctggttttttgaaaagatcaacaaaattgatagaccactagcaagaccaataaagaagaaaagagagaagaatcaaatagatgcaataaaaaatgataaaggggatatcaccactgatcccacagaaatacaaactaccatcagagaatactataaacacctctatgcaaataaactagaaaatctagaagaaatggataaattcctcaacacatacaccctcccaagactaaaccaggaagaagttgaatctctgaataaaccaataacaggctctgaaattgaggcaataattaatagcttaccaatcaaaaaaagtccaggaccagatggattcatagccaaattccaccagaggtacaaggaggagctggaggccagcatcatcctgataccaaagcctggcagagacacaaccaaaaaaagagaattttagaccaatatccttgatgaacattgatgcaaaaatcctcaataaaatactggcaaaccgaatccagcagcacatcaaaaagcttatccaccatgatcaagtgggcttcatccctgggatgcaaggctggttcaatatacgcaaatcaataaatgtaatccagcatataaacagagccaaagacaaaaaccacatgattatctcaatagatgcagaaaaagcctttgacaaaattcaacaacccttcatgctaaaaactctcaagaaattaggtattgatgggacatatttcaaaataataagagctatctatgacaaacccacagccaatatcataccgaatgggcaaaaactggaagcattccctttgaaaactggcacaagacagggatgccctctctcaccactcctattcaacatagtgttggaagttctggccagggcaattaggcaagagaaggaaataaagggtatccaattaggaaaagaggaagtcaaattgtccctgtttgcagatgacatgattctctatctagaaaaccccattgtctcagcccaaaatctccttaagctgataagcaacttcagcaaagtctcaggatacaaaatcaatgtacaaaaatcacaagcattctcatacaccaacaatagacaaacagagagccaaatcatgagtgaactcccattcacaattgcttcaaagagaataaaatatctaggaatccaacttacaagggatgtgaaggacctcttcaaggagaactacaaaccactgctcaaggaaataaaagaggatacaaacaaatggaagaacattccatgctcatgggtaggaagaatcaatatcgtgaaaatggccatactgcccaaggtaatttacagattcaatgccatccccatcaagctaccaatgactttcttcacagaattggaaaaaactactttaaagttcatatggaaccaaaaaagagcccgcatcaccaagtcaatcctaagccaaaagaacaaagctggaggcatcacactacctgacttcaaactatactacaagattacagtaaccaaaacagcatggtactggtaccaaaacagagatatagatcaatggaacagaacagagccctcagaaataatgccgcatacctacaactatctgatctttgacaaacctgagaaaaacaagcaatggggaaaggattccctatttaataaatggtgctgggaaaactggctagccatatgtaggagaaagctgaaactggatcccttccttacaccttatacaaaaattaattcaagatggattaaagacttaaatgttagacctaaaaccataaaaaccctagaagaaaacctaggcaataccattcaggacataggcatgggcaaggacttcatgtctacaacaccaaaagcaatggcaacaaaagccaaaattgacaaatgggatctaattaaactaaagagcttctgcacagcaaaagaaactaccatcacagtgaacaggcaacctacagaatgggagaaaatttttacaatctacccatctgacaaagggctaatatccagaatctacaaagaactcaaacaaatttacaagaaaagaacaaacaaccccatcaacaagtgggtgaaggatatgaacagacacttctcaaaagaagacatttatacagccaaaaggcacatgaaaaaatgctcatcatcactggccatcagagaaatgcaaatcaaaaccacattgagataccatctcataccagttagaatggcgatcattaaaaagtcaggaaacaacagcaaagcccggatgatctcagcagagaactgctctcctaaactcactgagaaaatagaactctcagattggaattctccaaatattcaaacctgcacggatcctctctttttgtgtcctactgagagagctgtaacactcactgtgaaggtctgtggcttcactcctgaagtcattgagaccacgaacccaccaggaggaacaaacaactccggacgtgacacccttaagagctgtaacactcactgcgaaggtctgcggcttcactcctga

SEQ ID NO: 118092 - DNA, 8907 bp, Homo sapiens
cctccggtctacagctcccagcgtgagcgacgcagaagacgggtgatttctgcatttccatctgaggtaccgggttcatctcactagggagtgccagacagtgggcgcaggccagtgggtgcgcgcaccgtgcggagccgaagcagggcgaggcattgcctcacctgggaagcgcaaggggtcagggagttccctttccgagtcaaagaaaggggtgacggacgcacctggaaaatcgggtcactcccacccgaatattgcgcttttcagaccggcttaaaaaacggcgcaccacgagactatatcccacacctggccttcggagggtcctacgcccacggaatctcgctgattgctagcacagcggtctgagatcaaactgcaaggccgcagcaaggctgggggaggggcgcccgccattgcccaggcttgcttaggtaaacaaagcagccggggaagctcgaactgggtgcagcccaccacagctcaaggaggcctgcctgcctctgtaggctccacctctgggggcagggcacagacaaacaaaaagacagcagtaacctctgcagacttaaatgtccctgtctgacagctttgaagagagcagtggttctcccagcacgcagctggagatctgagaacgggcagactgcctcctcaagtgggtccctgacccctgacccccgagcagcctaactgggaggcaccccccagcaggggcacactgacacctcacacggcagggtattccaacagacctgcagctgagggtcctgtctgttagaaggaaaactaacaaacagaaaggacatccacaccgaaaacgcatctgtacatcaccatcatcaaagaccaaaagtagataaaaccacaaagatggggaaaaaacagaacagaaaaactggaaactctaaaacgcagagcacctctcctcctccaaaggaacgcagttcctcaccagcaacggaccaaagctggatggagaatgattttgacgagctgagagaagaaggcttcagacgctcaaattactctgagctacgggaggacattcaaaccaaaggcaaagaagttgaaaactttgaaaaaaatttagaagaatgtataactagaataaccaatacagagaagtgcttaaaggagctgatggagctgaaaaccaaggctcgagaactacgtgaagaatgcagaagcctcaggagccaatgcgatcaactggaagaaagggtatcagcaatggaagatgaaatgaatgaaatgaagcaagaagggaagtttagagaaaaaagaataaaaagaaacgagcaaagcctccaagaaatatgggactatgtgaaaagaccaaatctacgtctgattggtgtacctgaaagtgatgcggagaatggaaccaagttggaaaacactctgcaggatattatccaggagactttccccaatctagcaaggcaggccaacgttcagattcaggaaatacagagaacgccacaaagatactcctcgagaagagcaactccaagacacataattgtcagattcaccaaagttgaaatgaaggaaaaaatgttaagggcagccagagagaaaggtcgagttaccctcaaagggaagcccatcagactaacagcggatctctcggcagaaaccctacaagccagaagagagtgggggccaatattgaacattcttaaagaaaagaattttcaacccagaatttcatatccagccaaactaagcttcataagtgaaggagaaataaaatactttacagacaagcaaatgctgaccgattttgtcaccagcaggcctgccctaaaagagctcctgaaggaagcgctaaacatggaaaggaacaaccggtaccagccactgcaaaatcatgccaaaatgtaaagaccatcgagactaggaagaaactgcatcaactaacgagcaaaatcaccagctaacatcataatgacaggatcaaattcacacataacaatattaactttaaatgtaaatggactaaattctccaattaaaagacacagactggcaagttggataaagagtcaagacccatcagtgtgctgtattcaggaaacccatctcatgtgcagagacacacataggctcaaaataaaaggatggaggaagatctaccaagcaaatggaaaacaaaaaaaggcaggggttgcaatcctagtctctgataaaacagactttaaaccaacaaagatcaaaagagacaaagaaggccattacatgatggtaaagggatcaattcaacaagaggagctaactatcctaaatatgtatgcacccaatacaggagcacccagattcataaagcaagtcctgagtgacctacaaagagacttagactcccacacattaataatgggagactttaacaccccactgtcaacattagacagatcaacgagacagaaagtcaacaaggatacccaggaattgaactcagctctgcaccaagcagacctaatagacatctacagaactctccaccccaaatcaacagaatatacatttttttcagcaccacaccacagctattccaaaattgaccacatacttggaagtgaagctctcctcagcaaatgtaaaagaacagaaattataacaaactatctctcagaccacagtgcaatcaaactagaactcaggattaagaatctcactcaaagccgctcaactacatggaaactgaacaacctgctcctgaatgactactgggtacataacgaaatgaaggcagaaataaagatgttctttgaaaccaacgagaacaaagacacaacataccagaatctctaggacgcattcaaagcagtgtgtagagggaaatttatagcactaaatgcccacaagagaaagcaggaaaagatccaaaattgacactctaacatcacaattaaaagaactagaaaagcaagagcaaacacattcaaaagctagcagaaggcaagaaataactaaaatcagagcagaactgaaggaaatagagacacaaaaaacccttcaaaatatcaatgaatccaggagctggttttttgaaaggatcaacaaaattgatagaccgctagcaagactaataaagaaaaaaagagagaagaatcaaatagacacaataaaaaatgataaaggggatatccaccaccgatctcacagaaatacaaactaccatcagggaatactacaaacacctctacgcaaataaactagaaaatctagaagaaatggataaattcctcgacacatacactctcccaagactaaaccaggaagaagttgaatctctgaatagaccgataacaggagctgaaattgtggcaataatcaatagcttaccaaccaaaaggagtgcaggaccagatggattcacagctgaattctaccagaggtacaaggaggaactggtaccattccttctgaaactattccaatcaatagaaaaagagggaatcctccctaactcattttgtgaggccagcatcattctgataccaaagccaggcagagacacaacaaaaaaagagaattttagaccaatatccttgatgaacattgatgcaaaaatcctcaataaaatactggcaaaacgaatccagcagcacatcaaaaagcttatccaccatgatcaagtgggcttcatccctgggatgcaaggctggttcaatatacgcaaatcaataaatgtaatccagcatatcaacagagccaaagacaaaaaccacatgattatctcaatagatgcagaaaaggcctttgacaaaattcaacaacacttcatgctaaaaactctcaatagattaggtattgatgggacgtatttcaaaataataagagctatctatgacaaacccacagccaatatcatactgaatgggcaaaaactggaagcattccctttgaaaactggcacaagacaaggatgccctctctcaccactcctattcaacatagtgttggaagttctggccagggcaattaggcaggagaaggaaataaaaggtattcaattaggaaaagaggaggtcaaattgtgcctgtttgcagacgacatgattgtgtatctagaaaaccccattgtctcagcccaaaatctccttaagctgataagcaacttcagcaaagtctcaggatacaaaatcaatggacaaaaatcacaagcattcttatacaccaacaacagacaaacagagagccaaatcatgagtgaactcccattcacaattgcgtcaaagagaataaaatacctaggaatccaacttacaagggatgtgaaggacctcttcaaggagaactacaaaccactgctcaacaaaataaaagaggatacaaagaaatggaagaatattccatgctcatgggtaggaagaatcaatatcatgaaaatggccatactgcccaaggtaatttacagattcaatgccatccccatcaagctaccaatgactttcttcacagaattggaaaacactactttaaagttcatatggaaccaaaaaagagcccgcatctccaaggcagtcctaagccaaaagaacaaagctggaggcgtcacactacctgacttcaaactatactacaaggctacagtaaccaaaacagcatggtactggtaccaaaacagagatatagatcaatggaacagaacagagccctcagaaataacggcacataactacaactatctgatctttgacaaacctgagaaaaacaagcaatggggaaaggattccctatttaataaatggtgctgggaaaactggctagccatatgtagaaagctgaaactggatcccttccttacaccttatacaaaaatcaattcaagatggattaaagatttaaacgttagacctaaaaccataaaaaccctagaagaaaacctaggcattaccattcaggacataggcatgggcaaggacttcatgtctaaaacaccaaaagcaatggcaacaaaagccaacattgacaaatgggatctaattaaactaaagagcttctgcacagcaaaagaaactaccatcagagtgaacaggcaacctacaaaatgggagaaaattttcgcaacctactcatctgacaaagggctaatatccagaatctataatgaactcaaacaaatttacaagaaaaaaaacaaacaaccccatcaaaaagtgggtgaaggacatgaacagacacttctcaaaagaagacatttatgcagccaaaaaacacatgaaaaaatgctcatcatcactggccatcagagaaatgcaaatcaaaaccactatgagatatcatctcacaccagttagaatggcaatcatgaaaaaagtcaggaaacaacagactaacccaggaagaagttgaatctctgaatagatcaataacaggagctgaaattgaggcaataatcaatagcttaccaaccaaaaaagatccaggaccagatggattcacagccgaattctaccacagagaataaaatacctaggaatccaacttacaagggatgtgaaggacctcttcaaggagaactacaaaccactgctcaaggaaataaacgaggatacaaacaaatggaagaacattccatgctcatgggtaggaagaatcaatatcatgaaaatggccatactgcccaaggtaatttatagattcaatgccatccccatcaagctaccaatgactttcttcacagaattggaaaaaactactttaaagttcatatggaaccaaaaaagagcccgcatcaccaagtcaatcctaagccaaaagaacaaagccggaggcatcacactacctgacttcaaactatactacaaggctacagtaaccaaaacagcatggtactgttaccaaaacagagatatagatcaatggaacagagcagagccctcagaaataatgctgcctatctacaactatctgatctttgacaaacctgacaaaaacaagcaatggggaaaggattccctatttaataaatggtgctgggaaaactggctagccatatgtagaaagctgaaactggatcccttccttacaccttatacaaaaattaattcaagatggattaaagacttacatgttagacctaaaaccataaaaaccctagaagaaaacctgggcaataccattcaggacataggcatgggcaaggactttatgtctaaaacaccaaaagcaatggcaacaaaagccaaaattgacaaatgggatctaattaaactaaagagcttctgcacagcaaaagaaactaccatcagagtgaacaggcaacctacaaaatgggagaaaattttcacaacctactcatctgacaaagggctaatatccagaatctacaatgaactcaaacaaatttacaagaaaaaaacaaccccatcaaaaaatttggagtcaaaatatggacctgagaaaatatctccagaaaatgatatttttgaaataaatttacccaaacatgttataaagcaaataagtaaaacacttggcctcgaggccttttattttagaaatgactcagaatatagaagtagatttgagggacgacagggacatcaagaaggatatatcaaccagaagatcatcagctatgaagaaatgcctgcttatactcatgcttctcctattcataatacacataaaccatatgaatgtaaggaatgtgggaaatactttagttgtggttcaaatcttattcagcatcagagtattcatactggagagaaaccctataaatgcaaagaatgtgggaaagcctttcaacttcacatacaacttactcgacatcagaaatttcatactggtgagaaaacttttgaatgtaaggaatgtggaaaagcctttaatcttcccacccagcttaatcgccataagaacattcacacagttaagaaactgtttgaatgtaaggaatgtgggaagtcttttaatcgtagctcaaaccttactcagcatcaaagtattcatgctggtgtaaaaccatatcaatgtaaggagtgtgggaaagcctttaatcgtggttcaaatcttattcagcatcaaaaaattcattccaatgagaaaccctttgtatgtagggaatgtgagatggcctttcgatatcattaccaactcattgaacattgccgaattcatactggcgagaaaccctttgaatgtaaagaatgcagaaaggcctttactcttctgacaaagcttgttcgacatcagaagattcatatgggtgagaagccctttgaatgcagggaatgcgggaaggcctttagtctcctcaatcagcttaatcgccataagaatattcacacaggtgaaaaaccatttgaatgtaaagaatgtgggaagtcctttaatcgtagttcaaaccttattcaacaccagagtattcatgctgatgtaaaaccatatgaatgtaaggagtgtgggaaaggctttaatcgtggtgcaaatcttattcagcatcaaaaaattcattccaatgagaaaccctttgtatgtagggaatgtgagatggcctttcgatatcattaccaacttattcaacattgccaaattcatactggtgggaaaccctttgaatgtaaagaatgtggaaaggcctttagtcttctgacacagcttgctcgacataagaacattcatactggtgagaaaccatttgaatgtaaagactgtgggaaggccttcaatcgtggctcgaaccttgttcaacatcagagtattcacactggtgagaagccctatgaatgtaaggagtgtgggaaggcttttagacttcacctacaactttctcaacatgagaaaactcatacaggtgagaaaccctttgaatgtaaggaatgtgggaaattctttcgtcgtggttcaaatcttaatcaacatcgaagtattcataccggaaagaaaccctttgaatgtaaggaatgtgggaaagcctttcgacttcatatgcaccttattcgacatcagaaatttcatactggtgagaagccctttgaatgtaaggaatgtggcaaggccttcagtcttcacacccagcttaatcaccataagaacattcacacaggtgagaagccatttaaatgtaaagaatgtgggaagtcctttaatcgtgtctcaaaccttgttcaacatcagagtattcatgctggtgtaaaaccatatgaatgtaaggagtgtgggaaaggctttagtcgtgtttcaaaccttattcagcatcagaaaactcattccagtgcgaaaccctttgtatgtaaggagtgtaggaagacctttagatatcattaccagcttactgaacattaccgaattcatactggtgagaaaccctttgaatgtaaagaatgcggaaaggcctttggtcttctgacacagcttgctcaacatcagatcattcatactggtgagaagccatttaaatgtaaggagtgtgggaaggcctttaatcgtggctcaaaccttgttcaacctcagagtattcatactggtgagaaaccctatgaatgtaaggagtgtgggaaggcttttagacttcacctacaactttctctgcatcaaaaacttgtacagaaaattcatacttgggtgaaaacctttgaatgtaaggaatgtgggaaggcctttcaatatcattaccaatttcatggacattatagatttcatattcgtgagaacccttatgaatgtcaaggatgtgggaaatgctttaccagtggtagaaaccttagagtacatcagagaattcatactggtgagaaaccatatcaatgtgaagaatgtgggaaagcctttagtcatagttcaaacctgttaaacatgttaaaattcatactgatgagaaaccctatgaatgtaaggaatgtgaaaaggcctttagcagtaattatgatcttactgtacatctga

SEQ ID NO: 118093 - DNA, 450 bp, Homo sapiens
cagggcagcccgtcggggtcgcgcgagtagaactcgcagagctctgccggtccacagtgcgctttgccgccggcaatggcgtaggtgccgttgagctggcgctcgatgggaaagtggtggaagcgcacatcgtgcacgagcgacagcacatagccgcccagcgagcgcaggcactggcgcagcaggaagagcccgtccgccatgcccgccagcttcaggtgctcctcggcctcggcacgcgagatgctgccgtagaagaagggcaggtgcgccgcggggtctggcatcgcccctgggcctcccgaaacctggggacgtacaggtggatgtccaggcaaacaggccacttgcggggtctctggtcccaatgccaatggagagccggttctgaataccccagcagcagctctgaggcccacggtgggccaggacgaaatggtcggtccgata

SEQ ID NO: 118094 - DNA, 522 bp, Homo sapiens
cttcccatcctcaagaatgtggctgggccagacccagactctgaggacattcagggacactgtgcctcgccagccctctgaagtgctcagaacgtatgtcccgaccccactgaatgccaggaaccatgcactgggaagtgggtggacaggagagacaagacatgctccttccccaagaggaggctgcaggcagcaagggaaacccttaggtcaagactctgtcagacagaaagaaggaaggaaggaaggaaggaaggtaggaaggaaggaaggaaggaaggaaataatggaattctactccgcggtaagtggaacagcatacggagacacgcagttccgcaaacgcatcgcaaaggcctcaggctggatgaaagaaaccagggattggattcaaatcatggaatcgtggacccaccacatggtcacagtgcagcctcagcagcgagtgaagctcgccagacctcctccggaaagcagggccagtgaaggtgtccagcactggggctgcagggactccctggg

SEQ ID NO: 118095 - DNA, 424 bp, Homo sapiens
ggctgtctcccgcccccctcgcacacccttcccacccagaacgtgccagcagcgcgaggcacagttccgaggactcggacatcaccagtctcatagaagccatggacaaagacttcgaccaccatgactccccagccctagaagtgtttacagagcagcctccatcgccattgccaaaaagcaaaggtaatcatctcccactgccggagatccgtgatgtgtgagggaaaagccagtgcgtggcttaaggagctattaagattatagttgtggtaaacaactaattcagtaggttcctctggctcagatttatctccagtgttggacttcaacttttccataaaaatggcaattagaggtatctgtcataaaagatattatttgtatttcttaggattgtttaccaaaatcagaaattctgtgg

SEQ ID NO: 118096 - DNA, 5419 bp, Homo sapiens
tggagggctactacagaccgagacaacacttggactcagttcatatcagcagaaaagtatatctctctaccgggggaattgcaggcccatacgatttgagccaccaatgctggatttccatgaacaaccagttggaatgccaaaaatggaaaaagtctacttacataatcctagttctgaagaaacgattactttagtatcaatatctgctacaacatcacattttcatgcatcattttttcaaaataggaaaattcttccaggaggaaatacatcatttgatgtagtttttcttgcaagagtagtaggaaatgtagaaaatactttatttattaatacatctaatcatggggtatttacttaccaggtatttggtgttggagttccaaatccatatcgattgaggccgttccttggggccagagtccctgtgaatagcagtttctcacctataataaacatccacaatcctcacagtgagcctttacaggttgtagaaatgtactctagtggaggagaccttcacctagaactcccaacgggtcaacaaggaggtaccagaaaactgtgggaaattcctccttatgaaaccaagggagtgatgagagccagtttttcatctagagaagcagataatcacacagccttcataagaataaagactaatgcttcagacagcacagagtttatcattcttcctgttgaggttgaagttacaacagctcctggaatttattcctcaactgaaatgttagattttggtacactaagaacacaagatctaccaaaagttttaaaccttcatttattaaattcaggaacaaaagatgtaccaataacaagtgttcgacctacaccacaaaatgatgctataacggtacactttaaaccaattacattaaaagcatcagaaagtaaatacaccaaggttgcaagcattagttttgatgcatcgaaggcaaaaaagccatctcagttttctgggaaaataacagttaaagcaaaggaaaagagttattctaaacttgaaataccatatcaagcagaagttttagatggttatttgggatttgatcatgctgcaacattatttcacatccgagacagccctgctgatcctgtggaaaggccaatttaccttactaacactttcagttttgcgatcctcattcacgatgtgttgctaccagaagaagccaaaacaatgtttaaagttcacaacttcagcaaaccagtcttaattcttcctaatgaatcaggatacatttttaccctgctttttatgccttccacatcatccatgcacattgataacaacattttacttattaccaatgcttctaaatttcatttacccgtgcgggtatacacaggctttttagattactttgtattgccccccaaaatagaggaacgtttcatagattttggagtactgagtgctacagaagcaagtaatattttatttgcaattataaacagcaatccaattgagttggctataaaaagttggcatatcataggagacggtttatcaatagaacttgtagctgtggaaagaggcaatagaactacaataatttcaagcctgccagagtttgaaaaatcctctttatcagatcaatcatcggtaacattagcttcaggctattttgcagtcttcagagtcaaacttactgcaaaaaaattagaggggattcatgatggagccatccagatcacaacagactatgagatcctgacaatccctgtgaaggctgtgattgcagtaggctcactgacctgcttccctaagcacgtggttcttccaccttcctttccagggaaaatagttcatcaaagtttaaatattatgaattccttctcacagaaggtaaaaatacagcaaatacgatctttgtcagaagatgtgcgattttactataaacgattacggggcaataaggaagacttggagccaggaaaaaaatcaaagattgcaaacatttattttgatcctggactacagtgtggggatcattgctatgttggcttgccttttctatccaaatctgaacccaaagtgcagcctggtgtagccatgcaggaagatatgtgggatgctgactgggatttgcatcaaagcctgttcaagggatggacaggaataaaggaaaattcaggtcatagattgagtgctatatttgaagtaaatacagaccttcaaaaaaatataatatcaaaaatcactgctgagctctcctggccttccatacttagctcaccccggcacttgaaatttccacttactaatacaaactgctcctcagaagaagagattactttagaaaatcctgcagatgttcctgtctatgttcagtttattcctctggctttatattccaacccttcagtgtttgtagataagttagtatcaaggtttaacttgagtaaggtggcaaagatagatttgagaacactagaatttcaagtcttcagaaacagtgctcatccactgcagagttcaacaggatttatggagggcctctctcgacatttaattttaaacctaattttaaaacctggagaaaagaaatctgtcaaagtaaagtttactccagttcacaacagaactgtttcttcacttatcatagtcagaaataacctgactgtgatggatgctgtgatggtccaaggacaaggaacaactgagaacttgagggtggcaggcaagcttccaggtccaggaagctccttacgctttaaaatcacggaagcattgttaaaagattgtacagatagtttaaaactaagagaaccaaatttcacattgaaaagaacatttaaggtagagaatacaggacaacttcaaattcacatagaaaccattgaaatcagtggatactcatgtgaaggatatggctttaaagttgttaattgtcaagagtttactctaagtgccaatgcttctagagatataatcatattgtttactcctgattttacagcttctagagttattcgggaactgaagtttataacaaccagtggctctgagtttgtatttatattgaatgcatcccttccttaccatatgttagcaacctgtgcagaagccctacccagacctaactgggaactggctctgtatatcatcatctcaggaataatgagtgcactgtttcttttggtcattggaacagcctatttggaagctcaaggaatatgggagccatttcgaaggcggctatcctttgaggcctcgaacccgcccttcgatgtgggaaggccatttgatctcaggagaatcgttggtatttcatctgaaggaaacttgaacacactcagctgtgaccccggtcacagtagggggttctgtggagcaggcggttcatcatcccgacccagtgccgggagtcataagcagtgtggcccatcggtccacccacacagcagtcacagcaatagaaactcagctgacgtggaaaacgtcagagccaaaaacagttcaagtacctctagtaggacttctgctcaagcagcttcttcacagtctgctaacaaaacaagcccccttgtcttagattcgaacacagtgactcaaggtcatacagcgggcagaaagtccaaaggggcaaagcagagccagcacggcagccagcaccatgcccacagcccgctggagcagcaccctcagcctcctctgccaccgccagtgcctcagccccaggagccgcagcctgaaaggctgtctcccgcccccctcgcacacccttcccacccagaacgtgccagcagcgcgaggcacagttccgaggactcggacatcaccagtctcatagaagccatggacaaagactttgaccaccatgactccccagccctagaagtgtttacagagcagcctccatcgccattgccaaaaagcaaagggaaaggaaaacctcttcagcgcaaggtgaaaccacctaagaagcaagaggaaaaggagaagaagggaaagggaaagccacaggaagatgagctgaaggactctttggctgatgatgatagctcctccaccaccacagagacctccaaccctgacacagaaccgctcctcaaggaggatacagaaaagcaaaagggaaaacaagccatgcctgaaaaacatgaaagtgaaatgtctcaagtgaagcaaaaaagcaaaaaactcttaaatattaagaaagaaatcccaacagatgtgaaacccagttcattagaactaccatatactccccctttggaaagtaagcaacgtagaaatctcccaagcaagattcctcttccaactgcaatgacaagtggatccaaatcacgaaatgcccagaaaacaaaaggtacaagtaagttagtggataacagaccacctgccctagcaaaattcctcccgaatagtcaagaattaggcaacaccagtagctcagagggtgaaaaagactctcctccaccggagtgggattccgttccagttcacaaacctggcagctctactgatagtctttataaactttctctgcaaaccctcaacgcagacattttcttaaaacaacgccagacctcaccgacacctgcttccccgtctcccccagctgccccctgcccctttgtggcccggggcagctacagcagcatcgtcaacagcagctccagcagtgaccctaaaataaaacagccaaatggaagcaaacacaagttgacaaaggcagcctcgctcccgggcaagaacggcaaccccacttttgctgcagtcacggctggctacgacaagagcccaggtgggaatggctttgctaaagtttcttcaaacaaaacaggtttctccagcagccttggcatttcacacgctcctgttgacagcgatggctcagacagctcgggtttgtggagtcccgtcagcaacccaagcagccctgacttcactcccctcaattcgttctccgcctttggaaactcttttaatctaactggtgaagttttcagcaaactcggattatctcgatcgtgcaatcaggcctcacagaggagctggaacgagtttaatagtggcccttcatacctttgggagtcgccagcgacagatcccagtccttcctggccagccagttccggctccccgacccacacagccacatcggtcctcggtaacaccagcggcctgtggtccaccactccattcagcagctccatttggtccagcaaccttagcagcgcccttcccttcaccactccagcaaacacgctggcaagcatcggcctcatgggcacagaaaactcccctgctcctcacgctccctccacctccagtccagctgacgacttgggacagacctacaacccgtggcggatatggagccccacgattggaagaagaagctcggacccttggtctaattcgcactttcctcacgagaattaa

SEQ ID NO: 118097 - DNA, 2166 bp, Homo sapiens
gaatttaacacctcctaaggttaatcgggaaactgaaagtttaaaaacaacccagtggcctcctgaagtttggtaatttaatattgaaatgccatcccccttcccttacccatatgttaagccaaccctgtgccagaagcccctaccccagaccctaactgggaactggcccctgtatatccatccatcctcaggaataatgagtgccactgtttccttttggtccattggaacagccctatttggaagctcaaggaatatgggagcccatttcgaaggcggctatccctttgaggcctcgaacccgcccttcgatgtgggaaggccatttgatctcaggagaatcgttggtatttcatctgaaggaaacttgaacacactcagctgtgaccccggtcacagtagggggttctgtggagcaggcggatcatcatcccgacccagtgccgggagtcataagcagtgaggcccatcgggtcacccacacagcagccacagcaatagaaactcagctgacgtggatgacgtcagagcctataacagtggacgaacctctagcatgacttctgctcaagcagcttcttcacagcctgctaacaaaacacgcccccttgtcttagattccaacacaggggctcaaggtcattctgcgggcagaaagtccaaaggggcaaagcagagccagcacggcagccagcaccatgcccacagcccgctggagcagcaccctcagcctcctctgccaccgccagtgcctcagccccaggagccgcagcctgaaaggctgtctcccgcccccctcgcacacccttcccacccagaacgtgccagcagcgcgaggcacagttccgaggactcggacatcaccagtctcatagaagccatggacaaagacttcgaccaccatgactccccagccctagaagtgtttacagagcagcctccatcgccattgccaaaaagcaaaggttcaactgaaggtggacctgcttccacgttcacacaggcagttgatggtgggattcagttcttcacggactgttggacggagggcccaagctcctccttgctggctgtggccagagaagtacagctggccctgtgtatccatgagcttctcatccatggattcagtcaactgcaggtttcgggaggcccaggggcgatgccagaccccgcggcgcacctgcccttcttctacggcagcatctcgcgtgccgaggccgaggagcacctgaagctggcgggcatggcggacgggctcttcctcgtgcgccagtgcctgcgctcgctgggcggctatcgccagctcaacggcacctacgccattgccggcggcaaagcgcactgtggaccggcagagctctgcgagttctactcgcgcgaccccgacgggctgccctgcaacctgcgcaagccgtgcataccgccgtcgggcctcgagccgcagccggggtcttcgactgcctgcgagacgccatgggcgaggcctaggagcaggccatcatcagccaggccccgcaggtggagaagctcattgctacgacggaccacgagcggatgccctggtaccacagcagcctgacgcgtgaggaggccgagcgcaaactttactctggggcgcagaccgacggcaagttcctgtatgtggggcccgggatttgggtgcgggattggattcaaatcatggaatcgtggacccaccacatggtcacagtgcagcctcagcagcgagtgaagctcgccagacctcctccggaaagcagggccagtgaaggtgtccagcactggggctgcagggactccctggggtcttcctctaacctgagctcgcctacaagtggctcaagcctgccctggactcctcacaggaatcacagcattctgctgatggagctcacggccctgacacagcccaccatggagacggtggccaggtgccactccacccaggcaccacttacctggggacgtacaggtggatgtccaggcaaacaggccacttgcggggtctctggtcccaatgccaatggagagccggttctggtggaattctactccgcggtaagtggaacagcatacggagacacgcagttccgcacacgcatcgcaaaggcctcaggctggatgaaagaaaccaggttccaagggctacgaattgtgtga

SEQ ID NO: 118098 - DNA, 1776 bp, Homo sapiens; identical to SEQ ID NO: 117486

SEQ ID NO: 118099 - DNA, 663 bp, Homo sapiens
atggctctctggaccctcaggcccactcccctgctggtgacctgcatgctgatctgtgccccaggtgtgatgggtgcagtggtggctcctctgacaatattagggggtcctcttctcatcagagctgcatggtacacagctggcattgtgggaggcctctccactgtggccatgtgtgcgcccagtgaaaagtttctgaacatgggtgcacccctgggagtgggcctgggtctcgtctttgtgtcctcattggttgatcagatgggaagatggtttgttgctggaggggctgctgttggtcttggagcattgtgctactatggcttgggactgtctaatgagattggagctattgaaaaggctgtggagtattggtttaacagctttgtctgccatagcaatcagcagaacgcctgttctcatgaacttcatgatgagaggctcttgggtgatatgggtttgcctatcctgcatgcaatgcttctgcgaagactaccatccgtggactcacagaatgccttatccagcatcatgttactccacacagcattgcctctgaccaaggcactcactttacagctaaagaagtgcagcagtgggctcatgctcatggaattcactggccttaccatgttccccatcatcctgaagcagctggattaa

SEQ ID NO: 118100 - DNA, 714 bp, Homo sapiens
atgctgccatcaaccttgacacctttgtctgaggagataaaccctgtgctgcgtgaggcaagagtgatggcctcccctgaggcagtagtcagccaagataacgttgattctcagaagccacccccaacaaccctgtttgcttccagacctataactaaactaaagtcctggcgggcccctggaggtgagattgagagtgtgacctgtgaggagggaaatgatcagacatttcaaggactgctggacactggctttgagctgacattgattccaggggacccaaaacgtcattgtggtcctccagttaaagtaggggctgatggaggccaggtaattaatggagttttagctcaggtctgacttacagtgggtccagtgggtccccggactcatcctgtggtcattttcccagtgccagaatgcagaattggcagagacatacttagcagctggcagaacccccacactggctccctgactggtagggtgagggcttttatggttggaaaggccaaatggaagccatgagagctgcctctacctagaaaaacagtaaatcaaaaacaatatcgtattcccggagggattgcagagattagtgtccatcaaaaacttgagacgcggggtggtgattcccaccacatcccggttcaactctcccatttggcctgtgcagaagacagatggatcttggtgaacggcagcggattatcg

SEQ ID NO: 118101 - DNA, 1568 bp, Homo sapiens
caggcaaaaaaggaggggcagtgtcaggcagttggttgataacagtggtggcattatttgaaagggctagtttctgtttagcctttagagaagaaagcctaacagcagttagcaaagctgcaaagcaggtgtctactattaatgtgagggcattgactggaaaagaatgggaccctacaactttgaatggggatgtgtgggaggaccctgatgaagctggggacactgagcttgtaaactctggtgaagcttttttgccagaacaaacagcttcaccatccccagtagtggcaatatctccttcttgacccatgctgccatcagccattccacctttgtctgaggagataaaccctgcactacagtgggtccagtgggtccctggactcatcttgtggtcattttcccagtgccaggatgcataactggcatagacatacttagcagctggcaggacccccaccattggctccctgaatggtagggtgagggctacaaggcagacctggctgcagccactgtcgagtgcccaatttgccagcagcagagactgacactgagccctcagtatagccacattcctcagggtgatcagccaactacctggtagcaggttgattgtattggacctcttccatcatgggaagggcagaggtttgtcctcactggaatagacacttactttagatatgggtttgcctatcctgcatgcaatgcttctgtgaagactaccatccatggactcacagaatgccttgtccaccatcatggtgttccacacggcatttgcttctgtccaaggcactcactttatggcttaagaagtgcagcagtgggctcatgctcatggaattcactggtcttaccatgttccccatcatcttgaagcagctggattgatagaacagtggaatggccttttgatgtcacaattacaacaccaactaggtgacaatactttgcagggctggggcaaagttctccagaagggtgtgtatgctctgaatcagtgttcaatatatggtactgtttctcccatagccaggattcatgggtccaggaatcaaggggtagaagtggcaccactcaaaatcacccctagtgatccactagcaaaatgtttgcttccttttcccaaggcattacattctgcttgcctagaggtcttagttccagagggaggaacgctgccacccggagacacaacaacaattccattaaactggaagttaagattgccacccagacactttgggctcctcctacctttaagtcaaaaggctaagaagggggctacagtgttggctggggtgattgacccggactatcaagatgaaatcagcctactactccatataggaggtaaggaagagtatgcatggaatacaggagatccattagggcgtctcttagtatttccatgccatgtgattaaggtcaatgggaaacttcaacagcccaatccaggcaagactgcaaatgacccagacccttcaggaatgaaggtttgagtcactccaccaggaaaaaaaaatccacgacctgctgaggtgcttgctgaaggcaag

SEQ ID NO: 118102 - DNA, 726 bp, Homo sapiens
tctggtcactgggaaattgccggtgtcccggttctgtttgagtggggatatttctccgatcacgraaacagcttcccgcaagagctgctggataaactggtcacgcgctaatctgccgggttacctcggtaactgmcactcttccggtacgtcattctggmatcaactgggcggagagcacatgaaaaccggcaagccgattttctatacccccgctgactccgtgttccagattgcctgccatgaagaaactttcggtctggataaactgtacgaactgtgcgaaatcgcccgtaaagagctgaccaacggcggatacaatatcggtcgtgttatcgctcgtccgttaatcggcgacaaagccggtaacttccagcgtaccggtaaccgtcacgacctggctgttgagccgccagcaccgaccgtgctgcagaaactggttgatgaaaaacacggccaggtggtttctgtcggtaaaattgcggacatctacgccagctgcggtatcaccaaaaaagtgaaagcgactggcctgaacgcgctgtttgacgcccccatcaaagagatgaaagaagcgggtgatacccccatggtcttccccaacttcgttgacttcgactcttcctggggccaccgtcgcgacgtcgccggttatgccgcgggtctggaactgttcgaccgccgtctgccggagctgatgtctcaaaagcgcgatgacgacatcct

SEQ ID NO: 118103 - DNA, 2253 bp, Homo sapiens
atggtgctgacccattccataggaaactgcccccataatccagtcacctctcaccaggccccatctccaacactgaggattccaattgaccaggagactgggggcggcgccaactcatcggaagttagaaaacaccgggcagtgtattcaagaaaggcaaaagttccacccccaacgtacccgttcttaaaagataagacgcaagataggtccggtttagcaacctttaccatggacggacaaattccgtttattctaccaggcatatttccggtaaccattccggcaaaccaaagcctgccaccggcgcaggtaattgtgtcaaattctgttgaccacctcaaaatcaccggggtggaagatcacaaaccgatttttgccggagccggaaaaccatatcagaaccttcgccagtttatcgatgaaggcaattatacatccggcgacaaccatacgctgagagaccctcactacgttgaagacaaagcccataaataccttgtatcgaagccaacacgggaacagaaaacggataccaaggcgaagaatctttatttaacaaagcgtactacggcggcggcacgaacttcttccggggatcctctagagtcgacctgcaggcatgctgaagaacacatcgacagcaccacaacaacgaatctatcatacactgacaaacacacagcacaaaacgattcacacccagggacagctaaaacacaaacgacaataacagatcaccacgaccacagccacaaacagtggctccaattgccgagccgagcaggactggccgcggaccaaagcggtcggacagtgctccgagaacgggtgcgcatagaaaattgcatacaaacgcactatagccgctcagcaagcaacgcccaagcgcccaggccagtacgcggcaatgaacccaagccatatgccatacaaacataccagggtgacggagcagaggaagacgatgagacttacagccccaatttagaccgcgtaaccaccaaaaagacacaccgtggttgccaagcaaagatggcgggagtatcccctgaattcaaccacagtgaccccttatgcctcatgccaccagaagttagcgtgagccttggtgttcccaatcagtatctctggacttctcaaaccacaaatccacctcgcactggggatgggagagcagaaggctccaaggcacacaaggaccttgatgaggagataagccttattcctacagttaatgtgaggaaaaacctgtttttcctggaaatgcctactttggccgacacaaatattttcccgccacgcggcggtccaatttccctacgacacactaaggggccgtgtgacaatctaaaaacttgtcacacttcacatggatctgtcatggcggaaacagcggttatcaatcacaagaaacgtaaaaatagcccgcgaatcgtccagtcaaacgacctcactgaggcggcatatagtctctcccgggatcaaaaacgtatgctgtatctgttcgttgaccagatcagaaaatctgatggcaccctacaggaacatgacggagtaatggctcgcgctaatgccattacttgccctgtatgtggtcgggatgtgaagtttactcgtgaagtgctccggggtgatagtgttgagaagagctctcgggtatggtcaggtaatgaacgtgaccaggagctgcttactgaggacgcactggatgatctcatcccttcttttctactgactggtcaacagacaccggcgttcggtcgaagagtatctggtgtcatagaaattgccgatgggagtcgccgtcgtaaagctgctgcacttaccgaaagtgattatcgtgttctggttggcgagctggatgatgagcagatggctgcattatccagattgggtaacgattatcgcccaacaagtgcttatgaacgtggtcagcgttatgcaagccgattgcagaatgaatttgctggaaatatttctgcgctggctgatgcggaaaatatttcacgtaagattattacccgctgtatcaacaccgccaaattgcctaaatcagttgttgctcttttttctcaccccggtgaactatctgcccggtcaggtgatgcacttcaaaaagcctttacagataaagaggaattacttaagcagcaggcatctaacgcggggatccttctacgagtcgacctggcaggcatgcaagagcccccaattaattttgtagagcctacacccctccaattgagatga

SEQ ID NO: 118104 - DNA, 1329 bp, Homo sapiens
atggtggattcgttaattgcgcgcgtaggagtaatggctcgcggtaatgccattactttgcctgtatgtggtcgggatgtgaagtttactcttgaagtgctccggggtgatagtgttgagaagacctctcgggtatggtcaggtaatgaacgtgaccaggagctgcttactgaggacgcactggatgatctcatcccttcttttctactgactggtcaacagacaccggcgttcggtcgaagagtatctggtgtcatagaaattgccgatgggagtcgccgtcgtaaagctgctgcacttaccgaaagtgattatcgtgttctgggtggcgagctggatgatgagccgatggctgcattatccagattgggtaacgattatcgcccaaccagtgcttttgaacgtgggcaacgtttctgttcatcttgcgtggatctggctctgagggggctacgtgttttgctcgtggaaggtaacgacccccagggaacagcctcaatgtatcacggatgggtaccagatcttcatattcatgcagaagacactctcctgcctttctatcttggggaaaaggacgatgtcacttatgcaataaagcccacttgctggccggggcttgacattattccttcctgtctggctctgcaccgtattgaaactgagttaatgggcaaatttgatgaaggtaaactgcccaccgatccacacctgatgctccgactggccattgaaactgttgctcatgactatgatgtcatagttattgacagcgcgcctaacctgggtatcggcacgattaatgtcgtatgtgctgctgatgtgctgattgttcccacgcctgctgagttgtttgactacacctccgcactgcagtttttccatatgcttcgtgatctgctcaagaacttgatctttaaagtgttggaagttctggccagggcaattaggcaggagaaggaaataaagggtattcaattaggaaaagaggaagtcaaattgtccctgtttgcagacgacatgatttgttatctagaaaaccgggttgtctcagcccaaaatctccttaagctgataagcaacttcagcaaagtctcaggatacaaaatcaatgtacaaaaatcacaagcattcttatacaccaacaacagacaaacagagagccaaatcatgagtgaactcccattcacaattgctttaaagagaaggaaatacctaggaatccaacttacaagggacgtgaaggacctcttcaagaagaactacaaaccactgctcaaggaaataaaacaggatacaaacaaacgaagaacattccatgctcatgagtag

SEQ ID NO: 118105 - DNA, 1617 bp, Homo sapiens
atgaaactcatggaaacacttaaccagtgcataaacgctggtcatgaaatgacgaaggctatcgccattgcacagtttaatgatgacagcccggaagccaccccaataacccggcgctggagaatagatgaaacagcggatttagatagggtttcttctcaggctatcagagatgccgagaaagcagggcgactaccgggcacccgggatatggaaattcgaggacggcttgagcaacgtgttggttatacaattgaagaaattaatcatatgcgtgatgatacttcgttatcgacaccagctgccccgatggtggattcgttaattgcgcgcgtaggagtaatggctcgcggtaatgccattactttgcctgtatgtggtcgggatgtgaagtttactcttgaagtgctccggggtgatagtgttgagaagacctctcgggtatggtcaggtaatgaacgtgaccaggagctgcttactgaggacgcactggatgatctcatcccttcttttctactgactggtcaacagacaccggcgttcggtcgaagagtatctggtgtcatagaaattgccgatgggagtcgccgtcgtaaagctgctgcacttaccgaaagtgattatcgtgttctggttggcgagctggatgatgagcagatggctgcattatccagattgggtaacgattatcgcccaacaagtgcttatgaacgtggtcagcgttatgcaagccgattgcagaatgaatttgctggaaatatttctgcgctggctgatgcggaaaatatttcacgtaagattattacccgctgtatcaacaccgccaaattgcctaaatcagttgttgctcttttttctcaccccggtgaactatctgcccggtcaggtgatgcacttcaaaaagcctttacagataaagaggaattagttaagcagcaggcatctaacttacaaagcagaaaaaaatacagcaagatggccaggccactctatactgtattcaaggaaacccagagggcaactactcatctagtagaatcccacaccagtggcagaaacagccttcaaaacaataaagcaggccctagtacaagcgccagccttaagctttcccacaggacaaaacttctcttatttgtcatagagagagcaggagtagctcttgcactccttactcagacttgtgggacaaccccagaaccagtggcatatctaaattattacccgctgtatcaacaccgccaaaatgccctaaatcagttgtgcttcttttttctcacccccggtgaactatctgcccggtcaggtgatgcacttcaaaaagcctttacagataaagaggaattacttaagcagcaggcatctaaccttcatgagcagaaaaaagctggggtgatatttgaagctgaagaagttatcactcttttaacttctgtgcttaaaacgtcatctgcatcaagaactagtttaagctcacgacatcagtttgctcctggagcgacagtattgtataagggcgataaaatggtgcttaacctggacaggtctcgtgttccaactgagtgtatagagaaaattgaggccattcttaaggaacttgaaaagccagcaccctga

SEQ ID NO: 118106 - DNA, 2589 bp, Homo sapiens
gagccgcgctggctgttgcggggcaggctgggcccgctgctgctgcagttggctccgcggccgcccctagccgcccccagccgcccccgcccgtcccacgcccgcaacccgcccacacaccgtgccaccacacccggcccccgcggccccacccgccaacaccgcaagggacagcgaccacgcgcacggccacagagcgccagcgccgccgcgcaccgcgagaacccaccagcgggcggccgaccacagccacaacaagacaacaacgcatcgcgaacgcgcgccccgactaacaccggaccaccggccaagacgccgccggcagtcccgcgccggccgagccacaccgccgtggggagcggtggtttttccgcacggaaagcaccgaaaaccggccaagacaaaaaggattgccaagagaatcctcggatttgttcacgggggtcgccggcacagggaacgagaagccaggttaaggaatttggggattttgccgatttcggaaccaccatcaaacaggattttcgcctgctggggcaaaccagcgtggaccgcttgctgcaactctctcagggccaggcggtgaagggcaatcagctgttgcccgtctcactggtgaaaagaaaaaccaccctggcgcccaatacgcaaaccgcctctctccgcgcgttggccgattcattaatgcagctggcacgacaggtttcccgactggaaagcgggcaggattttgccgatttcggaaccaccatcaaacaggattttcgcctgctggggcaaaccagcgtggaccgcttgctgcaactctctcagggccaggcggtgaagggcaatcagctgttgcccgtctcactggtgaaaagaaaaaccaccctggcgcccaatacgcaaaccgcctctccccgcgcgttggccgattcattaatgcagctggcacgacaggtttcccgactggaaagcgggcagtttcccatgaaatataagcctttcaagggcttcaaggaatccaaggtttgcacttccaggcatttccaggcttattctgctggaactctaattcctccatcctttcctaactgccacatctgggattttgccgatttcggaaccaccatcaaacaggattttcgcctgctggggcaaaccagcgtggaccgcttgctgcaactctctcagggccaggcggtgaagggcaatcagctgttgcccgtctcactggtgaaaagaaaaaccaccctggcgcccaatacgcaaaccgcctctccccgcgcgttggccgattcattaatgcagctggcacgacaggtttcccgactggaaagcgggcaaaaatttcgtaacggacaccagtgcgcccgaaggggggattggttaattgcgcgcgagggagaaaaggctcgcggaaaggccaatacttggctggtacgtggcggggatgtgaagtttactcttgaagtgctccggggtgaaagtgttaagaagacctttcgggtaaggccaggtaatgaacgtgaccaggagctgcttactgaggacgcactggatgatctcatcccttcttttctactgactggtcatcagacaccggcgttcggtcgaagagtatctggtgtcatagaaattgccgatgggagtcgccgtcgtaaagctgctgcacttaccgaaagtgattatcgtgttctggttggcgagctggatgatgagcagatggctgcattatccagattgggtaacgattatcgcccaacaagtgcttatgaacgtggtcagcgttatgcaagccgattgcagaatgaatttgctggaaatatttctgcgctggctgatgcggaaaatatttcacgtaagattattacccgctgtatcaacaccgccaaattgcctaaatcagttgttgctcttttttctcaccccggtgaactatctgcccggtcagggatttgccggatttcggaacccaccatcaaacaggattttcgcctgctggggcaaaccagcgtggaccgcttgctgcaactctctcagggccaggcggtgaagggcaatcagctgttgcccgtctcactggtgaaaagaaaaaccaccctggcgcccaatacgcaaaccgcctctccccgcgcgttggccgattcattaatgcagctggcacgacaggtttcccgactggaaagcgggcaggattttgccgatttcggaaccaccatcaaacaggattttcgcctgctggggcaaaccagcgtggaccgcttgctgcaactctctcagggccaggcggtgaagggcaatcagctgttgcccgtctcactgtcgctcctacgcgacgtcccgaccacccccccgtcctctggtcaccgccactcacaccatgggctccagttccgacaaccagaaattgacatgggcccccagctccccccgactcgtcacccgcttcgagcacgcctggggaagcaaagaaaaaaccacatgttgttcgtcacacggatcaagttggtaaagctgggcaggaagccacctgccacagcaacggtcactgctggggtcatactcttcgtgtgcattacatttccagatctgatttctgcgtga

SEQ ID NO: 118107 - DNA, 2112 bp, Homo sapiens
  misc_feature (1)...(2112): n = a,t,c or g
atgaaactcatggaaacacttaaccagtgcataaacgctggtcatgaaatgacgaaggctatcgccattgcacagtttaatgatgacagcccggaagcgaggaaaataacccggcgctggagaataggtgaagcagcggatttagttggggtttcttctcaggctatcagagatgccgagaaagcagggcgactaccgcacccggatatggaaattcgaggacgggttgagcaacgtgttggttatacaattgaacaaattaatcatatgcgtgatgtgtttggtacgcgattgcgacgtgctgaagacgtatttccaccgacaccggcgttcggtcgaagagtatctggtgtcatagaaattgccgatgggagtcgccgtcgtaaagctgctgcacttaccgaaagtgattatcgtgttctggttggcgagctggatgatgagcagatggctgcattatccagattgggtaacgattatcgcccaacaagtgcttatgaacgtggtcagcgttatgcaagccgattgcagaatgaatttgctggaaatatttctgcgctggctgatgcggaaaatatttcacgtaagattattacccgctgtatcaacaccgccaaattgcctaaatcagttgttgctcttttttctcaccccggtgaactatctgcccggtcaggtgatgcacttcaaaaagcctttacagataaagaggaattacttaagcagcaggcatctaaccttcatgagcagaaaaaagctggggctatcagagatgccgagaaagcagggcgactaccgcacccggatatggaaattcgaggacgggttgagcaacgtgttggttatacaattgaacaaattaatcatatgcgtgatgtgtttggtacgcgattgcgacgtgctgaagacgtatttccaccggtgatcggggttgctgcccataaaggtggcgtttacaaaacctcagtttctgttcatcttgctcaggatctggctctgaaggggctacgtgttttgctcgtggaaggtaacgacccccagggaacagcctcaatgtatcacggatgggtaccagatcttcatattcatgcagaagacactctcctgcctttctatcttggggaaaaggacgatgtcacttatgcaataaagcccacttgctggccggggcttgacattattccttcctgtctggctctgcaccgtattgaaactgagttaatgggcaaatttgatgaaggtaaactgcccaccgatccacacctgatgctccgactggccattgaaactgttgctcatgactatgatgtcatagttattgacagcgcgcctaacctgggtatcggcacgattaatgtcgtatgtgctgctgatgtgctgattgttcccacgcctgctgagttgtttgactacacctccgcactgcagtttttcaatatgcttcgtgatctgctcaagaaggggagcttctacagtaaatcctgcaggantgttgagaagacctctcgggtatggtcaggtaatgaacgtgaccaggagctgcttactgaggacgcactggatgatctcatcccttcttttctactgactggtcaacagacaccggcgttcggtcgaagagtatctggtgtcatagaaattgccgatgggagtcgccgtcgtaaagctgctgcacttaccgaaagtgattatcgtgttctggttggcgagctggatgatgagcagatggctgcattatccagattgggtaacgattatcgcccaacaagtgcttatgaacgtggtcagcgttatgcaagccgattgcagaatgaatttgctggaaatatttctgcgctggctgatgcggaaaatatttcacgtaagattattacccgctgtatcaacaccgccaaattgcctaaatcagttgttgctcttttttctcaccccggtgaactatctgcccggtcaggtgatgcacttcaaaaagcctttacagataaagaggaattacttaagcagcaggcatctaaccttcatgagcagaaaaaagctggagtgatatttgaagctgaagaagttatggggagttccaccataaatcctgcaggantaaattgcaagatttaa

SEQ ID NO: 118108 - DNA, 1290 bp, Homo sapiens
  misc_feature (1)...(1290): n = a,t,c or g
atgtatcacggatgggtaccagatcttcatattcatgcagaagacactctcctgcctttctatcttggggaaaaggacgatgtcacttatgcaataaagcccacttgctggccggggcttgacattattccttcctgtctggctctgcaccgtattgaaactgagttaatgggcaaatttgatgaagggtcgactctagaggatcccctgcctgtatgtggtcgggatgtgaagtttactcttgaagtgctccggggtgatagtgttgagaagacctctcgggtatggtcaggtaatgaacgtgaccaggagctgcttactgaggacgcactggatgatctcatcccttcttttctactgactggtcaacagacaccggcgttcggtcgaagagtatctggtgtcatagaaattgccgatgggagtcgccgtcgtaaagctgctgcacttaccgaaagtgattatcgtgttctggttggcgagctggatgatgagcagatggctgcattatccagattgggtaacgattatcgcccaacaagtgcttatgaacgtggtcagcgttatgcaagccgattgcagaatgaatttgctggaaatatttctgcgctggctgatgcggaaaatatttcacgtaagattattacccgctgtatcaacaccgccaaattgcctaaatcagttgttgctcttttttctcaccccngacaccggcgttctgtcgaagagtatctggtgtcatataaattgccgatgggagtcgccgtcgtaaagctgcttcacttaccgaaagtcgactctagaggatccccggttttttatcgccctgaagaggatgccggcgatgaaaaaggctatgaatcttttccttggtttatcaaacgtgcgcacagtccatccagagggctttacagtgtacatatcaacccatatctcattcccttctttatcgggttacagaaccggtttacgcagtttcggcttagtgaaacaaaagaaatcaccaatccgtatgccatgcgtttatacgaatccctgtgtcagtatcgtaagccggatgcgtcaggcatcgtctctctgaaaatcgactggatcatagagcgttaccagctgcctcaaagttaccagcgtatgcctgacttccgccgccgcttcctgcagacaccggggttcggtcgaagagtatctggtgtcatagaaattgccgatggtcgtcgccgtcgtaaaaactgcttgcacgttaccgtgaacgttggaaatcggtcgactctagaggatcccatttcatga

SEQ ID NO: 118109 - DNA, 1836 bp, Homo sapiens
atggtggattcgttaattgcgcgcgtaggagtaatggctcgcggtaatgccattactttgcctgtatgtggtcgggatgtgaagtttactcttgaagtgctccggggtgatagtgttgagaagacctctcgggtatggtcaggtaatgaacgtgaccaggagctgcttactgaggacgcactggatgatctcatcccttcttttctactgactggtcaacagacaccggcgttcggtcgaagagtatctggtgtcatagaaattgccgatgggagtcgccgtcgtaaagctgctgcacttaccgaaagtgattatcgtgttctggttggcgagctggatgatgagcagatggctgcattatccagattgggtaacgattatcgcccaacaagtgcttatgaacgtggtcagcgttatgcaagccgattgcagaatgaatttgctggtaatatttctgcgctggctgatgcggaaaatatttcacacagcgataagttcgacgccaacgatccgatcctgaaagatcagacgcaagaatggtccggttctgcaacctttacatctgacggaaaaatccgtttattctacactgactattccggtaaacattacggcaaacaaagcctgacaacagcgcaggtaaatgtgtcaaaatctgatgacacactcaaaatcaacggagtggaagatcacaaaacgatttttgacggagacggaaaaacatatcagaacgttcagcagtttatcgatgaaggcaattatacatccggcgacaaccatacgctgagagaccctcactacgttgaagacaaaggccataaataccttgtattcgaagccaacacgggaacagaaaacggataccaaggcgaagaatctttatttaacaaagcgtactacggcggcggcacgaacttcttccgtaaagaaagccagaagcttcagcagagcgctaaaaaacgcgatgctgagttagcgaacggcgccctcgtcaatacccagagcaccaccaccaggaggcctggaagcaactcactgtcccacttgatgtggcctgtggaccaccagaaatttcagagcgtcacagagatgtgtggttcgatcctgagcagggattttgccgatttcggaaccaccatcaaacaggattttcgcctgctggggcaaaccagcgtggaccgcttgctgcaactctctcagggccaggcggtgaagggcaatcagctgttgcccgtctcactggtgaaaagaaaaaccaccctggcgcccaatacgcaaaccgcctctccccgcgcgttggccgattcattaatgcagctggcacgacaggtttcccgactggaaagcgggcaggattttgccgatttcggaaccaccatcaaacaggattttcgcctgctggggcaaaccagcgtggaccgcttgctgcaactctctcagggccaggcggtgaagggcaatcagctgttgcccgtctcactggtgaaaagaaaaaccaccctggcgcccaatacgcaaaccgcctctccccgcgcgttggccgattcattaatgcagctggcacgacaggtttcccgactggaaagcgggcaggattttgccgatttcggaaccaccatcaaacaggattttcgcctgctggggcaaaccagcgtggaccgcttgctgcaactctctcagggccaggcggtgaagggcaatcagctgttgcccgtctcactggtgaaaagaaaaaccaccctggcgcccaatacgcaaaccgcctctccccgcgcgttggccgattcattaatgcagctggcacgacaggtttcccgactggaaagcgggcagtga

SEQ ID NO: 118110 - DNA, 4131 bp, Homo sapiens
  misc_feature (1)...(4131): n = a,t,c or g
atgagggacagcgttccagtagccctgccacagctctctcatcctctggtccgccctcactcaagatggctaccagcaaaaatggtgcaatggcgtgacagctcggccctggttgccaaggagatgcgagtaccggaaatgcggaattcggggagagcgcgcatgcctggtccggtggagggagggtgccgggcgtcacaggtcctgacagggaagaagttggcaggtcctggcaggggacgagctgcggcggtggcacctccgggtgtggaaggctccagtgagatggagtcgcgagtcgcggacgctgggaccggcgagaccgcgcgagcagcgggcgggagtccggcagttggctgcaccactcgggggcccgtagtctcggcgcccctgggagccgcccggtggaagctcctgcggcaggtatttattcgcgataagctcatggagcggcgtaaccgtcgcacaggaaggacagagaaagcgcggatctgggaagtgacggacagaacggtcaggacctggattggggaggcggttgccgccgctgctgctgacggtgtgacgttctctgttccggtcacaccacatacgttccgccattcctatgcgatgcacatgctgtatgccggtataccgctgaaagttctgcaaagcctgatgggacataagtccatcagttcaacggaagtctacacgaaagtttttgcgctggatgtggctgcccggcaccggtctagaggatccccctatccatacgatgaatatttggccatggaaaggaacaatgtgctgacacatgctacgacatggatgaaccttgaaaagatttttctagccagctactttgttttcctttatcttacaaaagacagtcgtttcctcaccataaatattatgaacaagactacttctgaagtgtggttgatagatggcctgagcccttgggacccaccagtacttatccagaagcgaatacatggggtcctttactatgttgaacacagagatgatgaattatacattctcactaatgttggagaacctacagaatttaagagggacgtgactgcaaattgtccaggttcttggcgttttgaacaaagaattggacaaaacacgcagcaaagaaagaatgaagcaacaaaagaacgaaagcagctctctcggctttcggctcggaggaggccaaggtgcaactttcttcggtcgtctcgaatccgggttcatccgacaccagccgcctccaccatgccgccgaagttccaccccaatgagatcaaagtcgtatacttcacgtgcactggagttgaagtcggagccacttctgctctggcccccaagattggccccgcgggtctgtctccaaaagaggttggtgatgacattgccaaggtaacgggtattcaagataaactggactacatcacagctttaaatataaaaactgtttggattacttcattttataaatcgtcccttaaagatttcagatatggtgttgaagatttccgggaagttgatcccatttttggaacgatggaagattttgagaatctggttgcagccatacatgataaagnaggatcccccggtaatgccattactttgcctgtatgtggtcgggatgtgaagtttactcttgaagtgctccggggtgatagtgttgagaagacctctcgggtatggtcaggtaatgaacgtgaccaggagctgcttactgaggacgcactggatgatctcatcccttcttttctactgactggtcaacagacaccggcgttcggtcgaagagtatctggtgtcatagaaattgccgatgggagtcgccgtcgtaaagctgctgcacttaccgaaagtgattatcgtgttctggttggcgagctggatgatgagcagatggctgcattatccagattgggtaacgattatcgcccaacaagtgcttatgaacgtggtcagcgttatgcaagccgattgcagaatgaattcgctggaaatatttctgcgctggctgatgcggaaaatatttcacgtaagattattacccgctgtatcaacaccgccaaattgcctaaatcaggtgttgctcttttttctcaccccggtgaactatctgcccggtcaggtgatgcacttcaaaaagcctttacagataaagaggaattacttaagcagcaggcatctaaccttcatgagcagaaaaaagctggggcacctttcttggatgttctcaacaccatgatggacactacacttcctctgacattagaagaattagaagaatgggggaatccttcatctgatgaaaaacacaagaactacataaaacgttactgtccctatcaaaatattaaacctcaagatcttcagcctgttaaacaagaaaacgaaaaaccccttccagaaaacatggatgcatttgaaaaagtgagaacaaaattagaaacacagccacaagaaagatatgaaatcatcaatgtgggaacccaaaatctccttaagctgataagcaacttcagcaaagtctcaagatacaaaatcaatgtacaaaaatcacaagcattcttatacaccaataacagacaaacagagagccaaatcatgagtgaactcccattcacaattgcttcaaagagaataaaatacctaggaatccaacttacaagggatctgaaggacctcttcaaggagaactacaaaccactgctcaatgaaataaaagaggatacaaacaaatggaagaacattccatgctcatgggtaggaagaatcaatatcgtgaaaatggccatactgcccaagtggctccaagtagcgaagcgagcaggactgggcagaggccaaagcggtcggacagcgctacgagaacgggtgctcatagaaattgcatcaacgcatatagcgctagcaacacgccatagtgactggggatgctgccggaatggacgatatcccgcaagaggcccagcagtaccggcatatccaagcctatgcctacagcatgcatgggtcaccgtcgacagcgacacacttgcatgggatgcagccctgctaacgtgccggcacggactgagtaaccagaaccggtttacgcagtttcggcttagtgaaacaaaagaaatcaccaatccgtatgccatgcgtttatacgaatccctgtgtcagtatcgtaagccggatggctcaggcatcgtctctctgaaaatcgactggatcatagagcgttaccagctgcctcaaagttaccagcgtatgcctgacttccgccgccgcttcctgcaggatggaaaattagtgccaatgactgttttccacaaaactgactctgaggacttgcagaagaaacctctcttggtacatgtatatggagcttatggaatggatttgaaaatgaatttcaggcctgagaggccggtcctggtggatgatggatggatattagcatactggcatggttcggtgagtcagtatattttacctggcctaacccttcgaagccacacgggaacagaaaacggataccaaggcgaagaatctttatttaacaaagcgtactacggcggcggcacgaacttcttccgtaaagaaagccagaagcttcagcagagcgctaaaaaacgcgatgctgagttagcgaacggcgccctcggtatcatagagttaaataatgattacacattgaaaaaagtaatgaagccgctgatcacttcaaacacggtaactgatgaaatcgagcgcgcgaatgttttcaaaatgaacggcaaatggtacttgttcactgattcacgcggttcaaaaatgacgatcgatggtattaactcaaacgatatttacatgcttggttatgtatcaaactctttaaccggcccttacaagccgctgaacaaaacagggcttgtgctgcaaatgggtcttgatccaaacgatgtgacattcacttactctcacttcgcagtgccgcaagccaaaggcaacaatgtggttatcacaagctacatgacaaacagaggcttcttcgaggataaaaaggcaacatttgcgccaagcttcttaatgaacatcaaaggcaataaaacatccgttgtcaaaaacagcatcctggagcaaggacagctgacagtcaactaa

SEQ ID NO: 118111 - DNA, 1428 bp, Homo sapiens
  misc_feature (1)...(1428): n = a,t,c or g
atggctcgcggtaagccattactttgcctgtatgggtcgggntgtgaagtttactctgaagtgctccggggtgatagtgttgagaagacctctcgggtatggtcaggtaatgaacgtgaccaggagctgcttactgaggacgcactggatgatctcatcccttcttttctactgactggtcaacagacaccggcgttcggtcgaagagtatctggtgtcatagaaattgccgatgggagtcgccgtcgtaaagctgctgcacttaccgaaagtgattatcgtgttctggttggcgagctggatgatgagcagatggctgcattatccagattgggtaacgattatcgcccaacaagtgcttatgaacgtggtcagcgttatgcaagccgattgcagaatgaatttgctggaaatatttctgcgctggctgatgcggaaaatatttcacacaaggcccataaatactttgtattcgaagccaacacgggaacagaaacgggataccaaggcgaagaatctttatttaacaaagcgtactacggcggcggcacgaacttcttccgtaaagaaagccagaagcttcagcagagcgctaaaaaacgcgatgctgagttagcgaacggcgccctcggtatcatagagttaaataatgattacacattgaaaaaagtaatgaagccgctgatcacttcaaacacggtaactgatgaaatcgagcgcgcgaatgttttcaaaatgaacggcaaatgggattttgccgatttcggaaccaccatcaaacaggattttcgcctgctggggcaaaccagcgtggaccgcttgctgcaactctctcagggccaggcggtgaagggcaatcagctgttgcccgtctcactggtgaaaagaaaaaccaccctggcgcccaatacgcaaaccgcctctccccgcgcgttggccgattcattaatgcagctggcacgacaggtttcccgactggaaagcgggcagcagtcttccaaacagaagaaggccattcaaactgctatccgcaaaaataaagaggcaaacgcagtgctggctcggctgaacagtgagctccagcagcagctcaagggatttgccgattttcgggaaccacccatcaaacaggattttcgcctgctggggcaaaccagcgtggaccgcttgctgcaactctctcagggccaggcgatcacagaactgtgtggtgcaaagcgggttggttattttggtccaacacagttttacattgccctgaaattaattgctgcagcacaatctggcctcccggtacggatagagagtattaaatgtggaaacagctatgaccatgattacgaattcgagctcggtaccctggtgcttcctcgctcactcgagggcttcgccctgtcgctcaactgcggcgagcactactggctgtaa

SEQ ID NO: 118112 - DNA, 2499 bp, Homo sapiens
atggctcgcggtaatgccattactttgcctgtatgtggtcgggaagtgaagtttactcttgaagtgctccggggtgatagtgttgagaagacctctcgggtatggtcaggtaatgaacgtgaccaggagctgcttactgaggacgcactggatgatctcatcccttcttttctactgactggtcaacagacaccggcgttcggtcgaagagtatctggtgtcatagaaattgccgatgggagtcgccgtcgtaaagctgctgcacttaccgaaagtgattatcgtgttctggttggcgagctggatgatgagcagatggctgcattatccagattgggtaacgattatcgcccaacaagtgcttatgaacgtggtcagcgttatgcaagccgattgcagaatgaatttgctggaaatatttctgcgctggcttatgcggaaaatatttcacgtaagattattacccgctgtatcaacaccgccaaattgcctaaatcagttgttgctcttttttctcaccccggtgaactatctgcccggtcaggtgatgcacttcaaaaagcctttacagataaagaggaattacttaagcagcaggcatctaaccttcatgagcagaaaaaagctggggtctgtgttaatgagatcaacagcagaactccaatgcgcctctcatacattgagaaaaagaaaggccgccagacgactcatatcaccgttcagctggatattacggcctttttaaagaccgtaaagaaaaataagcacaagttttatccggcctttattcacattcttgcccgcctgatgaatgctcatccggagttccgtatggcaatgaaagacgtatctggtgtcatagaaattgcctatggaagtcgccgtcgtaaagcggatgcactagctacaagtgattatcgtgtcctgaatcaatatgctggaaatatatatgcgctggctgatgcggaaaatatttcgcgtaagattattacccgctgtatcaacacagccaaagtgcctgaatcagttgttgctcatatttctcaccccggtgaactatatgcccggtcaggtgatgcacttcacaaagcctttgcagataaagaggaattacttaagcagcaggcatctaaccttcatgagcagaaaacagctggggtgatatttgaagctaaagcagatatcactcttttgacttctgtgcttaaaacgtcatcagcatcaagaagaaacagctatgaccatgattacgaattcgagctcggtaccccggggaaggaagtggttttttatcgccctgaagaggatgccggcgatgaaaaaggctatgaatcttttccttggtttatcaaacgtgcgcacagtccatccagagggctttacagtgtacatatcaacccatatctcattcccttctttatcgggttacagaaccggtttacgcagtttcggcttagtgaaacaaaagaaatcaccaatccgtatgccatgcgtttatacgaatccctgtctgccccgatggtggattcgttaattgcgcgcgtaggagtaatggctcgcggtaatgccattactttgcctgtatgtggtcgggatgtgaagtttactcttgaagtgctccggggtgatagtgttgagaagacctctcgggtatggtcaggtaatgaacgtgaccaggagctgcttactgaggacgcactggatgatctcatcccttcttttctactgactggtcaacagacaccggcgttcggtcgaagagtatctggtgtcatagaaattgccgatgggagtcgccgtcgtaaagctgctgcacttaccgaaagtgaggggacaccggcgttcggtcgaagagtatctggtgtcatagaatttgccgatgggagtcgccgtcgtaaagctgctgcacttaccgaaagtgattatcgtgttctggttggcgagctggatgatgagcagatggctgcattatccagattgggtaacgattatcgcccaacaagtgcttatgaacgtggtcagcgttatgcaagccgattgcagaatgaatttgctggaaatatttctgcgctggctgatgcggaaaatatttcacgtaagattattacccgctgtatcaacaccgccaaattgcctaaatcagttgttgctcttttttctcaccccggtgaactatctgcccggtcaggtgatgcacttcaaaaagcctttacagataaagaggaattacttaagcagcaggcatctaaccttcatgagcagaaaaaagctggggtgatatttgaagctgaagaagttatcactcttttaacttctgtgcttaaaacgtcatctgcatcaagaactagtttaagctcacgacatcagtttgctcctggagcgacagtattgtataagggcgataaaatggtgcttaacctggacaggtctcgtgttccaactgagtgtatagagaaaattgaggccattcttaaggaacttgaaaagccagcaccctga

SEQ ID NO: 118113 - DNA, 2070 bp, Homo sapiens
  misc_feature (1)...(2070): n = a,t,c or g
atgacccataaaagtgaagagtacccagctttgcagaactttcagcggtataccggcatacagcatgtgcatcgcataggaatggcggaacgtatgtggtgtgaccggaacagagaacgtcacaccgtcagcagcagcggcggcaaccgcctccccaatccaggtcctgaccgttctatccgcgctttctctgtccttcctgtgcgacggggggatctcctagagtcgaaacgcaggtctgcaagctctaagtctacagcgcgcctaactgggggtatcggcacgattaatgtctttttcgatatgcttcgtgatctgctcaagaacgttgatcttanagggttcgagcctgatgtacgtattttgcttaccaaatacagcaatagtaatggctctcagtccccgtggatggaggagcaaattcgggatgcctggggaagcatggttctaaaaaatgttgtacgtgaaacggatgaagttggtaaagatacttcgttatcgacaccagctgccccgatggtggattcgttaattgcgcgcgtaggagtaatggctcgcggtaatgccattactttgcctgtatgtggtcgggatgtgaagtttactcttgaagtgctccggggtgatagtgttgagaagacctctcgggtatggtcaggtaatgaacgtgaccaggagctgcttactgaggacgcactggatgatctcatcccttcttttctactgactggtcaacagacaccggcgttcggtcgaagagtatctggtgtcatagaaattgccgggggatcctctagagtcgacaagcgggttgcaaccaagttgtataacatgttactaattggcccagtctccggcacagctgtccaaccccccccacatccgtccccaggatgcatggctattccccccccacaaaatccctggtcctacggccgctgcaccccttcccaccgctgccccctctcggtagccatcttaaatgttgcaccccctacgtccagccactatggaaggaagttactgtacatgagtgaagaggtatctatgggaaggggaaaggaagagaaggggccccacaaagagaaacgatgggcacaggaagagtcgaacagcaggtctgcaagccacaggtctcccctgatccccaaaaactttgatttgggtgagggttcacgaggtggggccatcgcccttgaaagacggtttttcgcccttgacggttggagtccacgttctttaatagtggactctggttccaaattgggaacaacactccaaccttatctcgggctatcttttgatttaaaagggattttgccgatttcggacccccccatcaaacaggattttcgcctgctggggcaaaccagcgtggaccgcttgctgcaactctctcagggccaggcggtgaagggcaatcagctgttgcccgtctcactggtgaaaagaaaaaccacccctggcgcccaatacgcaaaccgcctctccccgcgcgttggccgattcattaatgcagctggcacgacaggtttcccgactggaaagcgggcagttagggatgcgctcaagctgcaggaccagctgaagtctcccgtgaagaccttgtcagagggaaaaagagaaaggtacgggcagggcttggtgttgctctgcaagtgccatagatgggaaccagatgggctgttcctcccgttgcagctgtgctttgtcctgagcatactggggaacccgtcagtggtgcttctggatgagccgtcgaccgggatggaccccgaggggcagcagcaaatgtggactggtcaacagacacaggcgctcggtcggagagtatctggtgtgatagaacagtccgatgggagtggcagtcgtatagcagatgcactggcagacagagataatggtgttctggttggcgagctggatgatgagcagacgggtgcattatccagattgggtcacgattatcgcgctcctagggaacaatttgtccggtcagccgatgccagtcggaaagcgtctccagataaaaaggaaaaagtaagtcatcaggcatcataccgttcatga

SEQ ID NO: 118114 - DNA, 1962 bp, Homo sapiens
atggtggattcgttaattgcgcgcgtaggagtaatggctcgcggtaatgccattactttgcctgtatgtggtcgggatgtgaagtttactcttgaagtgctccggggtgatagtgttgagaagacctctcgggtatggtcaggtaatgaacgtgaccaggagctgcttactgaggacgcactggatgatctcatcccttcttttctactgactggtcaacagacaccggcgttcggtcgaagagtatctggtgtcatagaaattgccgatgggagtcgccgtcgtaaagctgctgcacttaccgaaagtgattatcgtgttctggttggcgagctggatgatgagcagatggctgcattatccagattgggtaacgattatcgcccaacaagtgcttatgaacgtggtcagcgttatgcaagccgattgcagaatgaatttgctggaaatatttctgcgctggctgatgcggaaaatatttcacgtaagattattacccgctgtatcaacaccgccaaattgcctaaatcagttgttgctcttttttctcaccccggtgaactatctgcccggtcagataaagaggaattacttaagcagcaggcatctaaccttcatgagcagaaaaaagctggggtgatatttgaagctgaagaagttatcactcttttaacttctgtgaaactgggcttaaaccctgtaggcgactctagaagacccccggtagagggacaccaggatttatttattctgcgaagtgatcttccgtcacaggtatttattcgcgataagctcatggagcggcgtaaccgtcgcacaggaaggacagagaaagcgcggatctgggaagtgacggacagaacggtcaggacctggattggggaggcggttgccgccgctgctgctgacggtgtgacgttctctgttccggtcacaccacatacgttccgccattcctatgcgatgcacatgctgtatgccggtataccgctgaaagttctgcaaagcctgatgggacataagtccatcagttcaacggaagtctacacgaaggtttttgcgctggatgtggctgcccggcaccggaacgtggactccaacgtcaaagggcgaaaaaccgtctatcagggcgatggcccactacgtgaaccatcacccaaatcaagttttttggggtcgaggtgccgtaaagcactaaatcggaaccctaaagggagcccccgattagagcttgacggggaaagccgcgaacgtgcgagaaaggaaggaagaagcgaaagagcggcgctagggccaactgggcttgaagccctgtttgggactctaaagacccccgacgggcgaagccctcgatgtgacaatctaaaaacttgtcacacttcacatggatctgtcatggcggaaacagcggttatcaatcacaagaaacgtaaaaatagcccgcgaatcgtccagtcaaacgacctcactgaggcggcatatagtctctcccgggatcaaaaacgtatgctgtatctgttcgttgaccagatcagaaaatctgatggcaccctacaggaacatgacggtatctgcgagatccatgttgctaaatatgctgaaatattcggattgacctctgcggaagccagtaaggatatacggcaggcattgaagagtttcgcggggaaggaagtatttattcgcgataagctcatggagcggcgtaaccgtcgcacaggaaggacagagaaagcgcggatctgggaagtgacggacagaacgacaaaggccatcatataccttgtcttcgaagccaacacgggaacagaaaacggttaccaaggcgaagaatctttatttaacaaagcgtactacggcggcggcacgaacttcttccgtaaagaaagccataagcttcagcagagcgctaaaaaactcgatgctgagttatcgaacggcgccctcggtttcatagagtga

SEQ ID NO: 118115 - DNA, 2322 bp, Homo sapiens
atgaagcgtgcgcctgttattccaaaacatacgctcaatactcaaccggttgaagatacttcgttatcgacaccagctgccccgatggtggattcgttaattgcgcgcgtaggagtaatggctcgcggtaatgccattactttgcctgtatgtggtcgggatgtgaagtttactcttgaagtgctccggggtgatagtgttgagaagacctctcgggtatggtcaggtaatgaacgtgaccaggagctgcttactgaggacgcactggatgatctcatcccttcttttctactgactggtcaacagacaccggcgttcggtcgaagagtatctggtgtcatagaaattgccgatgggagtcgccgtcgtaaagctgctgcacttaccgaaagtgattatcgtgttctggttggcgagctggatgatgagcagatggctgcattatccagattgggtaacgattatcgcccaacaagtgcttatgaacgtggaatacaaactaccatcagagaatactataaacacctctatgcaaataaactagaaaatctagaagaaaaggataaattcctggacacatacaccatcccaatactaaaccaggaagaagttgaatccctgaatagaccaataataggctctgaaattgaggcaataattaccaaccaaaaaaagtccaggactggacggattcacagccgaattcaaacagagaagccaggacttactgtgcaagaaatggaaaatagccccaaaggcattttggagatcatttggggctacccttcccatcacaaatgcataatacaagggcgtggaggacagaatgggggcaccactgcccagtacaacctcacattactggctctgctccccaaattctgttgccacactccttggctgcccaagtgtgactctgccaaaccggattcagcaactcagcttgtcctactttcacaaggatccgtcagggcggaaccaccggttatcaatcacaagaaacgtaaaaatagcccgcgaatcgtccagtcaaacgccctcactgaggcggcaaatagtctctcccgggatcaaaaacgtatgctgtatctgttcgttgaccagatcagaaaatctgatggcaccctacaggaacatgacggtatctgcgagatccatgttgctaaatatgctgaaatattcggattgacctctgcggaagccagtaaggatatacggcaggcattgaagagtttcgcggggaaggaagtggttttttatcgccctgaagaggatgccggcgatgaaaaaggctatgaatcttttccttggtttatcaaacgtgcgcacagtccatccagagggctttacagtgtacatatcaacccatatctcattcccttctttatcgggttacagaaccggtttacgcagtttcggcttagtgaaacaaaagaaatcaccaatccgtatgccatgcgtttatacgaatccctgtgtcagtatcgtaagccggatggctcaggcatcgtctctctgaaaatcgactggatcatagagcgttaccagctgcctcaaagttaccagcgtatgcctgacttccgccgccgcttcctgcagtcacatggatctgtcatggcggaaacagcggttatcaatcacaagaaacgtaaaaatagcccgcgaatcgtccagtcaaacgacctcactgaggcggcatatagtctctcccgggatcaaaaacgtatgctgtatctgttcgttgaccagatcagaaaatctgatggcaccctacaggaacatgacggtatctgcgagatccatgttgctaaatatgctgaaatattcggattgacctctgcggaagccagtaaggatatacggcaggcattgaagagtttcgcggggaaggaagtggttttttatcgccctgaagaggatgccggcgatgaaaaaggctatgaatcttttccttggtttatcaaacgtgcgcacagtccatccagagggctttacagtgtacatatcaacccatatctcattcccttctttatcgggttacagaaccggtttacgcagtttcggcttagtgaaacaaaagaaatcaccaatccgtatgccatgcgtttatacgaatccctgtgtcagtatcgtaagccggatggctcaggcatcgtctctctgaaaatcgactggatcatagagcgttaccagctgcctcaaagttaccagcgtatgcctgacttccgccgccgcttcctgcaggtctgtgttaatgagatcaacagcagaactccaatgcgcctctcatacatgagaaaaagaaaggcgggtatcctctag

SEQ ID NO: 118116 - DNA, 2169 bp, Homo sapiens
  misc_feature (1)...(2169): n = a,t,c or g
atggacgatatcccgcaagaggcccggcagtaccggcataaccaagcctatgcctacagcatccagggtgacggtgccgaggatgacgatgagcgcattgttagatttcatacacgggtcaccgtcgacagcgacacacttgcatcggatgcagcccggttaacgtgccggcacggcctgggtaaccaggtattttgtccacataaccgtgcgcaaaatgttgtggataagcaggacacagcagcaatccacagcaggcatacaaccgcacaccgaggttactccgttctacaggttacgacggggttctttagagtcgacagcaggcttcatggaggaagtgatgatggttacgggttcccaaagaatgactatgagttgcacagggcaagaagggaggaaggagttcccaatccaccaaggaggccaatgggctactttgtgttgctcctgaaacacatataccaagggccagataacggtaccagctcagggaagtgtggcaaggagctccacagagcccagataatgaagcgtgcgcctgttattccaaaacatacgctcaatactcaaccggttgaagatacttcgttatcgacaccagctgccccgatggtggattcgttaattgcgcgcgtaggagtaatggctcgcggtaatgccattactttgcctgtatgtggtcgggatgtgaagtttactcttgaagtgctccggggtgatagtgttgagaagacctctcgggtatggtcaggtaatgaacgtgaccaggagctgcttactgaggacgcactggatgatctcatcccttcttttctactgactggtcaacagacaccggcgttcggtcgaagagtatctggtgtcatagaaattgccgatgggagtcgccgtcgtaaagctgctgcacttaccgaaagtgattatcgtgttctggttggcgagctggatgatgagcagatggctgcattatccagattgggtaacgattatcgcccaacaagtgcttatganacccgattgcagaatgaatttgctggaaatatttctgcgctggctgatgcggaaaatatttcacgtaagattattacccgctgtatcaacaccgccaaattgcctaaatcagttgttgctcttttttctcaccccggtgaactatctgcccggtcaggtgatgcacttcaaaaagcctttacagataaagaggaattacttaagcagcaggcatctaaccttcatgagcagaaaggggatcctctagagtcgaccagcagttatgcaaccaagttcccaataagaagtccctttgcgattttgaaagagataaagcatgggtcccccaggccaaagggcaagacttccaacgccaggcctttaccagaaagcaacataggcaccgccagcaggtacaaactgcccaaccacagatcagaaaatctgatggcacccttacaggaacatgacggtatctgcgagatccatgttgctaaatatgctgaaatattcggattgacttctgcggaagccagtaaggatatacggcaggcattgaagagtttcgcggggaaggaagtggttttttatcgccntgaagaggatgccggcgatgaaaaaggctatgaatcttttccttggtttatcaaacgtgcgcacagtccatccagagggctttacagtgtacatatcaacccatatctcattcccttctttatcgggttacagaaccggtttacgcagtttcggcttagtgaaacaaaagaaatcaccaatccgtatgccatgcgtttatacgaatccctgtgtcagtatcgtaagccggatggctcaggcatcgtctctctgaaaatcgactggatcatagagcgttaccagctgcctcaaagttaccagcgtatgcctgacttccgccgccgcttcctgcaggtctgtgttaatgagatcaacagcagaactccaatgcgcctctcatacattgagaaaaagaaaggccgccagacgactcatatcaaccgaggcacaagagcagacgggccacgccccggaaaaggagaccacaaagacccaaccaggcgcacaacgactcccccgccagcggccattctcgacatcagccagccagcaacagaaaccgccgacacatccttccaagacccaaacagcaaaggctaa

SEQ ID NO: 118117 - DNA, 1812 bp, Homo sapiens
  misc_feature (1)...(1812): n = a,t,c or g
atgcccagtccttctccacttttttttgttgctactatccatgactgtcaggaactgttggaaactaccgaaactggcccatccgatcttcaagatgtgcccctagagaaggcggacgccaccgtgttcacagacggtagcagctttctcgagcagggagtacgaaaggccggtgcagctgttaccacggagacagatgtgttgtgggctcatgctttaccagcaaacacctcagcgcaaaaagctgaattgatcgccctcactcaggctctccgatggggtaaggatattaacgttgacactgacagcaggtacgcctttgctacggtgcatgtacatggagccatctgccaggagcgcaggctactcacctcagcagaaaaggctatcaaaaacaagaatcccccgtcttcaaagcctaacagatcaagcagctctctggggaacaacctgcgaccagatggctccatgtacatgcaccgtagcaaaggcgtacctgctgtcagtgtcaacgttaatatccttaccccatcggagagcctgaacttggaatccagttgtgtgaccaaaaagttatctccagaaaaggaaatttatgaaatggaatcactccagtgggagaatatggggaaacgtatcaaccatcaccttcaatacaatggtcttggagacaatatggagtgcaaaggcaacttagagggtcaagaagcaagtcaggaagggctttacatgtgtgtcaaaattacctgtgaagaaaaggccactgaaagtcattcaacctcttctacttttcatcggataattcctaccaaggaaaaattgtacaaatcaccgaaccccagccaggacaccgggtattcccagcaccatacaagaactactttttcgaagaggcaacccaaaaactgcgagcggttccccgtggagggccgcccactcaccttgccggcgcagacaagctncggatattctggctcaaagccagatgtgattaccttactggagcaagggaaagagccctgcgtggtggcgagggatgtgacaagaagacagtgccccgctgccccgatggtggattcgttaattgcgcgcgtaggagtaatggctcgcggtaatgccattactttgcctgtgtgtggtcgggatgtgaagtttactcttgaagtgctccggggtgatagtgttgagaagacctctcgggtatggtcaggtaatgaacgtgaccaggagctgcttactgaggacgcactggatgatctcatcccttcttttctactgactggtcaacagacaccggcgttcggtcgaagagtatctggtgtcatagaaattgccgatgggagtcgccgtcgtaaagctgctgcacttaccgaaagtgattatcgtgttctggttggcgagctggatgatgagcagatggctgcattatccagattgggtaacgattatcgcccaacaagtgcttatgaacgtggtcagcgttatgcaagccgattgcagaatgaatttgctggaaatatttctgcgctggctgatgcgganaatatttcacgtaagaatattacccgctgtatcaacaccgccaaattgcctaaatcagttgttgctcttttttctcaccccggtgactatctgcccgtgccgcaagccaaaggcaacaatgtggttatcacaagctacatgacaaacagaggcttcttcgaggataaaaaggcaacatttgcgccaagcttcttaatgaacatcaaaggcaataaaacatccgttgtcaaaaacagcatcctggagcaaggacagctgacagtcaactaa

SEQ ID NO: 118118 - DNA, 1557 bp, Homo sapiens
atgacacttccaaaggaacacaactctagcaatatacaccaaaggaaaggggtctttctagagtcgcacgaggaggcatgcaagcctgaagtcgccagtattatcacgcggctgtccagggacctttataatggtttccctggaattaaggggaagaaagaaaatccggcccaagaggtagacatttcagcagtcctcactgcagcacaaatcaaagaagaaaaacaaagggattttgccgatttcggaaccaccatcaaacaggattttcgcctgctggggcaaaccagcgtggaccgcttgctgcaactctctcagggccaggcggtgaagggcaatcagctgttgcccgtctcactggtgaaaagaaaaaccaccctggcgcccaatacgcaaaccgcctctccccgcgcgttggccgattcattaatgcagctggcacgacaggtttcccgactggaaagcgggcatgttgagaagacctctcgggtatggtcaggtaatgaacgtgaccaggagctgcttactgaggacgcactggatgatctcatcccttcttttctactgactggtcaacagacaccggcgttcggtcgaagagtatctggtgtcatagaaattgccgatgggagtcgccgtcgtaaagctgctgcacttaccgaaagtgattatcgtgttctggttggcgagctggatgatgagcagatggctgcattatccagattgggtaacgattatcgcccaacaagtgcttatgaacgtggtcagcgttatgcaagccgattgcagaatgaatttgctggaaatatttctgcgctggctgatgcggaaaatatttcacgtaagattattacccgctgtatcaacaccgccaaattgcctaaatcagttgttgctcttttttctcaccccggtgaactatctgcccggtcaggtgatgcacttcaaaaagcctttacagataaagaggaattacttaagcagcaggcatctaaccttcatgagcagaaaaaagctggggtgatatttgaagctgaagaagttatcactcttttaacttctgtgcttaaaacggattttgccgatttcggaaccaccatcaaacaggattttcgcctgctggggcaaaccagcgtggaccgcttgctgcaactctctcagggccaggcggtgaagggcaatcagctgttgcccgtctcactggtgaaaagaaaaaccaccctggcgcccaatacgcaaaccgcctctccccgcgcgttggccgattcattaatgcagctggcacgacaggtttcccgactggaaagcgggcaggattttgccgatttcggaaccaccatcaaacaggattttcgcctgctggggcaaaccagcgtggaccgcttgctgcaactctctcagggccaggcggtgaagggcaatcagctgttgcccgtctcactggtgaaaagaaaaaccaccctggcgcccaatacgcaaaccgcctctccccgcgcgttggccgattcattaatgcagctggcacgacaggtttcccgactggaaagcgggcagtga

SEQ ID NO: 118119 - DNA, 1599 bp, Homo sapiens
atgctgcagatccttaaacagcagcaaaacgaaaaataccaagtgcctcaattcgatcaatcaacgattaaaaatattgagtctgcaaaaggacttgatgtgtgggacagctggccgctgcaaaacgctgacggaacagtagctgaatacaacggctatcacgttgtgtttgctcttgcgggaagcccgaaagacgctgatgacacatcaatctacatgttttatcaaaaggtcggcgacaactcaatcgacagctggaaaaacgcgggccgtgtctttaaagacagcgataagttcgacgccaacgatccgatcctgaaagatcagacgcaagaatggtccggttctgcaacctttacatctgacggaaaaatccgtttattctacactgactattccggtaaacattacggcaaacaaagcctgacaacagcgcagaccgttcagctggatattacggcctttttaaagaccgtaaagaaaaataagcacaagttttatccggcctttattcacattcttgcccgcctgatgaatgctcatccggagttccgtatggcaatgaaagacggtgagctggtgatatgggatagtgttcacccttgttacaccgttttccatgagcaaactgaaacgttttcatcgctctggagtgaataccacgacgatttccggcagtttctacacatatattcgcaagatgtggcgtgttacggtgaaaacctggcctatttccctaaagggtttattgagaatatgtttttcgtctcagccaatccctgggtgagtttcaccagttctcacttaaacgtggccaatatggacaacttcttcgcccccgttttcaccatgggcaaatattatacgcaaggcgacaaggtgctgatgccgctggcgattcaggttcatcatgccgtttgtgatggcttccatgtcggcagaatgtttaatgaattcccccagccctgcgatgagtggcagggcggggcacatacgctcaatactcaaccggttgaagataattcgttatcgacaccagctgccccgatggtggattcgttaattgcgcgcgtaggagtaatggctcgcggtaatgccattactttgcctgtatgtggtcgggatgtgaagtttactcttgaagtgctcctgggtgatagtgttgagaagacctctcgggtatggtcaggtaatgaacgtgaccaggagctgcttactgaggacgcactggatgatctcatcccttcttttctactgactggtcaacagacaccggcgttcggtcgaagagtatctggtgtcatagaaattgccgatgggagtcgccgtcgtaaagctgatgcacttaccgaaagtgattatcgccttctggttggcgagctgcatgatgagcagatggctgcattatccagattgggtaacgattatcgctcaacaagtgcttatgaacgtgttctgcaaagcctgatgggacataagtccatcagttcaacggaagtctacacgaaggtttttgcgctggatgtggctgcccggcaccgggtgcagtttgcgatgccggagtctgatgcggttgcgatgctgaaacaattatcctga

SEQ ID NO: 118120 - DNA, 2124 bp, Homo sapiens
atgaagcgtgcgcctgttattccaaaacatacgctcaatactcaaccggttgaagatacttcgttatcgacaccagctgccccgatggtggattcgttaattgcgcgcgtaggagtaatggctcgcggtaatgccattactttgcctgtatgtggtcgggatgtgaagtttactcttgaagtgctccggggtgatagtgttgagaagacctctcgggtatggtcaggtaatgaacgtgaccaggagctgcttactgaggacgcactggatgatctcatcccttcttttctactgactggtcaacagacaccggcgttcggtcgaagagtatctggtgtcatagaaattgccgatgggagtcgccgtcgtaaagctgctgcacttaccgaaagtgattatcgtgttctggttggcgagctggatgatgagcagatggctgcattatccagattgggaggagcgactcaagccttcgcgaaagaaaataaccaaaaagcatacaaagaaacgtacggcgtctctcatattacacgccatgatatgctgcagatccctaaacagcagcaaaacgaaaaataccaagtgcctcaattcgatcaatcaacgattaaaaatattgagtctgcaaaaggacttgatgtgtgggacagctggccgctgcaaaacgctgacggaacagtagctgaatacaacggctatcacgttgtgtttgctcttgcgggaagcccgaaagacgctgatgacacatcaatctacatgttttatcaaaaggtcggcgacaactcaatcgacagctggaaaaacgcgggccgtgtctttaaagacagcgataagttcgacgccaacgatccgatcctgaaagatcagacgcaagaatggtccggttctgcaacctttacatctgacggaaaaatccgtttattctacactgactattccggcccaggcggcaatatagaaataaaaagagctcctaacctcgggggaacccccattaaataccacaaggaaatcatggaattattgcatgcagtgcaaaaccccaaggaggtggcagtcttacactgccaaagccatcaaaaaggtgaagaagagaaggcagaaggaaactgtcaggcagatgctgaggccaaaattgctgccaggtggaacctcccattagcaatacccgtggaaagacccttggtatggaacaatcccctccaagagattaagccccagtattccctgactgaaacagaatggggactttcacagggtcatagttttcttccctcagggtggttaacgacagaagaaggaaaggtactcatacccgaagccagccagtggaaaatgcttaaaaccctccaccaaacttttcataggggtattgagaacactcatcaaatggccaaatccctatttacagggccaaatctcctctggaccatccgacagatagtcaaagcctgtcaccaacatcaaagacgaaaggtagataaaaccacaaagatggggagaaaccagagcagaaaagctgaaacttccaaaaaagagaacatctcttctcctccaaaggatcgcaacccttctccagcaagggaacaaaactggacagagaatgagcttgacgagttgacagaagtagatttcagaagggattttgccgatttcggaaccaccatcaaacaggattttcgcctgctggggcaaaccagcgtggaccgcttgctgcaactctctcagggccaggcggtgaagggcaatcagctgttgcccgtctcactggtgaaaagaaaaaccaccctggcgcccaatacgcaaaccgcctctccccgcgcgttggccgattcattaatgcagctggcacgacaggtttcccgactggaaagcgggcaggattttgccgatttcggaaccaccatcaaacaggattttcgcctgctggggcaaaccagcgtggaccgcttgctgcaactctctcagggccaggcggtgaagggcaatcagctgttgcccgtctcactggtgaaaagaaaaaccaccctggcgcccaatacgcaaaccgcctctccccgcgcgttggccgattcattaatgcagctggcacgacaggtttcccgactggaaagcgggcagtga

SEQ ID NO: 118121 - DNA, 2451 bp, Homo sapiens
atgaggggcggcaagtcctggttgatttctgggtttctacttctttgtaacgttcagcagtttatcgatgaaggcaattatacatccggcgacaaccatacgctgagagaccctcactacgttgaagacaaaggccataaataccttgtattcgaagccaacacgggaacagaaaacggataccaaggcgaagaatctttatttaacaaagcgtactacggcggcggcacgaacttcttccgtaaagaaagccagaagcttcagcagagcgctaaaaaacgcgatgctgagttagcgaacggcgccctcggtatcatagagttaaataatgattacacattgaaaaaagtaatgaagccgctgatcacttcaaacacggaagatcaagattctgacattcctatcctcatgttgcctgtgccccaatccccatgtgttacctggaatctttggtgtcagttgtcacacacagtgccagtgaccccattcctgccccctgtggattcaggggcacacatctcctttaaacccctgcctgtatgtggtcgggatgtgaagtttactcttgaagtgctccggggtgatagtgttgagaagacctctcgggtatggtcaggtaatgaacgtgaccaggagctgcttactgaggacgcactggatgatctcatcccttcttttctactgactggtcaacagacaccggcgttcggtcgaagagtatctggtgtcatagaaattgccgatgggagtcgccgtcgtaaagctgctgcacttaccgaaagtgattatcgtgttctggttggcgagctggatgatgagcagatggctgcattatccagattgggtaacgattatcgcccaacaagtgcttatgaacgtggtcagcgttatgcaagccgattgcagaatgaatttgctggaaatatttctgcgctggctgatgcggaaaatatttcacgtaagattattacccgctgtatcaacaccgccaaattgcctaaatcagttgttgctcttttttctcaccccggtgaactatctgcccggtcaggtgatgcacttcaaaaagcctttacagataaagaggaattacttaagcagcaggcatctaaccttcatgagcagaaaaaagctgggctcgtggaaggtaacgacccccagggaacagcctcaatgtatcacggatgggtaccagatcttcatattcatgcagaagacactctcctgcctttctatcttggggaaaaggacgatgtcacttatgcaataaagcccacttgctggccggggcttgacattattccttcctgtctggctctgcaccgtattgaaactgagttaatgggcaaatttgatgaaggtaaactgcccaccgatccacacctgatgctccgactggccattgaaactgttgctcatgactatgatgtcatagttattgacagcgcgcctaacctgggtatcggcacgattaatgtcgtatgtgctgctgatgtgctgattgttcccacgcctgctgagttgtttgactacacctccgcactgcagtttttcggtatgcttcggtatctgctcaagaacgttgatcttgaagggttcgagcctgatgtacgtattttgcttgccaaatacagcagtagtaatggctctcagtccccgtggctggaggagcaaattcgggatgcctggggaagcatggttctaaaaaatgttgtacccgaaaacggggaagggccagataccagacaatcaggggcagcccctcggccccagaacccactgaaattactcaaactagccaatccaaactgctttttcttttccatgttccctttcacgaaccacaatatagccacttattggcaggtgcctctctcatgcctcttggccaaacccgtgcttcctctgagtgaccctccagccagtaaggatatacggcaggcattgaagagtttcgcggggaaggaagtggttttatatcgccctgaagaggatgccggcgatgaaaaaggctatgaatcttttccttggtttatcaaacgtgcgcacagtccatccagagggctttacagtgtacatatcaacccatatctcattcccttctttatcgggttacagaaccggtttacgcagtttcggcttagtcgagcagaagaaatcaccaatccgtatgccatgcgtttataccaatccctgggtcagtatcgtaagcccgatggcgtcggcatcgtctctctgaaaatcgacttggtcatagagcggttcccgctgcctccaaggtttttagcttctttgcgatgggttcaaacaccctcctttagcttggagaagtttgttattaccgatcttctgaagcctacttctgtcaactcatcaaagtcattctccatccagctttgttccattgctggcgaggagctgcgttcctttggaggagaagaggcgctctga

SEQ ID NO: 118122 - DNA, 2544 bp, Homo sapiens
atggtggattcgttaattgcgcgcgtaggagtaatggctcgcggtaatgccattactttgcctgtatgtggtcgggatgtgaagtttactcttgaagtgctccggggtgatagtgttgagaagacctctcgggtatggtcaggtaatgaacgtgaccaggagctgcttactgaggacgcactggatgatctcatcccttcttttctactgactggtcaacagacaccggcgttcggtcgaagagtatctggtgtcatagaaattgccgatgggagtcgccgtcgtaaagctgctgcacttaccgaaagtgattatcgtgttctggttggcgagctggatgatgagcagatggctgcattatccagattgggtaacgattatcgcccaacaagtgcttatgaacgtggtcagcgttatgcaagccgattgcagaatgaatttgctggaaatatttctgcgctggctgatgcggaaaatatttcacctgccccgatggtggattcgttaattgcgcgcgtaggagtaatggctcgcggtaatgccattactttgcctgtatgtggtcgggatgtgaagtttactcttgaagtgctccggggtgatagtgttgagaagacctctcgggtatggtcaggtaatgaacgtgaccaggagctgcttactgaggacgcactggatgatctcatcccttcttttctactgactggtcaacagacaccggcgttcggtcgaagagtatctggtgtcatagaaattgccgatgggagtcgccgtcgtaaagctgctgcacttaccgggggtgattatcgtgttctggttggcgagctggatgatgagcagatggctgcattatccagattgggtaacgattatcgcccaacaagtgcttatgaacgtggtcagcgttatgcaagccgattgcagaatgaatttgctggaaatatttctgcgctggctgatgcggaaaatatttcacgtaagattattacccgctgtatcaacaccgccaaattgcctaaatcagttgttgctcttttttctcaccccggtgaactatctgcccggtcaggtgatgcacttcaaaaagcctttacagataaagaggaattacttaagcagcaggcatctaaccttcatgagcagaaaaaagctggggtgatatttgaagctgaagaagttatcactcttttaacttctgtgcttaaaacgtcatctgcatcaagaactagtttaagctcacgacatcagtttgctcctggagcgacagtattgtataagggcgataaaatggtgcttaacctggacagggattttgccgatttcggaccaaccatcaaacaggattttcgcctgctggggcaaaccagcgtggaccgcttgctgcaactctctcagggccaggcggtgaagggcaaacagctgttgcccgtctcactggctttgcagaactttcagcggtataccggcatacagcatgtgcatcgcataggaatggcggaacgtatgtggtgtgaccggaacagagaacgtcacaccgtcagcagcagcggcggcaaccgcctccccaatccaggagtaatggctcgcggtaatgccattactttgcctgtatgtggtcgggatgtgaagtttactcttgaagtgctccggggtgatagtgttgagaagacctctcgggtatggtcaggtaatgaacgtgaccaggagctgcttactgaggacgcactggatgatctcatcccttcttttctactgactggtcaacagacaccggcgttcggtcgaagagtatctggtgtcatagaaattgccgatgggagtcgccgtcgtaaagctgctgcacttaccgaaagtgattatcgtgttctggttggcgagctggatgatgagcagatggctgcattatccagattgggtaacgattatcgcccaacaagtgcttatgaacgtggtcagcgttatgcaagccgattgcagaatgaatttgctggaaatatttctgcgctggctgatgcggaaaatatttcacgtaagattattacccgctgtatcaacaccgccaaattgcctaaatcagttgttgctcttttttctcaccccggtgaactatctgcccggtcaggtgatgcacttcaaaaagcctttacagataaagaggaattacttaagcagcaggcatctaaccttcatgagcagaaaaaagctgggaccgttcagctggatattacggcctttttaaagaccgtaaagaaaaataagcacaagttttatccggcctttattcacattcttgcccgcctgatgaatgctcatccggagttccgtatggcaatgaaagacgggtttattgagaatatgtttttcgtctcagccaatccctgggtgagtttcaccagttttgatttaaacgtggccaatatggacaacttcttcgcccccgttttcaccatgggcaaatattatacgcaaggcgacaaggtgctgatgccgctggcgattcagttcgctcgctatgctcggttacacggctgcggcgagcgctag

SEQ ID NO: 118123 - DNA, 1326 bp, Homo sapiens
  misc_feature (1)...(1326): n = a,t,c or g
atggctccgggtaatgccattacttgccctgtatgtggtcgggatgtgaagttacttctgaaagtgctccggggtgatagtgttgagaagacctctcgggtatggtcaggtaatgaacgtgaccaggagctgcttactgaggacgcactggatgatctcatcctttcttttctactgactggtcaacagacaccggcgttcggtcgaagagtatctggtgtcatagaaattgccgatgggagtcgccgtcgtaaagctgctgcacttaccgaaagtgattatcgtgttctggttggcgagctggatgatgagcagatggctgcattatccagattgggtaacgattatcgcccaacaagtgcttatgaacgtggtcagcgttatgcaagccgattgcagaatgaatttgctggaaatatttctgcgctggctgatgcggaaaatatttcacgtaagattattacccgctgtatcaacaccgccaaattgcctaaatcagttgttgctcttttttctcaccccggtgaactatctgcccggtcaggtgatgcacttcaaaaagcctttacagataaagaggaattacttaagcagcaggcatctaaccttcatgagcagaaaaaagctggggtgatatttgaagctgaagaagttatcactcttttaacttctgtgcttaaaacgtcatctgcatcaagaactagtttaagctcacgacatcagtttgctcctggagcgacagtattgtataagggcgataaaatgacaccggcgttcggtcgaagagtatctggtgtcatagaaattgccgatgggagtcgccgtcgtanagctgctgcacttaccgaaagtgattatcgtgttctggttggcgagctggatgatgagcagatggctgcattatccagattgggtaacgattatcgcccaacaagtgcttatgaacgtggtcagcgttatgcaagccgattgcagaatgaatttgctggaaatatttctgcgctggctgatgcggaaaatatttcacgtaagattattacccgctgtatcaacaccgccaaattgcctaaatcagttgttgctcttttttctcaccccggtgaactatctgcccggtcaggtgatgcacttcaaaaagcctttacagataaagaggaattacttaagcagcaggcatctaaccttcatgagcagaaaaaagctggggtgatatttgaagctgaagaagttatcactcttttaacttctgtgcttaaaacgtcatctgcatcaagaactagtttaagctcacgacatcagtttgctcctggagcgacagtattgtaa

SEQ ID NO: 118124 - DNA, 1902 bp, Homo sapiens
atgaaactcatggaaacacttaaccagtgcataaacgctggtcatgaaatgacgaaggctatcgccattgcacagtttaatgatgacagcccggaagcgaggaaaataacccggcgctggagaataggtgaagcagcggatttagttggggtttcttctcaggctatcagagatgccgagaaagcagggcgactaccgcacccggatatggaaattcgaggacgggttgagcaacgtgttggttatacaattgaacaaattaatcatatgcgtgatgtgtttggtacgcgattgcgacgtgctgaagacgtatttccaccggtgatcggggttgctgcccataaaggtggcgtttacaaaacctcagtttctgttcatcttgctcaggatctggctctgaaggggctacgtgttttgctcgtggaagggaacagcctcaatgtatcacggatgggtaccagatcttcatattcatgcagaagacactctcctgccttactccttggggaaaagactgatgtcacttatgcaataaagcccacttgctggccggggcttgacattattccttcctgtctggctctgcaccgtattgaaactgagttaatgggcaaatttgatgaaggtaaactgcccaccgatccacacctgatgctccgactggccattgaaactgttgctcatgactatgatgtcatagttattgacagcgcgcctaacctgggtatcggcacgattaatgtcgtatgtgctgctgatgtgctgattgttcccacgcctgctgagttgtttgactacacctccgcactgcagtttttcgatatgcttcgtgatctgctcaagaacgttgatcttaaagggttcgagcctgatgtacgtattttgcttaccaaatacagcaatagtaatggctctcagtccccgtggatggaggagcaaattcgggatgcctggggaagcatggttctaaaaaatgttgtacgtgaaacgaatgaagttggtaaagctgccccgatggtggattcgttaattgcgcgcgtaggagtaatggctcgcggtaatgccattactttgcctgtatgtggtcgggatgtgaagtttactcttgaagtgctccggggtgatagtgttgagaagacctctcgggtatggtcaggtaatgaacgtgaccaggagctgcttactgaggacgcactggatgatctcatcccttcttttctactgactggtcaacagacaccggcgttcggtcgaagagtatctggtgtcatagaaattgccgatgggagtcgccgtcgtaaagctgctgcacttaccgaaagtgattatcgtgttctggttggcgagctggatgatgagcagatggctgcattatccagattgggtaacgattatcgcccaacaagtgcttatgaacgtggtcagcgttatgcaagccgattgcagaatgaatttgctggaaatatttctgcgctggctgatgcggaaaatatttcacgtaagattattacccgctgtatcaacaccgccaaattgcctaaatcagttgttgctcttttttctcaccccggtgaactatctgcccggtcaggtgatgcacttcaaaaagcctttacagataaagaggaattacttaagcagcaggcatctaaccttcatgagcagaaaaaagctggggtgatatttgaagctgaagaagttatcactcttttaacttctgtgcttaaaacgtcatctgcatcaagaactagtttaagctcacgacatcagtttgctcctggagcgacagtattgtataagggcgataaaatggtgcttaacctggacaggtctcgtgttccaactgagtgtatagagaaaattgaggccattcttaaggaacttgaaaagccagcaccctga

SEQ ID NO: 118125 - DNA, 1686 bp, Homo sapiens
  misc_feature (1)...(1686): n = a,t,c or g
atggtggattcgttaattgcgcgcgtagaagtaatggctcgcggtaatgccattactttgcctgtatgtggtcgggatgtgaagtttactcttgaagtgctccggggtgatagtgttgagaagacctctcgggtatggtcaggtaatgaacgtgaccaggagctgcttactgaggacgcactggatgatctcatcccttcttttctactgactggtcaacagacaccggcgttcggtcgaagagtatctggtgtcatagaaattgccgatgggagtcgccgtcgtaaagctgctgcacttaccgaaagtgattatcgtgttctggttggcgagctggatgatgagcagatggctgcattatccagattgggtaacgattatcgcccaacaagtgcttatgaacgtggtcagcgttatgcaagccgattgcagaatgaatttgctggaaatatttctgcgctggctgatgcggaaaatatttcacgtaagattattacccaatgtatcaacaccgccaaattgcctaaatcagttgttgctcttttttctcaccccggtgaactatctgcccggtcaggtgatgcacttcaaaaagcctttacagataaagaggaattacttaagcagcaggcatctaacgttcatgagcagaaaaaaactggggtgatatttgaagctgaagaagggagtttttcgactattccgcgaganatactttcgttatcgacaccagctgccccgatggtggattcgttaattgcgcgcgtaggagtaatggctcgcggtaatgccattactttgcctgtatgtggtcggaatgtgaagtttactcttgaagtgctccggggtgatagtgttgagaagacctctcgggtatggtcaggtaatgaacgtgaccaggagctgcttactgaggacgcactggatgatctcatcccttcttttctactgactggtcaacagacaccggcgttcggtcgaagagtatctggtgtcatagaaattgccgatgggagtcgccgtcgtaaagctgctgcacttaccgaaagtgattatcgtgttctggttggcgagctggatgatgagcagatggctgcattatccagattgggtaacgattatcgcccaacaagtgcttatgaacgtggtcagcgttatgcaagccgattgcagaatgaatttgctggaaatatttctgcgctggctgatgcggaaaatatttcacgtaagattattacccgctgtatcaacaccgccaaattgcctaaatcagttgttgctcttttttctcaccccggtgaactatctgcccggtcaggtgatgcacttcaaaaagcctttacagataaagaggaattacttaagcagcaggcatctaaccttcatgagcagaaaaaagctgggcaaaatacgtacatcaggctcgaaccctttaagatcaacgttcttgagcagatcacgaagcatatcgaaaaactgcagtgcggaggtgtagtcaaacaactcagcaggcgtgggaacaatcagcacatcagcagcacatacgacattaatcgtgccgatacccaggttaggcgcgctgtcaataactatgacatcatagtcatgagcaacagtttcaatggccagtcggagcatcaggtgtggatcggtgggcagtttaccttcatcaaatttgcccattaa

SEQ ID NO: 118126 - DNA, 1440 bp, Homo sapiens
atggtggattcgttaattgcgcgagtaggagtaatggctcgcggtaatgccattactttgcctgtatgtggtcgggatgtgaagtttactcttgaagtgctccggggtgatagtgttgagaagacctctcgggtatggtcaggtaatgaacgtgaccaggagctgcttactgaggacgcactggatgatctcatcccttcttttctactgactggtcaacagacaccggcgttcggtcgaagagtatctggtgtcatagaaattgccgatgggagtcgccgtcgtaaagctgctgcacttaccgaaagtgattatcgtgttctggttggcgagctggatgatgagcagatggctgcattatccagattgggtaacgattatcgcccaacaagtgcttatgaacgtggtcagcgttatgcaagccgattgcagaatgaatttgctggaaatatttctgcgctggctgatgcggaaaatatttcacgtaagattattacccgctgtatcaacaccgccaaattgcctaaatcagttgttgctcttttttctcaccccggtgaactatctgcccggtcaggtgatgcacttcaaaaagcctttacagataaagaggaattacttaagcagcaggcatctaaccttcatgagcagaaaaaagctggggtgatatttgaagctgaagaagttatcactcttttaacttctgtgcttaaaacggattttgccgatttcggaaccaccatcaaacaggattttcgcctgctggggcaaaccagcgtggaccgcttgctgcaactctctcagggccaggcggtgaagggcaatcagctgttgcccgtctcactggtgaaaagaaaaaccaccctggcgcccaatacgcaaaccgcctctccccgcgcgttggccgattcattaatgcagctggcacgacaggtttcccgactggaaagcgggcaggattttgccgatttcggaaccaccatcaaacaggattttcgcctgctggggcaaaccagcgtggaccgcttgctgcaactctctcagggccaggcggtgaagggcaatcagctgttgcccgtctcactggtgaaaagaaaaaccaccctggcgcccaatacgcaaaccgcctctccccgcgcgttggccgattcattaatgcagctggcacgacaggtttcccgactggaaagcgggcaggattttgccgatttcggaaccaccatcaaacaggattttcgcctgctggggcaaaccagcgtggaccgcttgctgcaactctctcagggccaggcggtgaagggcaatcagctgttgcccgtctcactggtgaaaagaaaaaccaccctggcgcccaatacgcaaaccgcctctccccgcgcgttggccgattcattaatgcagctggcacgacaggtttcccgactggaaagcgggcagtga

SEQ ID NO: 118127 - DNA, 3420 bp, Homo sapiens
atggtggattcgttaattgcgcgcgtaggagtaatggctcgcggtaatgccattactttgcctgtatgtggtcgggatgtgaagtttactcttgaagtgctccggggtgatagtgttgagaagacctctcgggtatggtcaggtaatgaacgtgaccaggagctgcttactgaggacgcactggatgatctcatcccttcttttctactgactggtcaacagacaccggcgttcggtcgaagagtatctggtgtcatagaaattgccgatgggagtcgccgtcgtaaagctgctgcacttaccgaaagtgattatcgtgttctggttggcgagctggatgatgagcagatggctgcattatccagattgggtaacgattatcgcccaacaagtgcttatgaacgtggtcagcgttatgcaagccgattgcagaatgaatttgctggaaatatttctgcgctggctgatgcggaaaatatttcacgtctccccagtgcctaccattcttcactgcctggctcactcatttatatcactcgtttcaagttcatggaccttgctttagaattttcaagatattctcacatctatcagctcattcagtctttgaaatgttcctacaagcgaggcaacacagaaatcaaaatctccttttacagctctggacgctggcagtccaagatcaacgtgcgaacagggttagtttctcctgaggcctctccacttggcccgcagatggccgtcttttggctgagtcctcatggggtttctgctctgactaaggacagaatccggttttgggtagaggataaacctccttttatgcggatgacattattgagccttgattttggaggcaggcgagaagaagctgccccgatggtggattcgttaattgcgcgcgtaggagtaatggctcgcggtaatgccattactttgcctgtatgtggtcgggatgtgaagtttactcttgaagtgctccggggtgatagtgttgagaagacctctcgggtatggtcaggtaatgaacgtgaccaggagctgcttactgaggacgcactggatgatctcatcccttcttttctactgactggtcaacagacaccggcgttcggtcgaagagtatctggtgtcatagaaattgccgatgggagtcgccgtcgtaaagctgctgcacttaccgaaagtgattatcgtgttctggttggcgagctggatgatgagcagatggctgcattatccagattgggtaacgattatcgcccaacaagtgcttatgaacgtggtcagcgttatgcaagccgattgcagaatgaatttgctggaaatatttctgcgctggctgatgcggaaaatatttcacgtaagattattacccgctgtatcaacaccgccaaattgcctaaatcagttgttgctcttttttctcaccccggtgaactatctgcccgggattttgccgatttcggaaccaccatcaaacaggattttcgcctgctggggcaaaccagcgtggaccgcttgctgcaactctctcagggccaggcggtgaagggcaatcagctgttgcccgtctcactggtgaaaagaaaaaccaccctggcgcccaatacgcaaaccgcctctccccgcgcgttggccgattcattaatgcagctggcacgacaggtttcccgactggaaagcgggcaggattttgccgatttcggaaccaccatcaaacaggattttcgcctgctggggcaaaccagcgtggaccgcttgctgcaactctctcagggccaggcggtgaagggcaatcagctgttgcccgtctcactggtgaaaagaaaaaccaccctggcgcccaatacgcaaaccgcctctccccgcgcgttggccgattcattaatgcagctggcacgacaggtttcccgactggaaagcgggcagtatcccaagggttactttgtccagaacacagactttgacttcttcaactatgcgggactgcagcggtctgtgcttctgtacacgacacctaccacctacatcgatgacatcaccatcaccaccggcgtggagcatgacagtgctgaatctctttgccttgaataccagggtccacctctgatgttcactgaagagtaccagaagagtctgccagagcagtaccatctgggtctggatcaaaaacgcagaaaatacgtggttggagagcttatcgggaattctgccgatttcacgactatgcagtacgctgatgacacatcaatctacatgttttatcaaaaggtcggcgacaactcaatcgacagctggaaaaacgcgggccgtgtctttaaagacagcgataagttcgacgccaacgatccgatcctgaaagatcagacgcaagaatggtccggttctgcaacctttacatctgacggaaaaatccgtttattctacactgactattccggtaaacattacggcaaacaaagcctgacaacagcgcaggtaaatgtgtcaaaatctgatgacacactcaaaatcaacggagtggaagatcacaaaacgatttttgacggagacggaaaaacatatcagaacgttcagcagtttatcgatgaaggcaattatacatccggcgacaaccatacgctgagagaccctcactacgttgaagacaaaggccataaataccttgtattcgaagccaacacgggaacagaaaacggataccaaggcgaagaatctttatttaacaaagcgtactacggcggcggcacgaacttcttccgtaaagaaagccagaagcttcagcagagcgctaaaaaacgcgatgctgagttagcgaacggcgccctcggtatcatagagttaaataatgattacacattgaaaaaagtaatgaagccgctgatcacttcaaacacggtaactgatgaaatcgagcgcgcgaatgttttcaaaatgaacggcaaatggtacttgttcactgattcacgcgccccgcagacggctgccgagcggtggagaggaaagtgtgatccgaggcacggcggtggctgcgccctggcgctgcagggctggacgctgtatccccgggagagcccgtcgcgggagtccaaggagctgggcggcctctggagcttccgcgccgacttggacagtcgacgccagggcttcgaggagcagtggtacccgcggccgctgcgggagctgcggggcaggggcgggaggcgcccggaagcccggcggtgggagggggggagccctggtccctgcaggctccttcccctgagcgccccggagctggcgccctacaggaagttaaaggtcaatgggcttaggggcgcaggcttgggggacggggagaccgggggaactggggagggccgaggcgggagaagaaggaagcgctgctgccgaaccctctcacgagacgaagggtga

SEQ ID NO: 118128 - DNA, 4600 bp, Homo sapiens
atggggctggcactggatctggactccggactgctgggtaccctcatgcctctctgcctgagatgccacaggacccagaccaaacatgccgctgcatgccagggccagcatcctagggtccaggctgaggatgtcaccttcctctaccacccctgtgcccatccctggctgaagctccagcttgccctcctggcctatgcttgtatggctaacccttccctcacccctgacttcagcctcacgcaggatcgggcactggctctgagctttgctctgcggagctggcggtctccctggcacagagaggtagaaggccagccggtcagtgagctcatattggcactcaaccagcctttccgccagctcatggtgccccgcctgcctgtgaggagggggtatggctcagacctgcagcagcagccctcacccacacccccacccacccacactgcacccttcagccgaccctcacctggcatagtcaatgggtgtgcggccattaacatcaggggagccaggtctaaagaactccaaataaaaaagcagtttcaggatacctgcaaaatccaaaccagacagtacaaagcattaagaaatcacctgctggagactacaccaaagagtgagcacaaagctgttctgaaacggctcaaggaggaacagacccggaaattagctatcttggctgagcagtatgatcacagcattaatgaaatgctctccacacaagccgcctccttggagctgctaggtgtcccaggggcagccagggtgcagcttgtgggtggggaggtgcgctcacgcaatgcgtattcactgcacactctgctcctcttagcaactacactcgagcgtgcggacaggcaacctggagacatgtctgcgcctgctctccctgggttcttcgctagccaacacaacagcctagaggatccccctccacatcaaggaaatcctcagccctgggagtggcttccccagaaacagcagccccaagcctccgagagtcagtcggagaaaaggacacactcaggcgccctggacagggatgcccgtccgacctacaaggaacgcctcgtaaaccggggtcacaccgacaaatctgaagcgggtttgccaggggagtgtacccgtcttccccagcctgtgccacccggttcacaaggatttcaatttccgaccttaaaattcgctccaacgatctcatccaaacgctgcaaacagcggcataacaaactatggagatctcattcagatagtgacctctcagaccaccacgaacccatctgcaaacctgggctagaactcaacaagaaggatatcaccacctcagcagaccagattgctgaggtgaagaccatggagagtcacccacccatacctcctgtctttgtggaacatatggtcccacaagatgcaaatcagaaaggcctgtgtaccaaagaaagaatgatctgcttggagtttacttctagggaatttcatgctggacagattgaggatgaattaaacttaaatgacatcaatggatgctcatcagggtcgactctagaggatccccagtttaatgatgacagcccggaagcgaggaaaataacccggcgctggagaataggtgaagcagcggatttagttggggtttcttctcaggctatcagagatgccgagaaagcagggcgactaccgcacccggatatggaaattcgaggacgggttgagcaacgtgttggttatacaattgaacaaattaatcatatgcgtgatgtgtttggtacgcgattgcgacgtgctgaagacgtatttccaccggtgatcggggttgctgcccataaaggtggcgtttacaaaacctcagtttctgttcatcttgctcaggatctggctctgaaggggctacgtgttttgctcgtggaaggtaacgacccccagggaacagcctcaatgtatcacggatgggtaccagatcttcatattcatgcagaagacactctcctgcctttctatcttggggaaaaggacgatgtcacttatgcaataaagcccacttgctggccggggcttgacattattccttcctgtctggctctgcaccgtattgaaactgagttaatgggcaaatttgatgaaggtaaactgcccaccgatccacacctgatgctccgactggccattgaaactgttgctcatgactatgatgtcatagttattgacagcgcgcctaacctggaggatccccgcgtaggagtaatggctcgcggtaatgccattactttgcctgtatgtggtcgggatgtgaagtttactcttgaagtgctccggggtgatagtgttgagaagacctctcgggtatggtcaggtaatgaacgtgaccaggagctgcttactgaggacgcactggatgatctcatcccttcttttctactgactggtcaacagacaccggcgttcggtcgaagagtatctggtgtcatagaaattgccgatgggagtcgccgtcgtaaagctgctgcacttaccgaaagtgattatcgtgttctggttggcgagctggatgatgagcagatggctgcattatccagattgggtaacgattatcgcccaacaagtgcttatgaacgtggtcagcgttatgcaagccgattgcagaatgaatttgctggaaatatttctgcgctggctgatgcggaaaatatttcacgtaagattattacccgctgtatcaacaccgccaaattgcctaaatcagttgttgctcttttttctcaccccggtgaactatctgcccggtcaggtgatgcacttcaaaaagcctttacagataaagaggaattacttaagcagcaggcatctaaccttcatgagcagaaaaaagctggggtgatatttgaagctgaagaagttatcactcttttaacttctgtgcttaaaacgtcatctgcatcaagaactagtttaagctcacgacatcagtttgctcctggagcgacagtattgtataagggcgataaaatggtgcttaacctggacaggtcgactctagaaggatccccgattgaagatacttcgttatcgacaccagctgccccgatggtggattcgttaattgcgcgcgtaggagtaatggctcgcggtaatgccattactttgcctgtatgtggtcgggatgtgaagtttactcttgaagtgctccggggtgatagtgttgagaagacctctcgggtatggtcaggtaatgaacgtgaccaggagctgcttactgaggacgcactggatgatctcatcccttcttttctactgactggtcaacagacaccggcgttcggtcgaagagtatctggtgtcatagaaattgccgatgggagtcgccgtcgtaaagctgctgcacttaccgaaagtgattatcgtgttctggttggcgagctggatgatgagcagatggctgcattatccagattgggtaacgattatcgcccaacaagtgcttatgaacgtggtcagcgttatgcaagccgattgcagaatgaatttgctggaaatatttctgcgctggctgatgcggaaaatatttcacgtaagattattacccgctgtatcaacaccgccaaattgcctaaatcagttgttgctcttttttctcaccccggtgaactatctgcccggtcaggtgatgcacttcaaaaagcctttacagataaagaggaattacttaagcagcaggcatctaaccttcatgagcagaaaaaagctggggtgatatttgaagctgaagaagttatcactcttttaacttctgtgcttaaaacgtcatctgcatcaagaactagttaaggacgatgtcacttatgcaataaagcccacttgctggccggggcttgacattattccttcctgtctggctctgcaccgtattgaaactgagttaatgggcaaatttgatgaaggtaaactgcccaccgatccacacctgatgctccgactggccattgaaactgttgctcatgactatgatgtcatagttattgacagcgcgcctaacctgggtatcggcacgattaatgtcgtatgtgctgctgatgtgctgattgttcccacgcctgctgagttgtttgactacacctccgcactgcagtttttcgatatgcttcgtgatctgctcaagaacgttgatcttaaagggttcgagcctgatgtacgtattttgcttaccaaatacagcaatagtaatggctctcagtccccgtggatggaggagcaaattcgggatgcctggggaagcatggttctaaaaaatgttgtacgtgaaacggatgaagttggtaaaggtcagatccggatgagaactgtttttgaacaggccattgatcaacgctcttcaactggtgcctggagaaatgctctttctatttgggaacctgtctgcaatgaaattttcgatcgtctgattaaaccacgctggagattagatgagtgtatcctctacagtaaagcctggttgtcatgcacgctatttcgcctctcatacattgagaaaaagaaaggccgccagacgactcatatcgtattttccttccgcgatatcacttccatgacgacaggatag

SEQ ID NO: 118129 - DNA, 10625 bp, Homo sapiens
atgaagcgtgcgcctgttattccaaaacatacgctcaatactcaaccggttgaagatacttcgttatcgacaccagctgccccgatggtggattcgttaattgcgcgcgtaggagtaatggctcgcggtaatgccattactttgcctgtatgtggtcgggatgtgaagtttactcttgaagtgctccggggtgatagtgttgagaagacctctcgggtatggtcaggtaatgaacgtgaccaggagctgcttactgaggacgcactggatgatctcatcccttcttttctactgactggtcaacagacaccggcgttcggtcgaagagtatctggtgtcatagaaattgccgatgggagtcgccgtcgtaaagctgctgcacttaccgaaagtgattatcgtgttctggttggcgagctggatgatgagcagatggctgcattatccagattgggtaacgattatcgcccaacaagtgcttatgaacgtggtcagcgttatgcaagccgattgcagaatgaatttgctggaaatatttctgcgctggctgatgcggattttgccgatttcggaaccaccatcaaacaggattttcgcctgctggggcaaaccagcgtggaccgcttgctgcaactctctcagggccaggcgggttttacagacagccctcattacagtgatcacttgaatgacagtcgattaggagcccatgaaggcttgtccccaacacctttcatgaactcaaatctgatggtggactcttgttccaaactggaacaacactcaaccctatctcgggctattcttttgatttataagggattttgccgatttcggaaccaccatcaaacaggattttcgcctgctggggcaaaccagcgtggaccgcttgctgcaactctctcagggccaggcggtgaagggcaatcagctgttgcccgtctcactggtgaaaagaaaaaccaccctggcgcccaatacgcaaaccgcctctccccgcgcgttggccgattcattaatgcagctggcacgacaggtttcccgactggaaagcgggcattcaaacggcaatggccaggtgtctcccattttccatcagacttcatcatctactatccgatcttgttcatgtcatctactgaccctcaacttcctcactcttcagttgaacacttcagacattgctgtcttccattctacccccaaactgctcttggtaacgtcaacaatcacccacatgggcctcaacacctcccaagcacagagtgtccctgtcatcaacagtgtggccggcagcctggcagccctgcagcccgtccagttctcccagcagctgcacagccctcaccagcagcccctcatgcagcagagcccaggcagccacatggcccagcagcccttcatggcagctgtgactcagctgcagaactcacacaagttcagtcacaggagccatgggcctgggcagtcgaatgatgcctgctctgagcccaccaacaagaagatgcgccgcaaccggttcaaatgggggcccgcgtcccagcaaatcttgtaccaggcctacgatcggcaaaagaaccccagcaaggaagagagagaggccttagtggaggaatgcaacagagtatggcaggcccgtagactgggcgcttttgggaaagaggacgtccacgtttcttttgcggctcggcgcggggccaaattccgacaccagacgcttctcggcagacgcagctcgattccagctgccccgatggtggattcgttaattgcgcgcgtaggagtaatggctcgcggtaatgccattactttgcctgtatgtggtcgggatgtgaagtttactcttgaagtgctccggggtgatagtgttgagaagacctctcgggtatggtcaggtaatgaacgtgaccaggagctgcttactgaggacgcactggatgatctcatcccttcttttctactgactggtcaacagacaccggcgttcggtcgaagagtatctggtgtcatagaaattgccgatgggagtcgccgtcgtaaagctgctgcacttaccgaaagtgattatcgtgttctggttggcgagctggatgatgagcagatggctgcattatccagattgggtaacgattatcgcccaacaagtgcttatgaacgtggtcagcgttatgcaagccgattgcagaatgaatttgctggaaatatttctgcgctggctgatgcggaaaatatttcacgtaagattattacccgctgtatcaacaccgccaaattgcctaaatcagttgttgctcttttttctcaccccggtgaactatctgcccggtcaggtgatgcacttcaaaaagcctttacagataaagaggaattacttaagcagcaggcatgcaagctgtcatgagcagaaaaaagctggggtcggcgacaactcaatcgacagctggaaaaacgcgggccgtgtctttaaagacagcgataagttcgacgccaacgatccgatcctgaaagatcagacgcaagaatggtccggttctgcaacctttacatctgacggaaaaattcggtttattttacactgactattccggtaaccattacggcaaacaaagcctgacaacagcgcaggtaaatgtgtcaaaatctgatgacacactcaaaaatcaacggagtggaggatcacaaaccgatcttggacggaggcggaaaaacatatcagaacgttcagcagtttatcgagaaaggcaattatacatccggcgacaaccatacgctgagagaccctcactacgttgaagacaaaggccataaatacctggtattcgaagccaacacgggaacagaaaacggataccaaggcgaagaatctttatttaacaaagcgtactacggcggcggcacgaacttcttccgtaaagaaagccagaagcttcagcagagcgctaaaaaacgcgatgctgagttagcgaacggcgccctcggtgatcatgagagtttaataatgattacacattgaaaaaagtaatgaagccgctgatcacttcaaacacggtaactgatgaaatcgagcgcgcgaatgttttcaaaatgaacggcaaatggtacttgttcactgattcacgcggttcaaaaatgacgatcgatggtattaactcaaacgatatttacatgcttggttatgtatcaaactctttaaccggcccttacaagccgctgaacaaaacagggcttgtgctgcaaatgggtcttgatccaaccgatgtgacattcacttactctcacttcgcagtgccgcaagccaaaggggggtcctttagagtccccaaacagggatttagtctgacgtgttttctttttaatatgctgtttcgtacccgttgtcttctaaccaacataggagagacctccattcagattccgattcacacggcaacgcttttgtccaggaccccatgcttggttgtcaggaggcttacttctgaacagatggcagattctgcgtcccaagggcgcttccccccattcggcaaatataaggctggaaaccccatgcgcgtttgttccatcaaaaattggccaccagatgccatagcgcatccccattattttctcatatttgaaatacgcaatagtaaggttctcagtcccgtgggaggaggagcaaattcggaaggccgggacaagcatggttctaaaaattgttgtcgtgaaacggatgaagttgatacttcgttatcgacaccagctgccccgatggtggattcgttaattgcgcgcgtaggagtaatggctcgcggtaatgccattactttgcctgtatgtggtcgggatgtgaagtttactcttgaagtgctccggggtgatagtgttgagaagacctctcgggtatggtcaggtaatgaacgtgaccaggagctgcttactgaggacgcactggatgatctcatcccttcttttctactgactggtcaacagacaccggcgttcggtcgaagagtatctggtgtcatagaaattgccgatgggagtcgccgtcgtaaagctgctgcacttaccgaaagtgattatcgtgttctggttggcgagctggatgatgagcagatggctgcattatccagattgggtaacgattatcgcccaacaagtgcttatgaacgtggtcagcgttatgcaagccgattgcagaatgaatttgctggaaatattctgcgctggctgatgcggaaaatatttcacagctcgtgcagcacgggcctgcgtcagaattatccacgccctctccttgtccacctaccgggcggcggcctggtgcagcccacaggcccagctgcggactccttgcgcgcgttagttgctacacatacggaacactcgcgcccatcgttccgcggcgggggaacggggtgtgacaatctaaaaacttgtcacacttcacatggatctgtcatggcggaaacagcggttatcaatcacaagaaacgtaaaaatagcccgcgaatcgtccagtcaaacgacctcactgaggcggcatatagtctctcccgggatcaaaaacgtatgctgtatctgttcgttgaccagatcagaaaatctgatggcaccctacaggaacatgacggtatctgcgagatccatgttgctaaatatgctgaaatattcggattgacctctgcggaagccagtaaggatatacggcaggcattgaagagtttcgcggggaaggaagtggttttttatcgccctgaagaggatgccggcgatgaaaaaggctatgaatcttttccttggtttatcaaacgtgcgcacagtccatccagagggctttacagtgtacatatcaacccatatctcattcccttctttatcgggttacagaacccggttacgcagtttcgggttagtgaaacaaaggaaatcaccattcccgttgccatgcgtttatacgaatccctgtgtcagtatcggactcaggctcagggagatctgaattctgtcctggctggagttattggagatcctggtaggaagccccgcccaataaggaaagatgggtcagaattagacctgaagagccaccctggctgcagaacgccaaagccggatccccctcttgaagtgctccggggtgatagtgttgagaagacctctcgggtatggggaggtaatgaacgagaccaggagctgcttactgaggacgcactggatgatctcatcccttcttttctactgactggtcaacagacaccggcgttcggtcgaagagtatctggtgtcatagaaattgccgatgggagtcgccgtagtaaagctgctgcacttaccgaaagtgattatcgtgttctggttggcgagctggatgatgagcagatggctgcattatccagattgggtaacgattatcgcccaacaagtgcttatgaacgtggtcagcgttatgcaagccgattgcagaatgaatttgctggaaatatttctgcgctggctgatgcggaaaatatttcacgtaagattattacccgctgtatcaacaccgccaaattgcctaaatcagttgggctcaactctctagtatccttactccttcaagatgaaatctggcaaatatcaagagccaaactagttgtatgcttgagtaaattgcaagatttaataaaaaaacgcaaagcagtgaggaagaggatgttcaaaatgaaactcatggaaacacttaaccagtgcataaacgctggtcatgaaatgacgaaggctatcgccattgcacagtttaatgatgacagcccggaagcgaggaaaataacccggcgctggagaataggtgaagcagcggatttagttggggtttcttctcaggctatcagagatgccgagaaagcagggcgactaccgcacccggatatggaaattcgaggacgggttgagcaacgtgttggttatacaattgaacaaattaatcatatgcgtgatgtgtttggtacgcgattgcgacgtgctgaagacgtatttccaccggtgatcggggttgctgcccataaaggtggcgtttacaaaacctcagtttctgttcatcttgctcaggatctggctctgaaggggctacgtgttttgctcgtggaaggtaacgacccccagggaacagcctcaatgtatcacgggtgggtaccagatcttcatattcatgcagaagacactctcctgcctttctatcttggggaaaaggacgatgtcacttatgcaataaaacccacttgctggccggggcttgacattattccttcctgtctggctctggcccgtattggaactgagttaatgggcaaatttgatgaaggtaaactgcccaccgatccacacctgatgctccgactggccattgaaactgttgctcatgactatgatgtcatagttattgacagcgcgcctaacctgggtatcggcacgattaatgtcgtatgtgctgctgatgtgctgattgttcccacgcctgctgagttgtttgactacacctccgcactgcagtttttcgatatgcttcgtgatctgctcaagaacgttgatcttaaagggttcgagcctgatgtacgtattttgcttaccaaatacagcaatagtaatggctctcagtccccgtggatggaggagcaaattcgggatgcctggggaagcatggttctaaaaaatgttgtacgtgaaacggatgaagttggtaaaggtcagatccggatgagaactgtttttgaacaggccattgatcaacgctcttcaactgctgccccgatggtggattcgttaattgcgcgcgtaggagtaatggctcgcggtaatgccattactttgcctgtatgtggtcgggatgtgaagtttactcttgaagtgctccggggtgatagtgttgagaagacctctcgggtatggtcaggtaatgaacgtgaccaggagctgcttactgaggacgcactggatgatctcatcccttcttttctactgactggtcaacagacaccggcgttcggtcgaagagtatctggtgtcatagaaattgccgatgggagtcgccgtcgtaaagctgctgcacttaccgaaagtgattatcgtgttctggttggcgagctggatgatgagcagatggctgcattatccagattgggtaacgattatcgcccaacaagtgcttatgaacgtggtcagcgttatgcaagccgattgcagaatgaatttgctggaaatatttctgcgctggctgatgcggaaaatatttcacatttgccctgtgatgtacaattagagctgaatttctcatctcatggacaacaggaatcagaagacgtaaatgcagccaaaatcacacaggttgtcgtggcaggaagtggattctgcaaacccacattaggcccgtttatctctgtcctagagttggttaaaagagcaactgaggccagctgtgaggagcataggcccgggcggcccacttcccacatgcagttggtgcagtctgggcctgaggtgaagaagcctgggacctcagtgaaggtctcttgcaaggcttctggattcacctttactagctctgctgtgcagtgggtgcgacaggctcgtggacaacgccttgagtggataggatggatcgtcgttggcagtggtaacacaaactacgcacagaagttccaggaaagagtcaccattaccagggacatgtccacaagcacagcctacatggagttgagcagcctgagatccgaggacacggccgtgtattactgtgcggcagacacatgggccatcgccctgaaagacggtttttcgcccttcgacgttggaagtccacgttctttaatagtggactctgggtccaactgggaccaacactcaacctatcttcgggctattcttttgatttataagggattttgccgatttcggaaccaccatctaacaggattttcgcctgttggggcaaaccagcgtggaccgcttgctgcaactctctcagggccaggcggtgaagggcaatcagctgttgcccgtctcactggtgaaaagaaaaaccaccctggcgcccaatacgcaaaccgcctctccccgcgcgttggccgattcattaatgcagctggcacgacaggtttcccgcctggaaagcgggcagacaggacacttagagatatagagtctcagtccctgtcagtcacgtgcagtcacaaccatccctataagtcaggtctgacatctgaaacactcaacttgaaagcagtcactgggcaaaggagaagaaataacaatgtcatcaccttcatgaacacaactctgcattcctctcagatcttcgccttctctaaggacaaagtgattggcttttccattcccaatgttgactctgaaggcttgaagaaaaatcttgatgtggcacagctttgcctttgcctttataagagagagagactgagggattttgccgatttcggaaccaccatcaaacaggattttcgcctgctggggcaaaccagcgtggaccgcttgctgcaactctctcagggccaggcggtgaagggcaatcagctgttgcccgtctcactggtgaaaagaaaaaccaccctggcgcccaatacgcaaaccgcctctccccgcgcgttggccgattcattaatgcagctggcacgacaggtttcccgactggaaagcgggcaggattttgccgattcgggaaccaccatcaaacaggattttcgcctgctggggcaaaccagcgtggaccgcttgctgcaactctctcagggccaggcggtgaagggcaatcagctgttgcccgtctcactggaagatagaggcaccccaacctcaggaaaatgccccccggacgggtgcaaccagacgtctccacacgacacgttccacggccccccccaggctggacaaagccatcctccaagactcccacagatggacttaacactggaaacctgcaaaccacagagccattgggattttgccgatttcggaaccaccatcaaacaggattttcgcctgctggggcaaaccagcgtggaccgcttgctgcaactctctcagggccaggcggtgaagggcaatcagctgttgcccgtctcactggtgaaaagaaaaaccaccctggcgcccaatacgcaaaccgcctctccccgcgcgttggccgattcattaatgcagctggcacgacaggtttcccgactggaaagcgggcacctttgaagagagtagtggctctccagccacccagtggagatctgagaatggtcagcctgcctcctcaagtgggtccctgccccctgaagagcctaattggagggcaccccccagaggggcagcctaacacctcacatggcgggaccccccctgagccgaagctttcagaggaatgtcagggcagcaacatttgctgttcagcaatattcgctgttctgcagcctctgctgccgatactcaggcaaacagggtctggagtggacctccagcatactccaacaggcctgcagtggaggatcctgactgttagaaggaaaactaacaaacagaaaggacatccacaccaaaaccccatctgtacgtcaccatcatcaaaaaccaaagtccaaaagcaaggcatgcaagccctaagttttggttattgtggtatgaatgttgggaattacacggaggccgaaaggcgcaaagaaaaaggggggccaagaagacgcgggcagaagaacatgaaaagaaacggaggcgcaaaggaagagacttcgaagaaacgaaccggaggaacaagaaatccgtacaagaaaaacgaggagtccacaaacgccggaccagcaaacgtacaagaaggggagaaacgagagactctgcgggatatcccaacccaccaaagaacccaccagagggggattttgccgatttcggaacccaccatcaaacaggattttcgcctgttggggcaaaccagcgtggaccgcttgctgcaactctctcagggccaggcgtatgttaatgagagaaatgcccgggctgctgtagcaggagaggatggcagaatgattgctggccaggttttagatattaacctggctgcagagccaaaagtgaaccgaggaaaagcaggggtgaaacgatctgcagcggagatgtacggctcctcttttgacttggattgtgactttcaacgggactattatgataggatgtacagttacccagcacgtgtacctcctcctcctcctattgctcgggctgtagtgccctcgaaacgtcagcgtgtatcaggaaacacttcacaaaggggcataagtggcttcaattctaagagtggacagcggggatcttccaagtctggaaagttgaaaggagatgaccttcaggccattaagagggagctgacccagataaaacaaaaagtggattctttcctggaaaacctggaaaaaattgaaaaggaacagagcaaacaagcagtagagatgaacaatgttaagtcagaagaggagcagagcagcagctccgtgaagaaagatgagactaatgtgaagatggagtctgaggggggtgcagatgactctgctgaggagggggacctactggatgatgatgataatgaagatggggggatgaccagctggagttga

SEQ ID NO: 118130 - DNA, 3368 bp, Homo sapiens
  misc_feature (1)...(3368): n = a,t,c or g
atgggggtatgcaaccaagttgggacgtttctcaaaataataagacctatttatgccaaacccacagcccatatcatactgaatgggcaaaagctgaaagcattccttttgaaaactggcacaagacagggatgccctctctcaccactcctattcaacacagtgttggaagttctggccagggcaatcaggcaggagaaagaaataaagggtattcatttaggaaaagaggaagtcaaactgtccctgtttgcagatgacatgattgtatatttagaaaacccgaccgtctcagcccataatctcctcaagctgataagcaacttcagcaaagtctcaggatataaaatcaatgtgcaaaaatcacaagcattcttatacaccaataacagacaaacagagagccaaatcatgagtgaactcccattcacaattgcttcaaagagaataaaatacctaggaatccaacttacgagagatgtgaaggatctcttcaaggagaactacaaaccactgcctcatcgaaataaaagaggacacaaacaaatggaagaacattccatgctcatggataggaagaatcaatatcgtgaaaatggccacactgcccaagctcctctccaggcccaagggggcccaggggaatcagctgtgctcggtctcgccgatggaaaaaaaaaccgccaacgcgtccaaatggcttttagcttctccccgagcagtggagcactcattaatcatgctggcacggcaggtttctcgtcctcgcaacccgtcactgagatcaaggctattaaaggattttgccgatttcggaaccaccatcaaacaggattttcgcctgctggggcaaaccagcgtggaccgcttgctgcaactctctcagggccaggcggtgaagggcaatcagctgttgcccgtctcactggtgaaaagaaaaaccaccctggcgcccaatacgcaaaccgcctctccccgcgcgttggccgattcattaatgcagctggcacgacaggcccccaagaacagcaccctatcgcccaagcgttccaccagcccccgaaaatactggagacaaaagctgacgtcggcagagcgctcctagtccccgtccttttggtcctcccccctttcccgaaaggccaagcgccggagctggggcgccaacgagaagggggtgagcgtgattgggctgtcctacatcacgtgacggccagtacgcgtgggatttggctccgagaaggcggaagtgcagcacagaaagggggtccgtgggggacggtagaagcctggaggaggagcttgagtccagccactgtctgggtactgccagccatcgggcccaggtctctggggttgtcttaccgcatgagtaccacgcggtactacagagaccggctgcccgtgtgcccggcaggtggagccgcccgcatcagcggcctcggggaatggaagcggagaacgcgggcagcncgggaggagggagcaaattcggaatgcctgggaaggcatggttttaaaaaaatgttgtacgtgaaacgggatgaagttggtaaaggtcagatccggctagaaactgtttttgaacaggccattgatcaacgcttttcaactgatacttcgttatcgacaccagctgccccgatggtggattcgttaattgcgcgcgtaggagtaatggctcgcggtaatgccattactttgcctgtatgtggtcgggatgtgaagtttactcttgaagtgctccggggtgatagtgttgagaagacctctcgggtatggtcaggtaatgaacgtgaccaggagctgcttactgaggacgcactggatgatctcatcccttccttttctactgactggtcacaagacaccggcgttcggtcaaagagtatctggtgtcatagaaattgccgatgggagtcgccgtcgtaaagctgctgcacttaccgaaagtgattatcgtgttctggttggcgagctggatgatgagcagatggctgcattatccagattgggtaacgattatcgcccaacaagtgcttatgaacgtggtcagcgttatgcaagccgattgcagaatgaatttgctggaaatatttctgcgctggctgatgcggaaaatatttcacgtaagattattacccgctgcatcaacaccgccaaattgcctaaatcagttgttgctcttttttctcaccccggtgaaactatctgcccggtcaggaaagtgcatggtacccactgagtcagctccccatgtcacagtgcttggctgccagtgtggccccctgggcctggagaatggtctcaaggagggatatttggggaggtctaccttagatatggaggcttggcagcccctccaggagttttatttacataatttgatcacaggacagatgtttgaaattgctgttactcagaacaattccaagatcaacagctcctcgccaacaacagaacaaagctggatggagaatgactttgacgagttaacagaagtaggcttcagaaggtcagtaataacaaacttctctgagctaaaggagcatgttctaacccatcgcaaggaagctaaaaaccttgaaaaaagcgatggggagaatggaaccaagttggaaaacacttttcaggatattatccaggagaacttccccaacctagcaaggcaggtcaacattcaaattcaggagatacagaaaacaccacaaagatattcctcgagaagagcaaccccaggacacataattgtcaggttcaccaaggttgaaatgaaggaaaaagtgttaagggcagccagagagaaagcttccttagctcctgaaaatctcgataactcaaaaatacgcccggtagtgatcttatttcattatggtgaaagttggaacctcttacgtgccgatcaacgtctcattttcgccaaaagttggcccagggcttcccggtatcaacagggacaccaggatttatttattctgcgaagtgatcttccgtcacaggtatttattcgcgataagctcatggagcggcgtaaccgtcgcacaggaaggacagagaaagcgcggatctgggaagtgacggacagaacggtcaggacctggattggggaggcggttgccgccgctgctgctgacggtgtgacgttctctgttccggtcacaccacatacgttccgccattcctatgcgatgcacatgctgtatgccggtataccgctgaaagttctgcaaagcctgatgggacataagtccatcagttcaacggaagtctacacgaaggtttttgcgctggatgtggctgcccggcaccgggtgcagtttgcgatgccggagtctgatgcggttgcgatgctgaaacaattatcctga

SEQ ID NO: 118131 - DNA, 4237 bp, Homo sapiens
ccatggatatccgcgcctgttccggtggacgtggtggagggtgcaatggactctgtgacggttcttagctttggtggtttaatgctctatttttgtgctggttggcctcctgccaggaggtggtgctttccagaaagcatcagctgtggtagtatggagagggaccagtggtgggggctccaagtagcgaagcgagcaggactggccggcggccaaagcggtcggacagtgctccgagaacgggtgcgcatagaaattgcatcaacgcatatagcgctagcagcacgccatagtgactggcgatgctgtcggaatggacgatatcccgcaagaggcccggcagctttgcagaactttcagcggtataccggcatacagcatgtgcatcgcataggaatggcggaacgtatgtggtgtgaccggaacagagaacgtcacaccgtcagcagcagcggcggcaaccgcctccccaatccaggtcctgaccgttcttgtgacaatctaaaaacttgtcacacttcacatggatctgtcatggcggaaacagcggttatcaatcacaagaaacgtaaaaatagcccgcgaatcgtccagtcaaacgacctcactgaggcggcatatagtctctcccgggatcaaaaacgtatgctgtatctgttcgttgaccagatcagaaaatctgatggcaccctacaggaacatgacggtatctgcgagatccatgttgctaaatatgctgaaatattcggattgacctctgcggaagccagtaaggatatacggcaggcattgaagagtttcgcggggaaggaagtggttttttatcgccctgaagaggatgccggcgatgaaaaaggctatgaatcttttccttggtttatcaaacgtgcgcacagtccatccagagggctttacagtgtacatatcaacccatatctcattcccttctttatcgggttacagaaccggtttacgcagtttcggcttagtgaaacaaaagaaatcaccgatccgtatgccatgcgtttatacaaataccctgtgtcagtatcgtaagccggatggctcaggcatcgtctctctgaaaatcgactggatcatagagcgttaccagctgcctcaaagttaccagcgtatgcctgacttccgccgccgcttcctgcaggtctgtgttaatgagatcaacagcagaactccaatgcgcctctcatacattgagaaaaagaaaggccgccagacgactcatatcgatctggctctgaaggggctacgtgttttgctcgtggaaggtaacgacccccagggaacagcctcaatgtatcacggatgggtaccagatcttcatattcatgcagaagacactctcctgcctttctatcttggggaaaaggacgatgtcacttatgcaataaagcccacttgctggccggggcttgacattattccttcctgtctggctctgcaccgtattgaaactgagttaatgggcaaatttgatgaaggtaaactgcccaccgatccacacctgatgctccgactggccattgaaactgttgctcatgactatgatgtcatagttattgacagcgcgcctaacctgggtatcggcacgattaatgtcgtatgtgctgctgatgtgctgattgttcccacgcctgctgagttgtttgactacacctccgcactgcagtttttcgatatgcttcgtgatctgctcaagaacgttgatcttaaagggttcgagcctgatgtacgtattttgcttaccaaatacagcaatagtaatggctctcagtccccgtggatggaggagcaaattcgggatgcctggggaagcatggttctaaaaaatgttgtacgtgaaacggatgaagttggtaaagctgccccgatggtggattcgttaattgcgcgcgtaggagtaatggctcgcggtaatgccattactttccctggtatgtggtcgggatgtgaagtttactctttgaattgttccgggggtgatagtgttaaaaagacctctcgggtatggtcaggtaatgcacgtgaccaggagctgcttactgaggacgcactggatgatctcatcccttcttttctactgactggtcaacagacacggccgttcggtcgaagagtatctggtgtcatagaaattgccgatgggagtcgccgtcgtaaagctgctgcacttaccgaaagtgattatcgtgttctggttggcgagctggatgatgagcagatggctgcattatccagattgggtaacgattatcgcccaacaagtgcttatgaacgtggtcagcgttatgcaagccgattgcagaatgaatttgctggaaatatttctgcgctggctgatgcggaaaatatttcacgtaagattattacccgctgtatcaacaccgccaaattgcctaaatcagttgttgctcttttttctcaccccggtgaactatctgcccggtcaggtgatgcacttcaaaaagcctttacagataaagaggaattacttaagcagcaggcatctaaccttcatgagcagaaaaaagctggggtgatatttgaagctgaagaagttatcactcttttaacttctgtgcttaaaacgtcatctgcatcaagaactagtttaagctcacgacatcagtttgctcctgtagcgacacctccactgctgataccaaggcaaacagggtctgaagtggacctccagcaaactccaacagacctgcagctgagggtcctgactcttagaaggaaaactaacaaacagaaaggacatccacacgaaaacctcatctgtacatcaccatcatcaaagaccaaaggtttctttaaccaaagggtagaatattcaaaaagatttctggaaaaaagtgaagatttctcagaaccatggtgtcactcatttttacaccaaatacgaatgttcccagaactgttatggtgctgtaggggcagactgacacctcacacggctgggtactcctctgagacaaaacttccagaggaacgatcaggcagcaacatttgctgttcaccagtatctcctgttctgcagcctccactgctgataccaaggcaaacagggtctgaagtggacctccagcaaactccaacagacctgcagctgagggtcctgactcttagaaggaaaactaacaaacagaaaggacatccacacgaaaacctcatctgtacatcaccatcatcaccgaccaaagtgttggaagttctgcccagggcaatcaggcaggagaaggaaataaagggtattcaattaggaaaagaggaagtcaaattgtccctatttgcagatgacatgattgtatatctagaaaaccccattgtgtcagcccaaaatctccttaagctgataggcaacttcagcaaagtctcaggatacgaaatcaatgtgcaaaaatcacaagcattcttatacatgaataacagacaaacagagagccaaatcatgagtgaactcccattcacaattgcttcaaagagaataaaatacctaggaatccagcttaaaagggatgtgaaggacctcttcaaggagaactacaaaccactgctcaatgaaataaaagaggatacaaacaaatgcaagaacattccatgctcatggataggaataatcaatattgtgaaaatggccatactgcccaagcctccactgctgataccaaggcaaacagggtctgaagtggacctccagcaaactccaacagacctgcagctgagggtcctgactcttagaaggaaaactaacaaacagaaaggacatccacacgaaaacctcatctgtacatcaccatcaccaaagaccaaaggattaggcctagcctgggaaagtcttctgagagagatcaggaatgaaagacgctatgttcagtcgtgcatggcttgctttcagagagtgggttatcagagcatgggcccatcagtcatgatgatggatttatgggtcaagagatatcctggaaggagatatgtcacccacaccgcggctcgcttacggttggagaaatcaaggccctaccggggccacctctctgttgtgggcgtggacgaggctggggtgagcctgccggagctgcagttgccagcgacatgttcaagagtctgtgcagcaccgaaaaaggactcacctcccaaaacttccgtgaaggttgacgagctttcgcgagggcaaatcgcagtgtgtggaggagtcaaggaaccagcttga

SEQ ID NO: 118132 - DNA, 2577 bp, Homo sapiens
atgcagaggctcatgatgctcctcgccacatcgggcgcctgcctgggcctgctggcagtggcagcagtggcagcagcaggctcaagccccaggacaggagaagccatcagcagctggcccatagtgacaagtggtggtggtgatggcgatggtggcaaaggtggtaatagatattgtggtggttgtaggagtggagatgataagggtgaaggtggtagctatagtggtagaggtcgtggtggtagaagtagtggtggtaatggtagcatggtggtggtagtgatagtgatggtggtgagaatgggagaggccaggtggtggtgggagtacggagtgtgggaggtggaaccggagattatcctcaatgcaccgcaacaatatctgctggcggggatcggtgacacgctggcgaaatggtatgaagcggtggtgctggctccgcaaccagaaacgttgccgctaaccgtgcgactggggatcaataatgcgcaagccattcgcgacgtcttgttaaacagtagcgaacaggcgctgagcgatcagcaaaatcaacagttaacgcaatcattttgcgatgtggtggatgctattattgctggtggtgggatggttggtggtctgggcgatcgttttacgcgtgtggcggcagctcatgccgtgcataacggtctgaccgtgctgccgcaaaccgagaagtttctccacggcaccaaagtcgcctacggaattctggtgcaaagcgccttgctgggtcaggatgatgtgctggcgcaattaactggagcgtatcagcgttttcatctgccgactacactggcggagctggaagtggatatcaataatcaggcggagatcgacaaagtgattgcccacaccctgcgtccggtggagtccattcattacctgccagtcacgctgacaccagatacgttgcgtgcagcgttcaaaaaatacagccagagctgcttcgtaatccggctcggtggtgatttcatccaccagctggctgaaaatcacattgtcattttcgtcaataaccacaacggcacgcgctgccagacctttcagtgggccatcagcaattgccacaccgtaagcttgcagaaattcagcgtacgaaagttcctgagtgatttgtttgctatcgggggccgtcgcggcgtacgccccccaactgaggcaccaggccatcagaaaagtgataatcaggcgcacgtcagcgtttcctttgatggattagacctggtcttttttgtcgtcaaccaatgggctggcgtcgtgttctgcttcgatctcttcagcaggaagcggggcaggttcagcgtctggcgtaacaaaggtttcggtagatactgccagcggctggccaattttcgtgacagacaggctttccagttgctcaaccagattcactttacccggtgcaaacaggttgataacggtggaaccgagtttaaagcgacccatttcctggcctttcagcagtgccacagaaccgtcgttttccccggcaggccagcgattaagacgcgcgtggaacgactggataggtaccgaaatcggatggaaaagtccaatggacaagcgaatctaagagtccacgggggcacgtgggagaaactcgttctccaacttgactccgccggcatggtcaatagggtttcatccgtaggggcgcccctaagagaacccattcctacggaaggaaaaggcgcgaaggaagatacttgggggaatctctccagcaacgacccccttcttgaagcgtttggaggtcagttcggaattgctatttcgatgcaccagactttagctacaagggggggaaagcgcaacgcacgaccaaccacaaggccacgcttccaccgtgggaccaaccccagggggatagccccccacataggcacggccaatgctcgttactcaaccggccactgtccggttgcccttcccttcggcctccgggggcctccactggcgcgcgagaatgttgctacagccacaaaaggccacgaaagtgcgtcaagggaaacggaggtggtggccgtcgctaaactgaccagtcgcgtgctgctgatttgtgatgcgacccacgcgctgccaatccaggtgctgcgcaacgatatccgcgtaattgcagccggtaacggttgtacggatgatttgcagcttgagcatctgccggcgaatacggatattcgtgttggtaatgtgctgtggaaagtgggcgagtcggcgtgggataacaacaagattaccgatacgctgaaggcgctgccaacctatggtccgctgctgcctgccgcagtcaccagcgccaatcctcagcaagcgacggcgatgctggcggacgggtcgaccgtcgcattgagtatggaaggcgttcgctgggcgcgtccttaccgttcggatactcagcaaggaccgacgccgcgtaaagtgaccgatgttctgcaaacgggttcaagtggccccacaaaagtcccaatgtgccctgcagcttgggccgactatatgttgccaaccatttttgtagacacaaaattgggccaccagaagtccaccttccaaggctaa

SEQ ID NO: 118133 - DNA, 536 bp, Homo sapiens
atgcgtctggcacctattggtgcgttcggtgcaatggcgtttaccatcggtaaatacggcgtcggcacactggtgcaactggggcagctgattatctgtttctacattacctgtatcctgtttgtggtgctggtattgggttcaatcgctaaagcgactggtttcagtatcttcaaatttatccgctacatccgtgaagaactgctgattgtactggggacttcatcttccgagtcggcgctgccgcgtatgctcgacaagatggagaaactcggctgccgtaaatcggtggtggggctggtcatcccgacaggctactcgtttaaccttgatggcacatcgatatacctgacaatagcggcggtgtttatcgcccaggccactaacagtcagatggatatcgtccaccaaatcacgctgttaatcgtgttgctgctttcttctaaaggggcgggaggggtaacgggtagtggctttatcgtgctggcggcgacgctctctgcggggggccatttgccggtagcgggtctggcgct

SEQ ID NO: 118134 - DNA, 1452 bp, Homo sapiens
atgctgccgcctattcctggcgacccgattatcgcccacgtcagccccggtaaaggtctggtgatccaccatgaatcctgccgtaatatccgtggctaccagaaagagccagagaagtttatggctgtggaatgggataaagagacggcgcaggagttcatcaccgaaatcaaggtggagatgttcaatcatcagggtgcgctggcaaacctgacggcggcaattaacaccacgacttcgaatattcaaagtttgaatacggaagagaaagatggtcgcgtctacagcgcctttattcgtctgaccgctcgtgaccgtgtgcatctggcgaatatcatgcgcaaaatccgcgtgatgccagacgtgattaaagtccacaaacctcataacgtttctgcgattattcgtaccgcagatgccgttggcgtacatgaagttcacgccgtctggcctggtagccgcatgcgcaccatggcttcggcagcggcgggtagtacagctgggtcagattgctttctctgcgccgtactgagccaaatggtgcgccaggagatgtataaccgttatggcgaaagtgcctatgaagacggttatcgcatttacaccaccatcacccgcaaagtgcagcaggccgcgcagcaggcggtacgtaataacgtgctggactacgacatgcgccacggctatcgcggcccggcaaatgtgctgtggaaagtgggcgagtcggcgtgggataacaacaagattaccgatacgctgaaggcgctgccaacctatggtccgctgctgcctgccgcagtcaccagcgccaatcctcagcaagcgacggcgatgctggcggacgggtcgaccgtcgcattgagtatggaaggcgttcgctgggcgcgtccttaccgttcggatactcagcaaggaccgacgccgcgtaaagtgaccgatgttctgcaaacgggtcagcaaatctgggttcgtcaggttggcgatgcatggtggctggcacaagtgccggaagtgaactcggcgctggtgtcgatcaatccgcaaaacggtgccgttatggcgctggcgttgttaaataacgcccgcccttggtatttgggcgcccagcccagggattccacaatcattttttgccagtttggagcccacccacttcttgacccaaaaacccagccggttgggtgtcgtaatgctgcccggaaaagttgcgcggaaataaggttggttccagacgcccgcgcgaattccggcaaacttgttcgccgctatcgaaaataccgacgccagtaccacaaatcaaaatcccgccatcaacctctccgccagcaacagccagtgcgacttgactggcgtaatgtggataatcagtacgctctgacgaccaggttcctttatcaatcacttcaacgccacgctcaactaaatgtgccactatttcatgttttaaaatga

SEQ ID NO: 118135 - DNA, 2526 bp, Homo sapiens
ttaatgacaggcgatgacacgttcttcattgagaacatctatcgcagctgcgatagcgtctctttgcaggttattattcacgttattattccgccgaaaccggctttccacattgtttactggcacaaaagtgtttacaccctgcgcggttttcttttcgatgagtagcgggataatgacactcagggcatcggtaccgtgatcagtacacgtcggtacttcggtaaattttggcggttcaacgtcttttgctacccagttgtaaagcatttcgctggatttatagccatgtacgtccgggcttggcagcagggaaccgtagaagccggttgcctgtgctttagacagttcgctcaccgcatccacaccgttaatgccaatgccgatgatatcggccgctttaaagccctgaccttccgtcgcgcgtacgccgcccagcacggtgctgtcgttcataccgacgatcagccaatgtttaacttccggatgttgaaccagcattgagttggcagcgtcaaatgcccccgggatgtcgttagatttggtaggtacctgataaatttgtttttccgggaatccggccgctttcagcgcatccatagatcccgtagtacggcggcgggcggtatccagttcgttggcggtaatcgccatcaccgcgctttctttgacatcccagccacgtttctgcatctctttatacagttcctggccctgacgttcgccaattttagtcgccgccatcatcaccagcggaacggtatccattggcttacctttggcgttaacaaactggtcatccacggcaatgactttcatatcgtagccacgcgctttcgcgacgatggcagagccgagtttggggtccggagtacaaataacgaaaccttttgcgccactggcagccattggtctggcagccgttatgtcacaatccggctcagtggtttcgatgcctggacggaactcgcgctcaatcaccgcatcgttgcgctcatcgaacaattcagacaccacgccggagtcacggtccagaccgagcgccagctgcgtcatatcgtttgagccaattgagaagccgtcgaaatattcgaggaactgctcggccagcaaggcgttggacgggatttcacacatcatgatgattttcagcccgttctcgccacgtttcagcccctgacgcgccagttcttcaaccaccgctttcgcctgatctacggtacgcacgaacgggatcatgatctcaacgttggtcagtcccatgtcgttgcgcacacgtttcactgcttcacactccagcgcgaaacagtcgcggaagctgtcggaaacatagcggcccgcgccacggaagccgagcatcgggttctcttcatctggctcgtaacgcaccgaccaggttggcatattcgttcgatttaggtccagcacgttattacgtaccgcctgctgcgcggcccggcaaatgtgctgtggaaagtgggcgagtcggcgtgggataacaacaagattaccgatacgctgaaggcgctgccaacctatggtccgctgctgcctgccgcagtcaccagcgccaatcctcagcaagcgacggcgatgctggcggacgggtcgaccgtcgcattgagtatggaaggcgttcgctgggcgcgtccggtgctgccagtaccgcgccattcggttggctccacaatggttcgtgttgcgctggcggttatgcgccccgggatgtgccgacatggcgacggcgaaaaagaccagccccaagcgatgggtgcgcatcaaaaacatgcagcccatcaggatcggtccggcgatgatcaatcggatcaacggttcgccgtatgaccatttgtagatcaaaaacaggctgccgatctccagcaccgtggcaaccacaaacaagatagcgccagcttctgtctcggtgtaataacgtttgtttttccccgccgttagtagcgactgcagttttttctggctttgtgttttggtcattaatggggtgagtgtgcggatcaccgctgccatgtattcctgagctttcgctttcgcggctttttgctctggcccctggatgggtagccaggtcatttgaatgcttttgatttttaaggtaccgcgctccagcgctgtagaagcatacaagttctcattaattttacttgcagcacgagtgagattggctttgtcgggactgctgtcgatggcacgaaattcgttcagtggcaggctgggattctggctgttaaagtcttctcgaaactggctgatggagagatcgaaagtaggggctccagccagcagataaggcgcggtcgttgccgtatcggttatcgttatgggtacatcgagtgttgcaaatgttttcgtaacggcaatacgtggatctttcgccaactcttcctcgtaagacttcagcgctacgcctgcgatccggttgccggacaggtacaaatcccgtgcattgaacgtaatgccaatctccccctgacagccgacttccgcgccagagatggaggcgttcat

SEQ ID NO: 118136 - DNA, 1578 bp, Homo sapiens
cgcttttttctatcacgtcgatgtcgcggctgtaggagttcacaagctgtccgccattgcgcccgcttgcgccaaagccgatgcgtgaggcttcgagaaccactacgtcaaagcccgcttccgccagatgcagcgcggaggagagcccggtatagccgccgccaaccacgcaaacgtcgcaggtgattgactcattcagcgtgtcgaatggtgcatatttattcgcactggcggcgtagtaacggctttcaggcgtccggctcatgcggtgcgcgcgggagaggtcgcgcgtccataccgccgcgccaaggccgtactggctgtcgttggcaagctgtagcgcctgttcttctgatgtgaaacgcgtgaccaccagcaccggaccgaaaatctcttcgcgacttaaggacgcattcgggtccacatccacaaagatggtcgggccgatggcggcagccagcccggcgttacggccatccaacaacagttgccctttgctttcgccttcccgaattaaagctattgaaccgagtcggcgtgggcgcagtcgattaaggtgcccatggtggttgcgggatcaagtggatggcccggctggccgtttggccgctcttcctcaacgttactgataaacgccgtttcgaccagaatggagggaatatctggtgcctttaatacggcaaacccggcctgttcaacttgatttttatgcagcttgttgattttaccgagcttattcagtaccgctttaccaaacttcaggctgtcggcaatggtcagcgactgtaccatatcgaacatggtgtggtcgacatagcggtcaccgactggtcttgcacccctttggattgagagcgcaaacacagaggaaccgctcggctgacgactggtaaaggcgtcggcatggatagagacaaacaggtcagcacgctgtttctgggcttttgctacgcgcacttgcaatggaatgaagatgtcttcattgcgcgtcatgtacaccttcatattgccctctttctcgatcagagagcgcaaacggcgagctatttgcaataccacatctttttcgcgcgttttgtatttccccaccgcaccggagtcttcgccaccgtggccaggctcaagcataatgacaatcggacgatcgcgccctgctttacccggttgtggaccactttgcgctggcggcacctgcttttcgaggtcgcctttgttgtaatcctccagcagcgccagcagcgggtcctgcatatcctgtgcattggccggatagaggtccatcaccagacgctctttaaacccggcgaccggcgcaagggcaaacagctgcggttttacgttttgctttaattcaaaaaccatccgtacggtttgcgggtcaaattgcccgacgcgcgccgacttgatgaacgggtcgtctgcacgaatttgtgccgccatccccttgagtaccgagttcaggtttacatcttcgatatccaccaccacgcgttcagggttactcaacgcgaactgcttatatttcagctgacgatttgattccaccgtcacgcgggatgttaggctcaatagccacat

SEQ ID NO: 118137 - DNA, 1387 bp, Homo sapiens
atgcgccacggctatcccgcccgggcaaatgtgcttgtgaaagtgggcgagtcggcgtgggataacaacaaagattaccgatacgctaaggcgctgccaacctatggtccgctgctgcctgccgcagtcaccagcgcaatcctcagcaagcgacggcgatgctggcggacgggtcgaccgtcgcatgagtatggaaggcgttcgctgggcgcgtccttaccgttcggatactcacaaggaccgacgccgcgtaaagtgaccgatgttctgcaaacgggtcagcaatctgggttcgtcaggttggcgatgcatggtggctggcacaagtgccgaagtgaactcggcgctggtgtcgatcaatccgcaaaacggtgccgttatgcgctggtcggtggctttgatttcaatcagagcaagtttaaccgcgccacccaggcactgcgtcaggctggagcgcatctgcctgcacatagccagagtggccatcatcagcaaaccgcccgctaaaagtcgaatttttgtgcccgcatgtgaacccctgatcaactatcctggtaataaaaaaactgcccgtttcgtctttcacccacttagcaacgacaatggtcgctacgccgttaccgaccagttagtcagcgcacgagcttctgacataaagcgggtcgataccgaggatagcgccagacccgctaccggcaaatggcccaccgcagagagcgtcaaccccaggacgataaagccactacccgtaaccgtgcgccggtccggctataggggggaggagaggcggggggacggagaggagagggaggaggaagaagtcgaaggcaacgggctggaacaggaagcttaccctttccgattcgccagagcgatgccctggcacatccccagcgacctaccatcagtacccgccggctacgcgatcaacgcctgtccccaagtcatccccagtagaagcaactacaaccaccggcccggtaccctacagccggccgtaatagcgcccctaaaccaaactgagcggccaccactgaccgcgaccacagggcacctatcggctgccccacgggctcggtccatagctttatcgggaagcgagagcaaaggcaactgttgtgatgccgtaacgccggcttgctgccgccatcggcccgaccatctttgtgatgtggacccgaatgcgtccttaagtcgcgaagagattttcggtccggtctggtggtcacgcgtttcacatcagaagaacaggcgctacagcttgccacgacagccagtacggccttggcgcggcggtatggacgcgcgacctctccgcgcgcaccgcatgagccgacgcctgaaagccggttccgtcttcgtcaaaactacaacgacggcgatatga

SEQ ID NO: 118138 - DNA, 551 bp, Homo sapiens
atggcgggctgcaggtcccgagccctgtcccacggggaggcagctgaggcccggggagatttggcgtgcagcgccgctgctggcccaggtgctgagcccttcactgccccgctggcgctggccggccgctccaagtgcggggccgcggagcccgcgcccacccagaactcgcgctggcccatgagcccacacctctccctccacgcctccccgcaagcagagggagccggctccggcctcggccagcccccagggcagcggctggctgaagggctcctcaaatgcggccggagtgggcgccgaggcggaggaggcgccgggaccctgagaaccctgccggcacccagcaccccatgccagccagcaccgctacggctgccatccatcagggctgaaccctgccggcacccagcaccccatgccagccagcaccgctacgggtgccatccatcggggctgaatcctgccggcacccagcaccccatgccagccagcaccggtacggctgccatccatcgggggtgaaccctgccggcccccagctccccatg

SEQ ID NO: 118139 - DNA, 1029 bp, Homo sapiens
atggctcaggagatagaaggagatcggttgtttcgggcccgtttgacccgtcgggttcaagggaaaggcccttgtggcccgttgaaggctcctctggggatggtccctgaatgccactcggtcaaaccgtctcgagatactttcgactctacaaaatcatttaaggcattactactgagtttcttgaagatacccgccatagatgtccataagcccattgaccacccaatcaactttacgtttccagaccctgggcatcgagccccggcacgtcaccgtcactcgaccgctgccgctgtcaccatgtcaccatcggggccgctgccgctgcaccatcgccttgttcccccatcccccgccatggctgaggacctctccgggccacatcctactgccccgtctcctggaaacagaagcaaaactctgtctcaaacaaacaaacaaacgaacaaacaaaaacagcaaaagcggagggtgctagaagtagggggcctagaaacaaaattccggggctccctccggggccgcggtctgggctgcgcatttggctgccgcctcctcgcgaaggcagtggcttccaaactcctgcgcgcggtcatcctcaacccccctgctcgggcaagggcaccgagtgccagagcatcgcccagaacttggcttccaggatttctccagtgggcacttcttgtgggagaacatcaagacaaactattcgcgttcggaaataagcctggtcgaagggggtacagcagttcatctgagatatgggtgagcgtggaagcggtatccctcgtagttctttgttttttagaacctagcggccgaacgcggatcgaccacgtattacttaccaaggagtacacctcgtgcgtcaacccaagtagtgcagtcttccgcgcctgcacgtcagcgtcgtccaattttgaccgccgaaaagatttgcgcgttaatcgcctggagcaccatatcggtaccgatcacttgggtcgacagtgggtgcatcgccgtagtcgcccctgcccgtggtag

SEQ ID NO: 118140 - DNA, 2160 bp, Homo sapiens
atgaatgatgtagacagggttgggggcaaaaatgcctccctgggtgaaatgattactaatctttccggaatgggtgtttccgttccgaatggtttcgccacaaccgccgacgcgtttaaccagtttctggaccaaagcggcgtaaaccagcgcatttatgaactgctggataaaacggatattgacgatgttactcagcttgcgaaagcgggcgcgcaaatccgccagtggattatcgacactcccttccagcctgagctggaaaacgccatccgcgaagcctatgcacagctttccgccgatgacgaaaacgcctcttttgcggtgcgctcctccgccaccgcagaagatatgccggacgcttcttttgccgcatgtacccttgttcctggtcagaatttatcgaccagtaacaaggatgtcattgaactacctgacaatcagtatgacctggacaaaatggtcaatatctatcccgtcacgccaggattgattgatcagttgcgcgccaaaccgattatgtcgcaggctaacccggagctggagcagcaaatcgcaaactatgaatatcgtatcgggattggtgatgtgttgatggttacggtctgggatcacccggaactaaccacccccgcagggcaataccgtagcgccagtgataccggcaactgggttaacgccgatggtgcgattttctacccctatattggtcgcctgaaagtggccgggaaaacacttacccaggtacgcaacgagattacagcgcgtctcgattcagtcattgaaagcccgcaagtcgatgtcagcgtcgcggcgttccgatcgcaaaaagcgtacgtcaccggcgaagtcagcaaatcgggtcagcagccgattaccaatattcctctgaccatcatggatgcgattaacgccgcgggcggtctgaccgcagatgcagactggcgcaacgtggtgctcacccagaatggcgtaaagaccaaagtgaacctctatgcgctgatgcagcgtggcgacctgcgccagaacaaactgctgcacccgggcgatattttatttattccgcgcaacgatgatctgaaagtcttcgtgatgggtgaagtgggtaaacagagcacgctgaaaatggaccgcagcggtatgaccctggcggaagcgctgggtaacgctgagggtatgaatcaggatgtcgctgatgcgacggggatttttgttattcgtgcaacgcaaaacaagcagaatggcaaaatcgccaatatttatcagctgaatgcgaaggacgcatcggcaatgatactcggaacggaattccagcttgaaccttacgacattgtttatgtcactaccgcgccgctggctcgttggaaccgtgtgatttctctgctgaaaaaacttgagcgtctaacttcgattgccataaccttgccgggaattattgatacggaaaatggtattgtacatcgcatgccgttctacgaggatgtaaaagagatgccgctcggcgaggcgctggaacagcataccggcgttccgggcgaggcaaaaggccttgttggtgcccccccgggggcgcgcgatgtgattcaggtggtatcgatccccaacgtggggcgggcggtcattccgaatggtcatctgctaccgcaaggcagcagtagtctcgtggaaatagcccacacacagggcggaccccttatggggaaacgctgttattgcgggaatcacggctgcctcgaaaccatcgccagcgtggacagtattcttgagctggcacagctgcgtcttaatcaatccatgagctcgatgttacatggacaaccgttaaccgtggactcattgtgtcaggcggcattgcgcggcgatctactggcaaaagacatcattaccggggtgggcgcgcatgtcgggcgcattcttgccatcatggtgaatttatttaacccacaaaaaatactgattggctcaccgttaagtaaagcggcagatatcctcttcccggtcatctcagacagcatccgtcagcaggcccttcctgcgtatagtcagcacatcagcgttgagagtactcagttttctaaccagggcacgatggcaggcgctgcactggtaaaagacgcgatgtataacggttctttgttgattcgtctgttgcagggttaa

SEQ ID NO: 118141 - DNA, 3639 bp, Homo sapiens
ctaaagtgatggacgacaggtccaacgcattgctggaccgctttctgaatcgtgcgcattcatcaatgacttttttggtagtctggctggtcgaagattgccgaaccggcgacgaacatatccgcgcccgccgcagcgatttcgcgcaatgttgttcaccttcacgccaccgtccacttctagtcgaatgtcaaagccagactcgtcgatacggcgacgtacttcgcgcagtttatccagtgtttgaggaatgaaagactgaccgccgaaaccaggcttgacggacatcagcaggatcacatccagcttatccatcacgtaatccagatagctcagaggtgtcgccgggttaaataccagacccgctttacagccattttctttaatcagttgcagcgtgcggtcaacatgctcggaggcttctggatgaaaggtaatgatgctggcaccagcggcagcgaaatcaggcacaatgcgatcgacgggtttcaccatcaggtgtacgtcgataggggcggtaatgccatagttacgcaaggatttcagcaccattggcccaatcgtcagattgggaacatagtggttatccatgacgtcaaaatgcacgacatcagcgccagctgccagggcttttgcggtatcttcacccaggcgggcaaaatcagccgacagaattgagggggcaatcaaatactgtttcatccgcttctccttgagaattattttttcgcgggtgaaacgactcctggtttgtacaaagccagcagttcgtccacgtgtgccgccgttgctgcttatactgcgtcgaactttgacgacatgcaattttgcgcgctgataccactcacgcgttaacatcgtatcgtgattggagatcagcactggaatatggcgctcaaccagaccttcggcgatctccgccagatgcgcttgttgttcaagcgtaaaactgtttgtgtgatacgccgtaaagttggcggtcgcagacagcggtgcataaggcggatcgcaatagacgacggatgcatcatctgcgcgcgccatgctatcggcgtaagactcacaatagaaaaaggcattctgcgctttttcagcgaagtgatacaactctgcttccgggaaatagggttttttgtagcggccgaacggcacgttaaactcaccgcgcagattgtaacgacacaggccgttgtaaccgtagcggttcaaatataaaaacagtaccgcccgacggaacggatcctggctatttgttgaactcaggtggtgtttatcacttccgcatggggccttggtgagatggtcgtgcagggtgcggttaacccggatgagttttacgtgcataaaccgacactggcggcgaatcgcccggctatcgtgcgccgcaccatggggtcgaaaaaaatccgcatggtttacgcgccgacccaggagcacggcaagcaggttaaaatcgaagacgtaccgcaggaacagcgtgacatcttctcgctgaccaacgaaagaagtgcaggaactggcacaacaggccgtacaaattgagaaacacctacgggtcgccgatggatttgagtggggaaagatggccaaccggtaacggccatgtccaggccctccgaaacaggtgcccagaggccagacagcaccgtatgcgcattccgggtagaatattgccaaggccgataggacgcatggcgggaccgaaaacacgaatcgaacacacctccgtgacagtgataagtaaccgcagaaagataaaaactgagaacaggggacataagggatacgaagatcgcaagttacacgaagatcttcaattgcgccaccaaagtcattaatggcgtaaaaatgcacttttgcagaattcgctttgccattaaggccattgactttcatgacctcatcactaaatggtgcaatcattttcacatcaatcggatagcgtttaccgctagcttctaaatcaccactgctaaaagagacgtagtaaggggttggattggtcactcgtaatgacgccttaccttctgaacctgaccagaaccacttcagggctaacggggcttcagagggatttcccttcaatccatccgggcgatagaaaagttttatacgtgtgcgaaatgccagttgcagcaggctttgattcgcgaccttttctgcatctggttttggtggaacttccagtacgttaaaccagaacacgctctctctgtctttaggcagtgaggtgctggctgtgtacattaatttgattgtttgcccacgtttggcatcaatacgcgatactggcggcgtagcagtaaaagggactgtaatactgccaggctcagcgttgtcatcgccagtatctaaccaactctggacaagcaacgggttattccctttattttccagacgtacgttgacacttttttgatcgcttttatatattacgcgagtacccgaaatgacaatgtccgcaatagacgatgaatgataagtaatggtgtatgcagtgttagtttttacataaccagcagttgctgtttggtctgcgacggcacgaacgtaagacggtcctttgtgcaaaaccatctcgaccagtgaacgccccagcgcagagagtttttcatcgctgagtatttcgtataaatgaaaacgcgtacgggcgctgtcgccggggacataaagtagcggttttccctgatcgttaaccagatcacgcgcttcaatcatcatcaccagtaatgggtaataatcgacccgatgctgacggcaccattgcaacattaaagcatccgcctgggtggagggatactcgcgccagtagtcacaaagttctgccaacaggctttcgccttctccacaatagacgcgttgcgcgtattcataataaggcgcatcttcattatcaggttcagtttcccgccatgactgggcgtaatccagaagttcggggatatccaggcgacctgcgctataccagcggagtaaatttctgtgcagttttgcatcatcggggataatcactgcgcgatgttgcgctaaatacaatgtcagccattgtggatgcgatgaccaaatccgagcgaacatttggtaaaaatcgatggtgtcattttgcacggcaacgggcagatgcagaatggtctggaagttaaaaacattccccttcgcaatggcatataacaaggattccagttcttcttcgtctatttccccggtatttcctccgatttctgccgcctgagtcattaaacgcagatggcctaagtgcaatggtgtttcacgcacgcagagcaccaacgggcgacgctctttcagcaccacatctgccgcacgggtcagtaagccatcagtatagctatggacaatgccggaaagggttttgattgaacagggtaaaatcaccatccccagcgtctggaaagaaccggaagagatgctggcggcaatatcgcgcgcatcgtgcgtgacatcggctaatgcctgcacttcgcgcagagaaaaatccgtttcgagggataaggtctggcgcgctgcctggctcatcaccagatgcgtttcgatatctgtgacatcgcgcagaacctgtaataagcgcacgccataaatcgcgccgctggcaccgctgatgcctacaatgagtcgtttcat

SEQ ID NO: 118142 - DNA, 6285 bp, Homo sapiens
tcaggtttgaattgcctggttggccaggccggaactgaacccctgctgggtctgacccccgaaaagtggacagttaacacgaggcatataggtctgattccgatattcaattggagtcagaccttttaatttcaggctaattcttctgctgttgtagtattcaatatattccgtaacagcatccttcagttcgcttatattactgaactcatcaagataaaaacactccgactttaaggttccaaagaaacactccaccacagcattatccagacaattgccttttctggacatgctttgtttaataccatgttctttaaggatattttgatatcttctcatacgatactgccatccctggtcagagtgcagaacaggatgctcgtgaggattaagctttttgaatgcctgatcgagcatattctcaaccatgttcatcactggtctttccgaaaggctgtaagaaataacttcgttgttgaagagatctattactggagacaaatacagcttgcgcccattgactgcaaattcagtaacatcggtaacccacttctcgtttggccgcgtagccttgaaatctctttggagaacattaggggcggtttgccctacctctcctctgtaagagcggtatcgcttgaccttaatcgctgctttaagtgagagggttcccatcaggcgctgaacagctttatggttaatctgtttcccttctcgatgaagagacagcgttaccctacggtatccgtatcgggctctattctcgtggattaatctcactaattcgctgtactcgtgctttgcgtcctttatctttgccagtgtcaactccctcacattcttctgctcgctgttccttcgcgggataatcgcgccgcgatactgaataacggtacttgcggtcaggtgcccacgtttcgccgcgtcttccgcgctgccgcctgtcagacgtaccgccagataaccggcactgaaagagtcgccagctgcggtggtatcgatcactttttctttcggcagtttcaccgccggaacatccactaacccttcgccagcaatggacaccaggcaagaatccgccccgcgtttcaccaccacttctttcacgcccgcgttatgggtgcgcgcaatgacgtcttccaccggctgttgaccccacagcgcgtcttcgtcgtccagcgtcaggaaggcgatatccgtgcattccagcatttgttggtacacctgctgtgtctcttctttgctggcccacaggcgcggacgatagttattgtcgaaaatcacttttccgccgttggcgcggcattcgcgcagcaggaaagcagcttttcgcggctggtcgggctgacgggcgatatagacggaagtgttcagggtatcgccgccgaaaccgcgcttaacgtccgcgcctttctcggaaagctcaatcatgcattcgccaatcacggcaatctttttggacatagtcgtgaacctgatcagcccgttcgctttacgcaaacggaagcagttattggcatctatggtgatgatgccggcggcatcctgaccgcgatgctgaagcaccgttaaggcatcataaatcgactggttaaccggcataacaccggcgataccgacaataccgcacatacgtctttttccgaaacagacgcccagcacccgatcggtgcctgacaaccccgttttctccaccaactggcctatcacgaagttcacgatagcaccaacgatcagggtagcgataaacagtaccgcgatggcaatcccatttcgaaccagttcgtcttcaaagcccgtaaaccagacctgcagtttcgggtgatcgctgagatatttcagggaggctttgtagtcttccagcaacagttcagcaaagtccatttcgaagccgcgacgacacataatgcgcatcaccacgatgtcggtggcttcaccgccgagagtgaaggccggaacctgccagccgcgcagacgcagacgttcagagaggtcatacagggtgtatcccggatcttcaccatctttcagtttgaagcaaaacgcccggattgcttcgtcgggcaaccgtttctgccgccgttggcgtttgcactgttttatccacgaggatttgtgatggcgctgggttacgccggtgtggcgctggcggtactggcattgattatcccttcgctgttgaccactaccgcacgggcaaggatcgttacgccccggtttctcttctgctttgatcggttgctgaacagctttttcctgcggatgcgccatccagtacgcatgtagatcaagcgccgccagtcgaatggcatctacgctctcttcaaacgcttctggcgacatcttttctacccgctcgaagttttcctcagtaccgtgcagcgcaatcgcctccagcgctggttttaacgaatcgggcaacgttgaccagtcagaaagtgccacgccccgcatatagccaaagcaccactcctcaacaatcgtcagctcgctgccatcaacttctcgcaagccgaataacggctcaaactgctccgggaattcgttcagacgctctgcggtatcggccatatgttgaaaagccagattcataaagcgcgtcatctctttctctgacgcccagcgcggcacatagtcagccccaccccacacggcaaccagccactgttccggttcaatctcttgcggagaactcaacaccgccgtcaataaaccgtccagctccgccacatcaaggatggcgtggtcagtgttgtatttggtcagaatatcgtccagccattccaactcactttcgtttaacggtcccgttttcatacgcttttccttgtggatctcaactcgccagcaccgagcgcctgtcaacatcgtgcggtagcctatcaggcgtatcaggttgaggactacgccaccgcactggcggcctggcagaaaatcagtcttcacgacatgagcaatgaggatctgcttgctgctgccaataccgcccaggcggcaggaaatggtgcggctcgcgatcgctgggttgcgcgggcgacaatttatcgccaacgtcataatgtcccggccgcggtgagtgatttgcgcgccgcgctggaactggaaccgaataatagcaacacccaggcagcgcttggttacgccttgtgggatagcggtgatatcgcacagtcgcgggaaatgctcgaaccggcgcataaagggcttccggacgatccggcactgatccgacaactggcctacgtgaaccagcgtctggatgacatgcctgcgacgcagcactacgcccggctggtgattgatgacattgataatcaggcgctgataaccccactgaccccagaacaaaatcaacaacgcttcaatttccgccgtttgcatgaggaggtcggtcgccgctggacgttcagtttcgattcttccatcggcttgcgttccggcgcaatgagtaccgctaacaataatgtcggcggcgcagcgccagggaaaagctatcgtagccgacgcgtgttggctggcgtgctgccaccgttggagtaatgataagagaaaccaaaacctgcgccctggtgtaccaatctgccctaacatcgctgcagagtcaccagcatccagtgtattctgttcaccatattgctggcgctgaattccccagcctgccatcagcattgtgcgattcgccgccatcagttcagcgagtttgactatctgcgcttccggtacgccagtaatttccgccgcccagaccgcgctcttcggcgtattatcgctcttacctgtcagatactcttcaaactgcggatacccggtagtgtatttttcaaggaacactttatcgtgtttgccttgtgtcatcagtgtatgcgcaatccctaacatcagtgccacgtcggtgcccatattcggcgcgatccaggtggcattatcgtcaaagaattcgatggtttcggagcggataggatcaatggcaatcactggtttgccagattttttcagctgatggaagtattccagcccttgctcatcggtactgctccaggcaatttttaaggtattcagcgggttcattccccacagcaccacaacctggctgttttccagaatcagcggccaggaggtctgctgttcatacacctcggacagcaccattttaatgcccatcgccttgatcttacgcgacattaaatacatcggtgtcgaagcgcgaatagtggtcacatcataagtatcgatgtggtaaatcacgtcgcggatggcatccagaccttcctgtacagtgaagtgaatttcgtgatgcaccgtgcccagatggtttgccacttcctgggctgctttcagatccggtgaacccggcagacctacagcaaaggagtgtaactgcggccaccaggcttcagagcgttcctgatcttccacgcgacgggctgcgtatttcttggtgatagcggaaataattgaggaatccagaccaccagaaagcagcacaccgtaaggcacatcagacatcaaatggcttttaactgaatcttccagtgcctgacgcagctcgtttttgtcggtcacgttatctttcaccgcatcgtagtcgaaccagtcgcgatgatagtaagaacggatttcgccgtcctggctccacaaatagctccccgccgggaactctttaatcgtgcggcaaactggcaccagcgctttcatttctgaggccacatacagctgaccgtgttcgtcataccccatatacagtgggatgatccccagatggtcgcgaccaatcaggtaggcatctttttcgctgtcgtacagtgcaaaggcaaacatgccctgcaagtcgtcgagaaattccggccctttttcctgatacagcgcgaggatcacttcacagtcagacccggtctggaactggtaacgatcgccatattcggcgcgcaatgcctggtggttgtagatttcaccgtttaccgccagtacgtgggttttttgttggttgtagagaggttgcgcccccgcgttaacgtcaacaattgacagacgttcgtgggcgagaatggcgttatcgctggcataaataccggaccagtccgggccacgatgacgcatcaggcgtgacagctcgagggctttcttacgcagctcaactgcgtctgttttgatatcgaatacgccaaaaattgaacacataaccttctccgttaacctggtatttgttgcaatgatgagcaacatgtcctgagccaacaccattttcatccccgaattacggttatcaaacatcaacagcaacgtagtgcagtgacctgtcaccattgtgaagatgcgccctgcgcccgtagctgccctaatggcgcaatcagccacgttgatgacagcattcaggtcaatcagcaaaagtgtattggctgtaaatcctgcgtggtggcctgtccttttggtacgatgcaaatcgtcctgacacccgtcgcggcaggaaaagtaaaagccacggcgcataaatgcgacctttgtgcggggcgcgaaaacggtcctgcctgtgttgagaattgcccggcggacgcgctgcaactggtcactgacgtcgcactctccggcatggcgaaatcccgccgcttgcgcaccgcgcgtcaggaacatcaaccgtggcatgccagtaccgcggcgcaagaaatgccggtaatgagtaaagtcgaacagatgcaggcaacgcccgcgcgtggcgagccggatagactgactgcgtagcgcactgtgcggttgcgcccgccagtagagtgccagcgccgcgcccacctggcccgcgcctgccattgaaaggatgggaaataagctgttgaatccctggctgtccattaacgcgaggtaaacaggaataaagccctgatgcacgccaaataccacggcgatcaggaacagcccggcttcgaataaccagccacccagcggcataatgatcaggtacgcaagcgtagcggtgatcagcagggtgattaacgaggtcagcagcatgtcgagatcgtccggcataaagcggcgcaccatgccttcaatgcgggcgcaggcccacgcggcaatcagcacgccgattatattgccgcgcggatcgatgggcagaccaaagaaatcgtgaaaaccggcgtagtaaccggtggtcgctgcggggttataaccgagcaaaaagagcgcggcgataattgcgccatttacgcccgtgccgcctaatgcctgggcggcgttatagcccaccagaatcaccaggaaagtggacaaacctttgctgaacaccttcat

SEQ ID NO: 118143 - DNA, 1251 bp, Homo sapiens
atgaaggctgggaagcactatgacctggaccatttgttcttggtccttttgctgacccttccttctcactgccatcaagagggcaatcctttctccacaccatccaggggcagcgattggggcctcagccttagttctccagctggaccctgggatggtgcggggctgtggctctgggaagtatctggcctgcacgcggtttacatcattgggagcacaggcctcgccctccgaatacgaggcccagagcccttcgcgccgagcgtttcccgcctttcccctgttcaagtcattgcccagaggccactgcgggccgttcctgcctgtccgtgggctgcggcccccgtgttcccagggcaggatagtgacgggccgtgtgactgtgacgcctcatcaggttgggcattcgccgaagtggtgatttacccgaatgcaaaatgggtagtcgaatctaatcaaatgatacgcgcaggaaacgtcgaaatttcgagggtgtctgtattgcctttacaacgtcgtcaatttgaccgccaaaagattgcgcgtaatcgcctggagcaccatatcggtaccgatcacttgggaaaaagggccggaatttctcgacgacttgcagggcatgtttcctttgcactgtacgacagcgaaaaagatgcctacctgattggtcgcgacatctggggatcatcccactgtatatggggtatgacgaacacggtcagcgtatgtggcctcagaaatgaaagcgctgcccattccccggatgcccgttcacggcgatatcgccctgacaggacgaccgccacgtttgtgacgatggcagatgctttcttcatatcggttcccagtccgggtcggtcattgtcggtttatgcacgtaaaactcatccggttaaccgcaccctgcacgaccatctcaccaaggccccatgcggaagtgtaaacaccacctggtcaaagccggattcggtatcaatggagaacatcacccagatgatgcgagagaagcaaatacatgtttcactgccacgagaacggctcaaaaccctgaacgttgaggaaggtttcctgctgaccggcaaaagaaggtccggcatatcttctgcggtggcggaggagcgcaccgcaaaagaggcgtttcgtcatcggcggaaagctgtgcataggcttcgcggatggcgttttcagctcaggctggaagggagtgtcgataatccactggcggatttgcgcgccgctttcgcaagctga

SEQ ID NO: 118144 - DNA, 1161 bp, Homo sapiens
ttataatacaagcatcgtcattttcaccacactgtggaaccgaaaataaatttccctagtgggtgaccatcgtccatggatgtaagggctgtctagtgtaggacaatcaatagatgaccatcttccatggacgtaagtgctgtctagtgtaagacagtcaatagatgaccatcttccatggacgtaagggctgtctagtgtaggacaatcagtagatgaccatctaccatggacgtaagggctgtctagtgtaggacaatcagtaaatgaccatcttccatggacgtaagggctgtctagtgtaggacaatcagtaaatgaccatcttccatggacgtaagggctgtctagtgtaggacaatcagtaaatgaccatcttccatggacgtaagggctgtctagtgtaggacaatcaataaatgaccatcttccatgggcgtaagtgctgtctagtgtaagacagtcaatagatgaccatcttccatggacgtaagtgctgtctagtgtaagacagtcaatagatgaccatcttccatggacgtaaggtctgtctagtgtaggacaatcagtagatgaccatcttccatggacgtaagggctgtctagtgtaggacaatcaatagatgaccatcttccatggacgtaagtgctgtctagtgtaagacaatcaatagatgaccatcttccatggacgtaaggtctgtctagtgtaggacaatcagtagatgaccatcttccatagatgtaagggctgtctagtgtaagacagtaggtcacatgagcaaaggtgaaccccaaaatctccgcggtcaccaggaatcgaggttcagtagaatcaccccatcttgaaggccgcagcctcaaggtccaagtcttcattccccaggttgaagacatgagctggggacccccatggctgtgggtggagggcgagtcctggacgtagtgcttcattctgtcttttgaaaggggtgatgttagaaagtgagttctggcagtggtcagaaccagcagcactggggtcacacccaggctgggaacctgcagacggcactgcccgtgcggcatctcctgggacctgggagctttcacgccacgcgtatgataagttttggggggcgggagtgaggaaaaggcccccctctggtggtccgggcccat

SEQ ID NO: 118145 - DNA, 706 bp, Homo sapiens
aggagacggcagtgacctgctgtgtaaactttcaaattatacgcgccaagtgggtctaaataaatgaatcaggttaattagcaaacaacagccatttattctctttaatagcctcatgggatatcaagaggctattatatgatatgatatcatgcattttggcatgaaaattagggagtagctctacattgctaaagggatgcagctttttacctgggtgacggatgtatatgttttaaagtaacttaaatgcattaccctttgctcttcacgtcagccacataaactaaggaccaggggcagctggagactcactggtcagaaccagcagcactggggtcacacccacgctgggaacctgcagacggcactgcccgtgcggcatctcctgggacctgggagctttcacgccacgcgtatgataagttttggggggcgggagtgaggaaaaggcccccctctggtggtccgggcccatggtcctgccaggggcccacagcatgaagacgtagctccctcacacacacgttgaatttggatttgcttgtctggcttctgctggggcgcaggatgtggggatggaaggaccaagacacacgacagagaacagcgtcacggggtcaccgtcccacttcccaccccgcgcctcacagcacagacgggggatttgccggcctcacgccggccgagccactgctgacttcac

SEQ ID NO: 118146 - DNA, 1872 bp, Homo sapiens
ttataatacaagcatcgtcattttcaccacactgtggaaccgaaaataaatttccctagtgggtgaccatcctccatggatgtaagggctgtctagtgtaggacaatcaatagatgaccatcttccatggacgtaagtgctgtctagtgtaagacagtcaatagatgaccatcttccatggacgtaagggctgtctagtgtaggacaatcagtagatgaccatctaccatggacgtaagggctgtctagtgtaggacaatcagtagatgaccatcttccatggacgtaagggctgtctagtgtaggacaatcagtagatgaccatcttccatggtcgtaagggctgtctagtgtaggacaatcagtagatgaccatcttccatggacgtaagggctgtctagtgtaggacaatcaatagatgaccatcttccatgggcgtaagtgctgtctagtgtaagacagtcaatagatgaccatcttccatggacgtaagtgctgtctagtgtaagacagtcaatagatgaccatcttccatggacgtaaggtctgtctagtgtaggacaatcagtagatgaccatcttccatggacgtaagggctgtctagtgtaggacaatcaatagatgaccatcttccatggacgtaagtgctgtctagtgtaagacaatcaatagatgaccatcttccatggacgtaaggtctgtctagtgtaggacaatcagtagatgaccatcttccatagacgtaagggctgtctatgtcactcatcccttcacagctgtgtggcctctctgctgtcaccccattctccgcggtcaccaggaatcgaggttcagtagaatcaccccatcttgaaggccgcagcctcaaggtccaagtcttcattccccaggttgaagacatgagctggggacccccatggctgtgggtggagggcgagtcctggacgtagtgcttcattctgtcttttgaaaggggtgatgttagaaagtgagttctggcagctttcgcccatttttcccagttgggtttgatgcaccagcatcctgccgtataacagtctggttctgatgcttgttctgtttcttcaagctgtgtcttctgtgttgaaatatgccttgtggtagttttgctgaaagccgaaacagtggtcagaaccagcagcactggggtcacacccaggctgggaacctgcagacggcactgcccgtgcggcatctcctgggacctgggagctttcacgccacgcgtatgataagttctctcaggcccagggttctctctgggcagccctcctgcagcagagcctggaaagggggcggtggctttgccaccttccgcctggagcctcttgtcctcagtcaacatggctttgccattgcagctgtagggacaggtgagtgggtgaccagatgaccgagctgaaacaggccctggcagtaaggagcctggccttccataatgcttaatcgaaaatgtaatgaaattctgagagtctagtgtgtcggctataatgtaacagtcatgacacgtgagtagcattagccccagtttctccattaaaggaattaaaccgtttgtgacagtcaactcggtgtagcaggacaagcacgagttgagtgagaatttaacttgtgcctggagccagaagcgcgacgcagagtggactggggtgcactgagccttgccagggtcccgcaccctcaccgggagctgtgatggggccaccttctccctctccaggccccactttcctgtttgaaggatgcccgccctcaccaggagctgtgaaggggccaccttctccctctccagactccactttcctggagggttggggttggacacgatgggaaaactctcactccccat

SEQ ID NO: 118147 - DNA, 1194 bp, Homo sapiens
ttagtctgggaccacgatcccactcgtgttgtcggtctgattatcggtctgggaccacggtcccacttgtattgttgcctgtttgcggggttcccgccttgctggtctttgcgctgctttctcctctctgtgtggtgtgctctgctctttgtggggggttgcttccggtgctccgtgcctcgctgttcctctggtgtgttgcttttcttgccggtcttgtcttcgtttttggctttgcgttctttggttcccttgtccgcggtcggtttctggtggtggttcctttcttccttctgtttgctctctgtcgcttgttgtttctcgtttgctggctgcgttcattcggtgcttgccctgtttcggtgtgtgttgctggctttgcctgttttgctgggctctttcttgtcctggtgtcgctgctttcctccggttttggttttcgtctgtctttctcttgtgtcgttggcagtttgtgcctgcccgggttcgctttccgcgctttctgtcttttctttctgccttgtgtcgggccggctttacttgcgtttcctggtttctgtggtccctcctctccctccctgtcttatggtggtttgttcgccccctggtcctgtgccttgttggggttcttcggttgtctggggtggtcggcgccgggtttcctttcctcctttgggctttcggtccgtgttctgtccctgccttgcgcgtctggcctgcgttccctttcgggctgtgctcttgtccccggtttgtttctcccttgggtgttctccccccggtctcttcgtcctcttgtttcgttcggttgtcttctttgttctttcgtttcccacaaacatggattggatcaaagaatccgtctggtaaagtaatccagggcaatccgtgatggctgcccgtcatcttattctttggttcggttccgctgacctccaaggctgcaacggcaaagccactgatgcggatgggtccgggcattgaccgtttcacagctgacggtgtggcttctttcgctgcggtgtatggtctgttcattctgccgacataaccgacgctggttggtgcggtacagatggatgacacgggcactacccgtatcggtaaattagtctcaaaccatccgttcttcatccgggtacttctgggtgttgcactgaccgtttgcttcggcttcgtgctgggtagcttcat

SEQ ID NO: 118148 - DNA, 1950 bp, Homo sapiens
aaagaagcagaagcgtttgcttattatcgccggacacacactgccaatgagcggcggcggcgtggtgaaatgagggatctctttgagaaattaaagatcacattgggattacttcattcttccaaggtttccaaaagtctcattcttactcgagccttcagtgaaattcagggactaacagatcaggcagacaaattgataggacagaaaaatctcctgactcgaaaacggaatattctgatacggaaagtatcgtctctttcaggtaagacagaagaagtggtcctgaagaagctagagtatatttatgcaaaacagcaagcactagaggcacaaaaaagaaaaaagaagatgggatcagatgagtttgacatatctcccagaattagcaaacagcaggaaggatcttctgcatcatctgtagatcttggacagatgtttataaataacaggagggggaaacctttgattctttccagaaaaaaagaccaggccacagaaaatacctcacccttgaacactccacacacctctgccaaccttgtgatgactccgcaagggcaattgctcaccctaaaaggtcccctattctcaggaccagtggtagctgtttctcctgatctcttagaatctgatcttaagcctcaagttgccggtagtgctgtggctctaccagaaaatgacgacttatttatgatgccacgaattgttaatgtgacatcattggccacagagggaggtttggtagatatgggtggcagcaaatatcctcatgaagttcctgatagcaagccatctgaccatctgaaagacaccgtcaggaatgaagataattccttagaggataagggtagaatctcttccagaggaaacagagatggcagagtgacgttgggtccaacgcaggtttttctggcaaacaaagattctggttatccacaaatagttgacgtttccaatatgcagaaagcacaagagttcttacctaaaaagatttctggtgatatgagagggattcagtataaatggaaagagagtgaatcaagaggggagagagtgaagtcaaaggattcttcatttcataaattaaagatgaaagatctcaaggactcaagcatagagatggaactgaggaaagtaacatcagctatagaggaagcagctcttgattccagtgaactgctgactaacatggaagatgaggatgatactgatgagacactgacttcactgctcaatgaaattgcctttcttaatcaacaactaaatgatgactctgttggcctggctgaactacccagctctatggatacagagttcccaggggatgctcggcgggcttttattagtaaggttcctcctggaagcagagcaactttccaggttgagcacttgggaactggtttgaaagagttgcctgatgttcaaggggagagtgactctatcagtcccctcctcttgcacttggaagacgatgacttttctgagaatgaaaaacaacttgcagaaccagcctctgagccagatgtccttaagattgttattgactctgaaataaaggattccctcctttccaacaagaaagctattgatggagggaagaatacttctggcctccctgcagagcccgaaagtgtgtcctcaccccccaccctacacatgaagactggcttggagaacagcaacagcacagacactttgtggaggcctatgccaaagttggcccctctaggtttaaaagtagctaatccttccagtgatgcagatggtcagagtctcaaggtgatgccttgtttggcacctatagctgccaaagttgggtcagttggacacaaaatgaacttaacagggaatgaccaggaaggccgggaaagcaaggtgatgcctacattggcacctgttgtggctaaattgggcaactcgggggcctcaccaagttctgcagggaaa

SEQ ID NO: 118149 - DNA, 4890 bp, Homo sapiens
  misc_feature (1)...(4890): n = a,t,c or g
aaaatgacgacttatttatgatgccacgaattgttaatgtgacatcattggccacagagggaggtttggtagatatgggtggcagcaaatatcctcatgaagttcctgatagcaagccatctgaccatctgaaagacacctggaaggaattgttggagcctgcaggcagggtgcagaagctgtgtccccgggcttcaggcccatgcggtgcagcagaggcagcaagctgtgacgcaggcgtgggcagtgctgcagcgacgcatggagcagcgcagggcccagctggagcgggcacgcctccttggcccgctttccacggcggtgcgtgactatgcctcctgggcagcccgcgtgcgccaggacctgcaggtggaggagagttcgcaagagcctagcagtggcttgctgaagctcagtgcccaccagtggctccgggcggagctggaggcccgggagaagctgtggcagcaggccacccagctggggcagcaggcacttcttgctgcagggacacccaccaaggaggtccaggaagagcttcgagccctgcaggaccagcgggaccaggtgtatcagacctgggcacggaagcaagagaggctgcaggccgagcagcaggagcagctcttcctcagagagtgcggccgcctggaggagatcctcgcggcccaggaggcagctccatgccaagctcagtgggcactcctaaggccctgccatacccagagtgcccatgggcacagactgcagctggaggggctggctggctggaaggcttggtggcctctgacttttctgtggatccaggtctccctgaaaaccagtgccttggggagctcggtggaagaggtagagcagttgattcgcaagcacgaggtcttcctgaaggttctgactgcccaggacaagaaggaggcagccctgcgtgagcggctgaagacgctccggcgcccccgggtgcgggaccggcttcccatcctgctgcagcgccggatgagagtgaaggagctggcggagagccggggacacgccctgcatgcctccctgctgatggccagcttcacccaggccgcaacccaggctgaggactggatccaggcgtgggcccagcagctgaaggagccggtccctcctggggacctgagagataagctgaagcccctgctgaaacaccaggcctttgaggctgaagtccaggcccatgaggaggtcatgacctctgttgccaagaagggagaggctctcctggcacagagtcaccctcgagccggagaggtctcccagcggctgcagggcctgcggaagcactgggaggacctgaggcaggcaatggccctcaggggccaggagctggaggacaggcggaacttcctggagttcctgcagagagtggaccttgcagaggcctggatccaggagaaggaggtgaagatgaatgttggtgacctgggccaggacctggagcactgcctgcagctccgacggcggctccgcgagttccgaggaaactcggccggggacacagtgggtgatgcctgcatcaggagcatcagtgacttgtcactgcagctcaagaaccgggaccctgaggaagtcaagatcatctgccagcggcgaagccagctcaacaacaggccagtgggcgagtttccatggcaacttgctccggtaccagcagcagctcgaaggggcttggagatacacgtgttgtcccgagagctggacaatgtcaccaagaggattcaggagaaggaagccctgatccaggccctggactgtgggaaagatctggagagcgtgcagaggctgctgcggaaacacgaggagctggagcgggaagtgcaccccatccaggcccaggtggagtccctagagcgtgaagtgggccgcctctgccaaagaagccccgaggcagcccacggcctcaggcacaggcagcaggaggtggctgagagctggtggcagctccggagcagggcccagaagcggagggaggcgctggatgccttgcaccaagctcagaaactccaggcaatgctgcaggaattgctggtcagcgcccagaggctgcgggctcagatggacacgagccccgctcctcgcagccctgtggaagcccggcgtatgttagaagagcatcaggagtgcaaggccgagctggactcctggacagacagcatcagcctggcccgaagcactgggcagcaactgctcacagcggggcaccccttcagctccgacattcgccaggtgctggctggcttagaacaggagctgagcagcctggaaggggcctggcaggagcatcagctacagctgcagcaggccctggagctacaggcaggcacagtcccatccccagcctgcatcttgcccccccgaacagggcctgcgctgaccccacagcctctgctgtttctgagctcagtggagaagatggaacgttggctttgcagcaaggaagactccctagccagtgagggtctatgggaccccttggcccccatggagccccttctgtggaagcacaagatgctggagtgggacctggaggtgcaggcgggaaagatcagtgctctggaggccacggcccgcggcctgcaccaggagagccgatcagagagccaaccagcacccacaaatgccatggctccttgtgctggtgtcctggcagtggtcgcggccaccccctctccattcttgcaggtggaccacacctggacgctgtctccaaaaacacttctggagaaggaagtgcagagcctgggccaggccaaggtgtatgccctgaggaagttggcaggcaccctggagcggggtgcacccaggcgctatccccacatccaagcccagaggagccgcattgaggctgcttgggagaggttggaccaagcaataaaagcccgcacagagacccatatcatcacgttcactgagggctgcagcatggaggatggtttctgtacctggggacacatcaagccccatgatcctccttgttcaaaaggaggtggcccagaaggccatgtctccagggagaaaggaatcctgggagcagagaacagccctgagcagaacttggctgcagcccatgaggtccacagctttcagcaggcagcagctgagctccagggaaggatgcaggagaagacggccctgatgaagggggaggacggaggccacagcctgtcatctgtgcggaccctgcagcaacagcacaggcgcctggagagagagctggaagctatggagaaggaggtggcacggctacagacggagggctgccgactgggccagctacatcctgcagctccggggggcctggccaaggtgcaggaggcctgggccaccctgcaggcgaaggcccaggagcgaggccagtggctggcgcaggctgcacagggccatgccttcctcgggcgctgccaggaactgctagcatgggcacaggagaggcaggagctggcgtcctccgaggagctggctgaggacgtggcgggggctgagcagctccttgggcagcatgaagagctggggcaagaaatcagggagtgccgccttcaagcccaggacctgcggcaggaaggacagcagctggtggacaacagccacttcatgtctgcggaggtgacagagtgcctgcaggagctggaagggcggctgcaggagctggaggaggcttgggccctgcgctggcaacgctgtgccgagagctggggcctgcagaagcttcggcagaggctggagcaggctgaggcctggctggcctgctgggagggactcctgctgaagcccgactatgggcactcagtgtcagatgtggagttgctgctgcacagacaccaggacttagaaaagctgctggcagcccaggaagagaagtttgcccaaatgcaaaagacagaggatgcaaagggtacccccaccatggaggggtctttggagttcaagcagcacctgctgcctggcgggaggcagcctagctcgagctcctgggacagctgccgcgggaccttgcagggcagctctctgagcctgttcctggatgagaggatggcagcggagaaagtagcttccatagccctccttgacctcacgggagcccggtgtgagaggctgcggggccgccacggcaggaaacacacattctccttaaggctgaccagtggggcagagatcctgtttgcagcaccgtccgaagagcaagctgagagctggtggcgagccctgggcagcactgcagcccagagtctgagcccaaaactcaaagccaaacctgtcagctctctgaatgagtgcacgaccaaggatgcccggcctggatgtctactcaggtctgatccctgaggtgaaccccagtgcaacaccaaacttcaggggcacaagcgaggacacatctaagggaccagaataagactcagctacaggcaaaagggctccttcccgggggtggttcaacccaagttccccaggcccagcttctggaatagacagttccttctggttagatgggtcctaccatgtggcaggaaacagccatttgcctggcctccccctgcattcctcgtctgggtgaagaggagacgtgttacggcagagcaggttgggcaaggccagggctaccccaggcccatgtggcttcctccttgcttggaaggggtgactctgagcacaggtagacgccagacgtgtgcagagaatgtgctcttcggaggaagaacactgatgagcgagctctgtaccagcccttgccatgtacagccaagagcctagaatgacatggcccttctcagcagtaataacagatggtctcagcgcctcannnnnnnnnnnnnnnnnnnnnnnnnnaaagcgccccttcaatttaaggggcccctttaaaccccctgt

SEQ ID NO: 118150 - DNA, 458 bp, Homo sapiens
agaatctcggcacgaggcgttctctacctgtgtgataaaggttccccttggccggtgtgaacgacatgggaagtgtaaaaaaacctgtattgcctccagagacccatattgtggatggataaaggaaggtggtgcctgcagccatttatcacccaacagcagactgacttttgagcaggacatagagcgtggcaatacagatggtctgggggactgtcacaattcctttgtggcactgaatgggcattccagttccctcttgcccagcacaaccacatcagattcgacggctcaagaggggtatgagtctaggggaggaatgctggactggaagcatctgcttgactcacctgacagcacagaccctttgggggcagtgtcttcccataatcaccaagacaagaagggagtgattcgggaaagttacctcaaaggccacgaccagctggttcccgtcg

SEQ ID NO: 118151 - DNA, 1095 bp, Homo sapiens
tcagccaacagaaaggggcctatgtgcaagcttgaaacccagcagggcagccattaaatcacaaagctccaaggtaatctcctttgactccatgtcccacatccagggcacagtggtgcaaggggtaggctcccaaggccttgagcagcaataccgctctggcgttgcagtgttcaggctccacagcttctcccataggttgttgagtgcctgtgaattttctaggtgcagggtgcaagctgtgagtagatctatcattctgggttctggaaggtggcagcccccttcccacagctccactagggagtggcccagtgggcacactgtgtggggcctccaaccccacatttcccctctgcattgtcctagtaaagattctctgtgagggctctgcctctgcaacaagcttccgcctgaaaacctaggcttttcatacgtcctctgaaatctatgagactgccaagcctcactcactcttgcaatctgcatgcttacaggcttaacaccacacagaagccaccaaggcttatggctcatgccctctgaagcgtcagcctgagatgtctctggggttctttgagccaaggctgaagccagagtggctccatgactcacatccaagccacactgatgcaagtggtgggtttccaaggtcttgggcagctctgcctctgtggctctgcagggtacagatcccttggctgctttcatgggctggcatagagtacctgcagctttttgaagtgcacagtgcaagctgtcagtggatctaccatcctgggttccctgcaggtagcagtgtcctgaggctttgtagggtagcaaggtcatgcgcctgggcttgggcctggtcctggcccatgaaaccattctttttttcttctgcctggacatcaaggcattttcatatatcctctgaaatctaggtggaggcttccaagcttcaactcttgccttcttcgcacccacaggaccaataccacatggaagccaccaaggcttgcggcttgcatcctctaaagtaacagcctgagctccaccttggccccttttagccatggccatagctgaagcagctaggatgcagggtgccat

SEQ ID NO: 118152 - DNA, 2592 bp, Homo sapiens
atggtgtggtttttaaaaaatgtaaatcatggcactcacactaatgcaaagaaatataatgatgtggaaaataaagaaaggactgggtggaagtgggggtctactgagtatcttctgtgtgcaaggcctctgcgcaaagggaatgtgggtctctctggtgatgttttcctaactgtatttgtgatgaaaacagggcattccagttccctcttgcccagcacaaccacatcagattcgacggctcaagaggggtatgagtctaggggaggaatgctggactggaagcatctgcttgactcacctgacagcacagaccctttgggggcagtgtcttcccataatcaccaagacaagaaggctatgctgaaggatggagaagagcgtccctttaatgaacccggagtatttcatttattagcagatcatcagttgacccagaaagtggccagcatccctgggtctgcagtctgtgcctatgacatgcttgacattgccagtgtttttactgggagattcaaggaacagaagtctcctgattccacctggacaccagttcctgatgaacgagttcctaagcccaggccaggttgctgtgctggctcatcctccttagaaagatatgcaacctccaatgagttccctgatgataccctgaacttcatcaagacgcacccgctcatggatgaggcagtgccctccatcttcaacaggccatggttcctgagaacaatggtcagataccgccttaccaaaattgcagtggacacagctgctgggccatatcagaatcacactgtggtttttctgggatcagagaagggaatcatcttgaagtttttggccagaataggaaatagtggttttctaaatgacagccttttcctggaggagatgagtgtttacaactctgaaaaaaagtggagcaccgcaaaacctgtgagggttaccattatcttaaaccctggtcaagctagtttctgcatcacacttagagaaacagtggctgacggagaaaacatatttggtgtccgccatatcgttgcacccttcaatgacacttttgtccatgtcactgatctttctggcaaagaaaccctctgccgtgtgactggtgggatgaaggtgaaggcagaccgagatgaatctttgccatatgctgctatgttggctgcccaggatatggctcagaggtgcaaggaactgggtattactgccttacacatcaaacaccgggccacaggaggaaataggacaaagactcctggacctggggcccagtcggccctcgagcccttgccccctcggttgcttaaaaggcaaacacttttccccagacggaggctccggtggccacaagggggtcgtcggaaaagatcccaactggaagcccagagagtgattcgggaaagttacctcaaaggccacgaccagctggttcccgtcaccctcttggccattgcagtcatcctggctttcgtcatgggggccgtcttctcgggcatcaccgtctactgcgtctgtgatcatcggcgcaaagacgtggctgtggtgcagcgcaaggagaaggagctcacccactcgcgccggggctccatgagcagcgtcaccaagctcagcggcctctttggggacactcaatccaaagacccaaagccggaggccatcctcacgccactcatgcacaacggcaagctcgccactcccggcaacacggccaagatgctcattaaagcagaccagcaccacctggacctgacggccctccccaccccagagtcaaccccaacgctgcagcagaagcggaagcccagccgcggcagccgcgagtgggagaggaaccagaacctcatcaatgcctgcacaaaggacatgccccccatgggctcccctgtgattcccacggacctgcccctgcgggcctcccccagccacatccccagcgtggtggtcctgcccatcacgcagcagggctaccagcatgagtacgtggaccagcccaaaatgagcgaggtggcccagatggcgctggaggaccaggccgccacactggagtataagaccatcaaggaacatctcagcagcaagagtcccaaccatggggtgaaccttgtggagaacctggacagcctgccccccaaagttccacagcgggaggcctccctgggtcccccgggagcctccctgtctcagaccggtctaagcaagcggctggaaatgcaccactcctcttcctacggggttgactataagaggagctaccccacgaactcgctcacgagaagccaccaggccaccactctcaaaagaaacaacactaactcctccaattcctctcacctctccagaaaccagagctttggcaggggagacaacccgccgcccgccccgcagagggtggactccatccaggtgcacagctcccagccatctggccaggccgtgactgtctcgaggcagcccagcctcaacgcctacaactcactgacaaggtcggggctgaagcgtacgccctcgctaaagccggacgtaccccccaaaccatcctttgctcccctttccacatccatgaagcccaatgatgcgtgtacataa

SEQ ID NO: 118153 - DNA, 1857 bp, Homo sapiens
atggatgggaggaaaacagagggaacaccaacaaaagactctccacaatttcgtggtggtggtggcaatgatgatgatgaagatgaatgcaaaagtaggcatcagcaaagatattgccatctgagagatcgagattttgaatgtgatactcaactatgcaagtttaaacttgacacaacttgggataaaggtgattctgttttattggttctcagcagctgtgtaatcctcctactaacaaatataaaaattagcccgatgtggtggtgcccacctagtacgtacccagtcgtagcgttccgtgcgcaacgcggcctttgcacgtggtcccaaagggcgccacgggaacacgtttcggcgttgacacccatggaagacgtgacgggttgcaacagagaattcaaaatagctgtgttgaggaaacttgaagataacacagaaaatgaattcaggattctatcagatacagttaaaaagattgaaataattaaaaagaatcaagaaagaattctagagttcaaaaatgccattgacattcctgcatcagatgtcctgcactgtggctgtagtccatcatccaaactgcatggagtcccggatggtgtcaagtcatgtgacctgccaaagcccatcacttgcagtcctggtgccaaacgggcctgtgagttggagagagcatccgtaggagggaaaattcaaaatgtaacctctggcaagggagaggtccctgggcagagcaggctgagaaaaagatatgcaacctccaatgagttccctgatgataccctgaacttcatcaagacgcacccgctcatggatgaggcagtgccctccatcttcaacaggccatggttcctgagaacaatggtcagataccgccttaccaaaattgcagtggacacagctgctgggccatatcagaatcacactgtggtttttctgggatcagagaagggaatcatcttgaagtttttggccagaataggaaatagtggttttctaaatgacagccttttcctggaggagatgagtgtttacaactctgaaaaaacctgtattgcctccagagacccatattgtggatggataaaggaaggtggtgcctgcagccatttatcacccaacagcagaacccaggatggtagatccactgacagcttgcactgtgcacttcaaaaagctgcaggtactctatgccagcccatgaaagcagccaagggatctgtaccctgcagagccacagaggcagagctgcccaagaccttggaaacccaccacttgcatcagtgtggcttggatgtgagtcatggagccactctggcttcagccttggctcaaagaaccccagagacatctcaggctgacgcttcagagggcatgagccataagccttggtggcttctgtgtggtgttaagcctgtaagcatgcagattgcaagagtgagtgaggcttggcagtctcatagatttcagaggatgtatgaaaagcctaggttttcaggcggaagcttgttgcagaggcagagccctcacagagaatctttactaggacaatgcagaggggaaatgtggggttggaggccccacacagtgtgcccactgggccactccctagtggagctgtgggaagggggctgccaccttccagaacccagaatgatagatctactcacagcttgcaccctgcacctagaaaattcacaggcactcaacaacctatgggagaagctgtggagcctgaacactgcaacgccagagcggtattgctgctcaaggccttgggagcctaccccttgcaccactgtgcccctggatgtgggacatggagtcaaaggagattaccttggagctttgtga

SEQ ID NO: 118154 - DNA, 502 bp, Homo sapiens
ctatctccatgcgttccggtcaaggcacgggatggtggtctccagttcagttgaaatttccaaaatcacggcctggaaaaaatcaaggcgctgatttccagagattccccagagctgtcgcgagggggcgcccggccctgccaaacccggagggccgcgcgcgcgcgaaccgtgtccgaaccgcacggcggcgtcctggggggtccactgtgaggacggggggtccactgtgaggacggggggtccactgtgaggacggggggtccaccgtgaggacggagcttcctctcctcagcacccacccaggaggggccggggcttgggacacctggggccgcgtccgctgtgaggacagggagacgctgctgcagctccgggacaccgaggcaaaagtgaggaaaaggcttcctgcccgcgctgcgagtgcagcggggcgagcgcggccgcgtttcccgtcgggctgtttgtatgtggacttcactttgtgcaagcgtcccttcat

SEQ ID NO: 118155 - DNA, 653 bp, Homo sapiens
agacagttttggcagtatgtcagtcctcatcaaaaacccaaggacactctttgggggaaagccttatgtgtgcagggaatgtgggcgaggctttacgtggaagtcaaacctgatcacacatcagaggacacactcaggggagaaaccttatgtgtgcaaggattgtggacgaggctttacttggaagtcgaacctctttacacatcagcggacacactcagggctcaagctttatgtgtgcaaggaatgtgggcagagctttagcctgaagtcaaacctcattacccaccagagggcgcacactggggagaagccttatgtttgcagggaatgtgggcgtggctttcgccagcattcacacctggtcagacacaagaggacacattcaggagagaagccttacatttgcagggagtgtgagcaaggctttagccagaagtcacacctcatcagacacttaaggacacacacaggagagaagccttatgtatgcacagaatgtgggcgtcactttagctggaaatcaaacctcaaaacacaccagaggacacactcaggggttaaaccttatgtctgcctggagtgcgggcagtgctttagcctgaagtcaaaccttaacaaacaccaagaggtcacacacgggggagaagcca

SEQ ID NO: 118156 - DNA, 821 bp, Homo sapiens
ctcgtgattgcccgcctcggcttcccaaagtgttgggactacaggcgtcataagttttgagaacacgtgcaatatttgccacttcttctttcttcttctccttttcttctcctcctcctcctccttcttcttccttcctttctctttctcttttcgtgtctccctcttttgaattcaacccctgaagacaacagccagcacagtccaaggaagacaacacagtggtggatatagggccagccctgaacggagggcagatcagagggcgcacactggggagaagccttagtttgcagggaatgtgggcgtggctttcgccagcattcacaccttcaattgtcagtgtatcctcattctttttggactcaggacaagcgctcgaaccactaaacatgggtataagcaaattgctctcatttgccacattttgtggataggcagcacattccacctttggaagacagatcaaggaagggtctttggacacagaggagatacaggctctggaagcaggctgggtccatttgaacaggaaatcccaagcattcaaccagtcagccccgcgcgcagcctggccgctttccccaacacagcagctcaaggtcactggagagcctacgaccgcacacagccctctccggtacctgcccccgtggcgcaggcgcgcagtggagggggccgcggggttctctgggagatgtagttcaacgatgacggccgtggcgcaaagcgttctggggctcgtggttcgcggggtccatggggaacgcggtgtcgctggttcagatctcgcagagctcagagtcctgcatgccacgaaa

SEQ ID NO: 118157 - DNA, 916 bp, Homo sapiens
gaagggaagcggggcaggcccttccgcataccacgtcctgctcatccctttcctcatgaactccagtcgcgcctctgcattctcaaacccctccaccatcccacaccctcctcgtgcccttcctcatgaaccccagtcgcgcctctgccttctcatccgtgcgcaccacacaggctcgctcgtgcccggtgagtgatgaggctgctctgcacgtagagtatggccctgtgggcaagggctgggctcttggaggcccccacgaccctacttcccgcggccccggacgcctcctcacctgcgagccgccctcccggaagctcccgccgccgcttccgctctgccggagccgctgggtcctagccccgccgcccccagtccgcccgcgcctccgggtcctaacgccgccgctcgccctccgctgcgccctccccgagcgcggctccaggaccccgtcgacccggagcgctgtcctgtcgggccgagtcgcgggcctgggcacggaactcacgctcactccgagctcccgacgtgcacacggctcccatgcgttgtcttccgagcgtcaggccgcccctacccgtgctttctgctctgcagaccctcttcctagacctccgtcctttgtcccatcgctgccttcccctcaagctcagggccaagctgtccgccaacctcggctcctccgggcagccctcgcccgggttttgtccgccttccctgcctcctcttctgggggagttagatcgagttgtaacaagaacatgccactgtctcgctggctgcagcgtgtggtccccttaccagagtgaggatgcgaagagaaggtggctgtctgcaaaccaggaagagagccctcaccaggaacccatccagctgccaccttgaacttggacttccaagcctccagaactgtgag

SEQ ID NO: 118158 - DNA, 387 bp, Homo sapiens
agaggcacgcttcctgatggtaaaggagaggcacctgtgtgtgagtgatggatggtaaagaagaggcacgcttcctgatggtaaaggagaggcacctgtgtgtgagtgatggtaaagaagaggcacgcttcctgatggtaaaggagaggcacctgtgtgtgagtgatggtaaagaagaggcacgcttcctgatggtaaaggagaggcacctgtgtgtgagtgatggtaaagaagaggcacgcttcctgatggtaaaggagaggcacctgtgtgtgagtgatgtcagcaagggactttagtaattcctttttcatttctattcctggcagccaaacaaggagctccagaataatctgtttgaccggatagcccagcactatgccttac

SEQ ID NO: 118159 - DNA, 622 bp, Homo sapiens
  misc_feature (1)...(622): n = a,t,c or g
atgcccactttcaccacttctattcaacatagtactggaactcctagccagagcaatcagaaaagagaagtaaccaaaggcatccaaattggtgaagaggaagtcaaactgtctctgtttggtgatgatttgattgtatacctggaaaaccctaaatattcatccaaaaagctcctagaactggtcaatgaattcaacaaagtttcaggatacaaaatttatgtacacaaatcagtagctctgctatacaccaacagtgaccaagctgagaatcaaatcaagaactcaaccccttttacaacagctgnnnnnnnnnnnnnnnnnnnnnnnnnnnnnnnnncccaaggaatttttttaaccaaaaggctaaaaaatttttaaaggggaaaatttaaaaccctggtaaaaaaaaaccagggggacccaaaaaaagggaaaaaccccccgggccccaaaatgggaaaaaacaattttgggaaaacccccttttgggccaaaaaaatttaaaaattccattcaatttccaaaaaaaaccccacctttttttttccaaaaacttaaaaaaaccggggtaaaatttttttgggccccaaaaggccccaaaggttttcttagcaaaaaa

SEQ ID NO: 118160 - DNA, 1045 bp, Homo sapiens
atgaggtatgacttcccacctgttacaatcactattagcaaaaacagccggtatggcaaagatgcagagaaattggaacccttggatactgtggctggaaatggacgcttgacattcatggacgtggccatcgaattctctcaggaggagtggaaatccctggaccctggacagagggctttatacagggacgtgatgttggagaactacaggaacctggtctttctggaagagaaagcatacattagaggaaaatcttatgaatatgaatgtagtgaagatggtgaagtttttagagtccgtgcaagccttactaaccatcaagtaatccatactgcagagaaaccttacaaatgtactgaatgtggcaaggtcttcagtcgcaattcacaccttgtagaacattggagaattcatactggacagaagccttacaaatgtagtgaatgtgacaaggtgtttaatcgcaattcaaaccttgcacgacatcaaagaattcatactggagagaagcctcacaaatgtaacgaatgtggcaaagcttttagagagtgttcgggacttactacccatcttgtaatccatactggagagaaaccttacaaatgtaatgagtgtggcaagaacttcaggcacaaattttctctaaccaatcatcagagaagtcacacggcggaaaaaccttacaaatgtaatgaatgtggcaaggtctttagtctgctttcataccttgcacggcatcaaataattcatagtacagagaagccctacaaatgtaacgaatgtggaagagcatttcacaagcgtccgggccttatggcccatcttctaatccatactggagagaaaccttacaaatgtaatgaatgtgacaaagtctttgggcgcaaatttatacctaaccaaccatcagagaattcatactggagagagaccttacaagtgtaatgcatgtggcaaggtcttcaatcaaaatccacacctttcacgacatcggaaaattcatgctggagagaattcactgcgtaccttacagatggaatga

SEQ ID NO: 118161 - DNA, 1010 bp, Homo sapiens
agcagcagcatcagcagcagcagcactttgtaggacaggtggcaatccagcagcaacagcagcagggtcctggagtacagacaaaccaagctttgggtcccaagccccagggccttatgcctcccagcagccaccaagacctcctggtccagcaggtgtcccctcgaccaccccaggggccccagggcatggtgggccctgcccaggtgggtgtgttgcagcatcagctccatggagctttgggcccgcagggccttcactgacaggtgtttatgccccatgtctcgggtgttcagttccccccagctggcacagcagggtcagggccttatgggacacaggctggtcacagcccagcagcagcagcagcaacaacagcaccaacagcaagggtccatggcagggctgtcccatcttcagcagagtctgatgtcacacagtgggcagcccaaactgagcgctcagcccatgtgctctttactgcagcttcttcagcagcagcagctgctgagctagcaacagcatcttcagcagcagcagcagcagcagctacaacagcaacagcaactttagcagccacagcttcatcagcagcaacagcagcagcagcttcaacaacagcagccgcaacagcttacaacagcagcaccagcagctccaacagccccaaatcaactcccagctctgttccccagcaggcggccccccaaccatatgggccttttaacccacagcccgaatctcactgcctccctccgcctcaccagtacgcacaaagcggcccttggacctggactgcaggctgccttaggtcatcccaaagacggccttttatggaagacactggggacatggagggccaggggactgatatgcaccggaggcattatttcttactttactcaacactcttgggaagtcaaagtcttcacaacactttagtctctgcctctacactccttctcaattcttacatcattaggaatgaggggcttcctttcttctcctga

SEQ ID NO: 118162 - DNA, 2772 bp, Homo sapiens
atggagaaaaacaaagttgttaagagagaagcagaagccaattctataaacctgagtgtttatgaaccttttaaagtcagaaaagcagaggataaattgaaggaaaactctgacaatgtgctggaaaacagagtcctggatgggaagctgagctccgagaagaatgacacctgcctccccggcactgcgccatcaaagacaaagtcatcctccaagctctcatcctgcagctctgccatcatggctctcagcgctaaaaaggcggcttcagactcctgcaaagaaccagtggccaattcgagggaatcctccccattaccaaaagaagtaaatgacagccaggcgcgggcgcctctccagtccacggtcatgaccaatgcagtttcacctgcagagctcacccctaaacaggtcacaatcaagcctgtggctactgctttcctcccagtgtctgctgtgaacgaaatgaagacggcaggatcccgagtcattaatttgaagctcgctaacaacaccacagtgaaagccacagtcatatctgctgcctctgtccagagcgccagcagcgccatcattaaagccgccaacgccatccagcagcaaactgtcgtggtgccggcacccagccgggccaacgccaaactcgtgccaaagactgtgcaccttgccaacattaaccttttgcctcagggtgcccaggccacctctgaactccgccaagtgctaaccaaagctcagcaacaaataaagcaggcaataatcaatgcagcagcctcgcaaccccccaaaaaggtgtctcgagtccaggtggtgtcgtccttgcagagttctgtggtggaagctttcaacaaggtgctgagcagtgtcaatccagtccctgtttacattccaaacctgagtcctcccaccaatgcagggatcacgttaccaacgcgtgggtacaagtgcttggagtgtggggactcctttgcagttgaaaagagtctgacccagcactatgacagacagagcatgcgcatcgaagtaacatgcaaccatggtacaaagaacctcattttttacaacaaatgcagcctcctttcccatgcccgtgggcataaggagaaaggggtggctgcagatacacgtggacaaaagacttgcactatctgccagatgctgcttcctaaccagtgcagttacgcatcacaccagagaatccatcagcacaaatctctctacacctgccctgagtgcggggccatctgcaggtcggtgcacttccagacccatgtcaccaagaactgtctgcactacatgaggagagttggttttcgatgtgtgcattgcaatgttgtatactctgatgtggctgccctgcagtctcacattcaaggttctcactgtgaagtcttctacaagtgtcctatttgtccaatggcatgtaagtccgccccaagcacacattcccacacctacacacagcatcctggcatcaagataggagaaccagaaataatatataagtgttccatgtgcgacactgtgttcaccctgcaaaccttgctgtatcgccactttgaccaacacattgaaaaccagaagttgtctgttttcaagtgtccagactgttatcttttatatgcacagaagcaacttatgatggaccatatcaagtctatgcatggaacattgaaaagtattgaagggcctccaaacttgggtataaacttgcctttgagcattaagcctgcaactcaaaattcagcaaatcagaacaaagaggacaccaaatccatgaatgggaaagagaaattggaaaagaaatctccatctcctgtgaaaaaatcagtggaaaccaagaaagtggccagtcctgggtggacgtgttgggagtgtgaccgcctgttcattcagagagatgtgtacatatcccacgtgaggaaggagcaagggaagcaaatgaagaaacatccctgccgccacctgtgccagcacaaccggatcaagcacaaaggcatcaggaaagtgtatgcctgctcgcactgcccagactccagacgtacctttaccaaacgattgatgctagagaagcacgtccagctgatgcacagcctcaaggaccctgacctgaaagaaatgacagatgccaccaatgaggaggaaacagaaataaaagaagacaccaagttccccagtcccaagcacctcttcattgtacacaagttaaaggaacctcagccagtgtccaagcaaaatggagctggggaagataaccaacaggagaacaaacccagccatgaggatgaatcccccaatggcaccgtgtcagacagaaagtgcaaagtagacactgatgaagctgcttttgagccagattataatgaaagtgacagtggaagttatgtatctgtaaaagatgaggaaacttcaggaaacacttctaaggtcctgaaagataagataatggagaaagcaggagaaagcaaaagaaagcctggacacagttggccaggccctgtatgcctgtgcttccaggagccagagagatgtccaggtaaacttcctggccacctccaggccctggctgcccgggagaggcaaagcagtggcagagcacagtcatcagagcaccacgtcatcctcacctacaactcaggacacccagagccacagtcatcagagcaccacgtcatcctcacctacaactcaggacacccagagccgtccaggaaagacccaggccctgcctggggtgaacgagtgcttcttaaagcacctaagcttcactag

SEQ ID NO: 118163 - DNA, 466 bp, Homo sapiens
atggagaaaaacaaagttgttaagagagaagcagaagccaattctataaacctgagtgtttatgaaccttttaaagtcagaaaagcagaggataaattgaaggaaaactctgacaatgtgctggaaaacagagtcctggatgggaagctgagctccgagaagaatgacacctgcctccccggcactgcgccatcaaagacaaagtcatcctccaagctctcatcctgcagctctgccatcatggctctcagcgctaaaaaggcggcttcagactcctgcaaagaaccagtggccaattcgagggaatcctccccattaccaaaagaagtaaatgacagccaggcgcgggcgcctctccagtccacggtcatgaccaatgcagtttcacctgcagagctcacccctaaacaggtcacaatcaagcctgtggctactgctttcctcccagtgtctgctgtgaacgaaa

SEQ ID NO: 118164 - DNA, 311 bp, Homo sapiens
gcacctcttcattgtacacaagttaaaggaacctcagccagtgtccaagcaaaatggagctggggaagataaccaacaggagaacaaacccagccatgaggatgaatcccccaatggcaccgtgtcagacagaaagtgcaaagtagacactgatgaagctgcttttgagccagattataatgaaagtgacagtggaagttatgtatctgtaaaagatgaggaaacttcaggaaacacttctaaggtcctgaaagataagataatggagaaagcaggagaaagcaaaagaaagcctggacacagttggccag

SEQ ID NO: 118165 - DNA, 1937 bp, Homo sapiens
atggtaggggaccagtggccaagggagaagaagaaagcagcagtgagactgccctgcgatggctctcttggcattaccccagggaaacgcagagtcagtgccatcaacgagccagggtccgcaccagcaatcctcaaagtccgcataaaaaccattaagatgtcttctggggaaatcaagagaacagtgaccagggtattgccagaagtggatcttgactctgggaagaaatcttctgagcagacggcgtctgtgatggcctctgtgacattccttctgtcatctccagcatcagctgccatcctttcctctctcctcagggcgcctctccagtccacggtcatgaccaatgcagtttcacctgcagagctcacccctaaacaggtcacaatcaagcctgtggctactgctttcctcccagtgtctgctgtgaacgaaatgaagacggcaggatcccgagtcattaatttgaagctcgctaacaacaccacagtgaaagccacagtcatatctgctgcctctgtccagagcgccagcagcgccatcattaaagccgccaacgccatccagcagcaaactgtcgtggtgccggcacccagccgggccaacgccaaactcgtgccaaagactgtgcaccttgccaacattaaccttttgcctcagggtgcccaggccacctctgaactccgccaagtgctaaccaaagctcagcaacaaataaagcaggcaataatcaatgcagcagcctcgcaaccccccaaaaaggtgtctcgagtccaggtggtgtcgtccttgcagagttctgtggtggaagctttcaacaaggtgctgagcagtgtcaatccagtccctgtttacattccaaacctgagtcctcccaccaatgcagggatcacgttaccaacgcgtgggtacaagtgcttggagtgtggggactcctttgcagttgaaaagagtctgacccagcactatgacagacagagcatgcgcatcgaagtaacatgcaaccatggtacaaagaacctcattttttacaacaaatgcagcctcctttcccatgcccgtgggcataaggagaaaggggtggctgcagatacacgtggacaaaagacttgcactatctgccagatgctgcttcctaaccagtgcagttacgcatcacaccagagaatccatcagcacaaatctctctacacctgccctgagtgcggggccatctgcaggtcggtgcacttccagacccatgtcaccaagaactgtctgcactacatgaggagagttggttttcgatgtgtgcattgcaatgttgtatactctgatgtggctgccctgcagtctcacattcaaggttctcactgtgaagtcttctacaagtgtcctatttgtccaatggcatgtaagtccgccccaagcacacattcccacacctacacacagcatcctggcatcaagataggagaaccagaaataatatataagtgttccatgtgcgacactgtgttcaccctgcaaaccttgctgtatcgccactttgaccaacacattgaaaaccagaagttgtctgttttcaagtgtccagactgttatcttttatatgcacagaagcaacttatgatggaccatatcaagtctatgcatggaacattgaaaagtattgaagggcctccaaacttgggtataaacttgcctttgagcattaagcctgcaactcaaaattcagcaaatcagaacaaagaggacaccaaatccatgaatgggaaagagaaattggaaaagaaatctccatctcctgtgaaaaaatcagtggaaaccaagaaagtggccagtcctgggtggacgtgttgggagtgtgaccgcctgttcattcagagagatgtgtacatatcccacgtgaggaaggagcaagggaagcaaatgaagaaacatccctgccgcca

SEQ ID NO: 118166 - DNA, 1833 bp, Homo sapiens
atgtgcatcgaagtaacgtgcaaccattgtacaaagaacctcattgtttacaacaaatgcaacctcctttcccaagcccgtgggcataaggagaagggggtggtaatgcaatgttcctactcaattttaaagccagtctcagcaggtcatatcatagtttctccatcgagcaatagttcttcttcatcttccactcttcagagccctgtgggaactggcatacacactgtcacaaaaattcagtctggcataactgggacagtcatatcggctccttcaagcactcccagcaccacagccatgcccctagatgaagacccctccaaactgtgtagacataatctaaaatgtttgaagtgtaatgaaatcttccaggacaagagatccctggctacacatttccagcaggctgcagatatgagtggacaaaagacttgtactatctgccagatgctgcttcctaaccagtgcagagaatccatcagcacaaatctccctacacctgccctgagtgcagggccatctgcagaaaaaagaggacagcaaatccatgagtgggaaagagaaactggaaaagaaatctccatctcctttgaaaaaaaatcaatggaaaccaagaaagtggccagtcctgggtggacgtgttgggagtgtgaccacctgttcatgcagagagatgtgtacatatcccacctgaggaaggagcatgggaagcaaatgaagaaacacccctgccgccagtgtgacaagcctttcagctcatcccacagactgtgctggcacaaccggatcaagcacaaaggcatcaggaaagtgtatgcctgctcacactgcccagactccacaggtacttttaccaaagggttgatgctggagaagcatgtccagctgatgcatggcatcaaggaccttgacctgaaagaaatgacagacgccaccaatgaggaggaaacagaaataaaagtagacgtcaaggtccgcagtcccaagtggaagttgaaagaaccggttctggagtacaggcctcccagaggagcaataactcaaccactgaaaaagctgaaaatcaatgtttttaaggttcacaagcacctctttgttgtacacaagttaaaggaacctcagccagtgcccaagcaaaatggggctggcgaagataaccaacaggagaacaaacccagccacgaggacgaatctcccaatggcgtcatgtcagacagaaagtgcaaagtgtgtgcaaaaacttttgaaactaaagctgccttaaacactcacatgcagacacatggccacgccgaagggtgtttaaagcagccttgcaggtcgctcctttcccagccgcggataaaaactgaagccaggaatctaataaggaatgctgatttcctcaattccattttgaggaatggggaaggttattctaaagaaaaaaagaatgggactggttttctgggcagatctgcaaggctggctttaggagcacaaggagggaaaagttggcgtttcctgttctgggtgttactgccaaacgttctggtgcttagagttgggatgcacgacgtcaaccaccgacttatcaatgcagccggctgtgtatcgcaattggccgttaccttaagcactgagccacatgggattagttcagccatttcaagagtgcccaggcattgccacccctctggagagaattctatggctacatccctgaatgtcaaccgttccatttctaggcttgcagcaggctctggtgtcttagctatggatctcccaatacctgctggtcacagggccatagagactgggcttctaggaacagaagacacagagcagtga

SEQ ID NO: 118167 - DNA, 1154 bp, Homo sapiens
caaatgtcccacgtttatttacatatgaaatgtgtttcatacagttatgatggatggagtgcataacacctgacagcagcaagaccttttgaggaaccgaacattgactacagtatatcatgcaagtatctatatatacacaaaagaattccttttcttaaaaaaaaaaaaaaaaaaaggtacaaaacatgttcagggataaatccaagatccaaaatgccaaagaaaaacccaaaccaaacccaaaaaataggtctctctcagagaactataaacgaaagggacagaagagtacctctgctgcattttaataaagcagaactaccgacgttaaatatacttcttgaaatggctgaactaatcccgtgtggctcagtgcttaaggtaacggccaattgtgacacacagccggctgcattgataagtcggtggttgacgtcgtgcatcccacctctaagcaccagaacgtttggcagtagcacccagaacaggaaacgccaactcttttgacagcaaaggattaagtcagctgatttttttttctatcaagagccagagaaatacttgatattcttagctgtgtttctgtaatagttaggttaataaattacatgacaaaaaaccctggactatataaaatctattggtctaactacgtatttgtaacttttacagtagtccagccctttcgttactttccctccttgtgctcttaaagccagacttgcagatctacccagaaaacctgtcccattttttttttctttagaatagccttccccattcctcaaaatggaactgaggaaatcagcattccttattagattcctagcttcagtttttatccacggctgggaaaggagcgacctgcaagactgctttaaacacccttcggcatggcctgaagacaaaggcacgtccacactggagtgcagttgtctcaaatgtgaactcactccctcagggcaggcacatcgaggaagtgctaagacacttaaaagttcctagtgtttttgagacccacaattacttacaatttatgtagtgaattctaaaaattaaaaacactaaaaaaggcattattttagcctgtaattagttaacccattcaaaatccaaaaatacaaaatggtttatttgaattcaggaactgc

SEQ ID NO: 118168 - DNA, 417 bp, Homo sapiens
ctgaaagtggagacggacggcaggatggattcacttggcgacatggcggggagctgggaagacggacaccgacctaagtcaatgttagtctaccactgtacgtctggtaacctcaatccctgcaaccggagcaaaatgtgattccaggtcttggcaacctctgaaattccaactccatttgcgagagctttgaggaggccatatgctgatttcaccacaagcaacttcacaacccagtactggaatgccatcagccagcaggcccctgccattatctgtgacttctatctgtggctcattggaaggaaacccagctaccgaaggaagataccctcatcaacccaattttacaaatggagaaatagaagctcagggaatgtattgcgggcgctctggaggatacacgctaggtcctat

SEQ ID NO: 118169 - DNA, 678 bp, Homo sapiens
atgggcgtgggcaggcctgctggccacctgcccctctgtgtcctgctgctggtcctaagcacgacccctcttgcctggcccaagctgctcccaaccacactggcagcctactggatggtgctcacccacattacagactggaaaaaagcaaaaacatccatcaaggagcagcggagaaataagtggactgctctacatctggcctctgccaatgggaattcaggagtagtaaaactcctgctggacagacgatgtcaacttaatgtccttgacaacaaaaagaggacagctctgacaaaggccgtacaatgccaggaagatgaatgtgcgttaatgttgctggaacatggcactgatccaaacattccagatgagtatggaaataccactctgcactacgctatctacaatgaagataaattaatggccaaagcactgctcttatacggtgctgatatcgaatcaaaaaacaaggttgaagaagaaatgaagaagcatgaaagtaataatgtgggattactagaaaacctgagtaatggtgtcactgctggcaatggtgatgatggattaattcctcaaaggaagagcagaacacctgaaaatcagcaatttcctgacaacgaaagtgaagagtatcacagccacactgaattcttgccatcccgtatctacccctag

SEQ ID NO: 118170 - DNA, 685 bp, Homo sapiens
  misc_feature (1)...(685): n = a,t,c or g
tttttttttttttttttattcaagatcaattttatttgttgtaaaaacaaacaagcgttatgttccagacaaacagatataagtgagtagacttatgccctggtgcctccttggctcttcacaggatgcaaaaacaaatcctgccagcaggaggtggcagattgcagaggtggctggttgctctttcagccagcttggccttgtctgggtttccttccaatgagccacagatagaagtcacagataatggcaggggcctgctggctgatggcattccagtactgggttgtgaagttgcttgtggtgaaatcagcatatggcctcctcaaagctctcgcaaatggagttggaatttcagaggttgccaagacctggaatcacattttgctccggttgcagggattgaggttaccagacgtacagtggtagactaacactgaccttaggtctgtgaactgcagcacaccatcctacagttagtgggagactgacggctgtatcacctggaattggaattaagtctcccacagccattggagtagcttttatggacacaagaaaccctttcccagccggtgtccgtcttcacagctccccgccatgtcgccaagtgaatccatcttgcgccccctcnttcnnnnngnnngtnccagtttgcagttcttagtcccgggccctgnnaatc

SEQ ID NO: 118171 - DNA, 2064 bp, Homo sapiens
tttttgctttcaagctttctttgaactttactactgaatgatttatttgcaactcattattctgttgtagtggtgaagagctacttatgtctctttaagccaatatatatttaagattacaataatgatataatatatatttcactatctagatttgattttgacacaatgataagctgattggttcacaattaaatggacaaattttccacaagtaagagatgaaactcctggcttggaaatcctggggattgacaggttgaatgtccttggtctgtggtgagcatgttcacatttcaacacatgagatctggtgtgctttccgtatcagctcctcagattttgtgaaaaactgggtttccttccaatgagccacagatagaagtcacagataatggcaggggcctgctggcctgatggcattccagtactgggttgtgaagttgctggtgggtgagatcggcatatggcctcgttgaagctctctcaaatggaattggaatttcaaaggttgccaagacctggaaacctgggggaaaaaagagactagaaaattttatggctatcgaagaaatgaagaagcacagaagtactcatgtcggattcccagaaaacctgactaatggtgccactgctggcaatggtgatgatggattaattcctccaaggaagagcagaacacctgaaagccagcaatttcctgacactgagaatgaagagtatcacagggatttctccaagctctgtctgggttctgctgccaatggtgttgtccatgtagaagtcaaaatgtgtgtgtataatgggaaaggagagaggcaggaggagaagatgaagggattaatatccatgaaccttgtagttgaagaagaaatgaagaagcatgaaagtaataatgtgggattactagaaaacctgactaatggtgtcactgctggcaatggtgataatggattaattcctcaaaggaagagcagaacacctgaaaatcagcaatttcctgacaacgaaagtgaagagtatcacagcctgggcgacaagagtaagacttcatttcaaaacagcaacaacaacaacaacaaacaacaagaacaacaacaacaaaacccaacattttctaatacaaggaaactcactaagctttataaggcccccatccctccaagtattatcctttccggctgccccaacattaatgacagcaactggcaggaaattgagcatggaatgcagacggcaggcttgccaacaaggcctctttcccacggcctgcagcagaaaggggctgctttccgctgcttgggctgcaaatgctctgagcccttcaccggcagccttattttacagaaggcgaaaactaacacccagaaatggcaagctacttacccaaagtcacagaacgaacaacttgtaccgtcagtgggtaaaagctacaggtgctcaacaccagcccagcccatgaagacagccgtggggcataaaccctgcaaagccacaggtgcagagctgcccaaggccttgggagcccagcccttacatccctgtgccctggatgtgggacaaggtttcaaaaagggtaattttggagctgtaggattgaatggccttctgggtttggagtttcatggggtctcgggggtcttgttagtgggtcctggtgatgggggtctaatcagtgagggtgtggtcagggaagacctgatgtgtggggtctggtcagcaggaacctggtcagtggggactgctgagcgctgcttggagaagccaggtgcattgcacgttatcgagggccctctggacagctgggatggcccagtgatgcccaatggcccggtcaaaagtagacaaagcagttgtttggatggacctgggagatgttgctcagagattctgacaggacaaagccatggtaacaagaagccagccagagccagttcaaaatctagtcaatcgatcaatgaccgaccactggctgtgctcaccaaccaatatcagtgtgagcagcttgcttctgaaagacagccaagcagcaacagctgctccatcagaatagacagtgcctga

SEQ ID NO: 118172 - DNA, 411 bp, Homo sapiens
ggcaagttaatgcttcctggcagcaccaggaagccgcaggtacctgtggacaggaaaatgggtcatgagggagtgtttgtgtggcaggcaggcttgcgtgccaggcccggccccagcctccccttctcacacggactcacactccatctccactggcctctggctcttccagtcgggccacgtcctctccatgtgaggcaggggacttaggtgtgctcacttgcagctgggacttggtgtccatgggaggcttgaagacaggaggaagccggttggcaggccccagggagggctggtcctgctcgggtaggctggggtggtacaggtttgacttctgccgaggttataataacgatctaacgatgactggtgttcatggggtgctttctggctcagaagacgccttcatat

SEQ ID NO: 118173 - DNA, 771 bp, Homo sapiens
atgctcatcagccacaagcagctgtcaccgcagctcctctctctgactctgcctttatcagaaggcaaggcgggctgggcaggagaatgcccaaatccgcccagcaaagactctccagtacaaggaattggagacctccaccagttaccaaaaatgcagataagatacagcatccatgctgacgatggctccgtgccacgggccggtctgcccaccacacccagggtggagacccaggagtggttccagggtcatccttcctgcaccccctgggcaccacccctggccaaggcccgagagccagaaatgggcttggcaccttccagggctgctccaccggctggcaggtgcaagaaacgtgctttggtccaggggggtggctgggggatcgccatctggtgggacctgctgctactggcgctcgctgtctgcctgcagcgcgtggtccggtggggccttacacccagcagtcccaacgggcaagctgaaagggcagccttggcccaggtgccaggcaccagagaacttatgactgactgccaagaccctgcggagcagctggcctgggctctccacctgcctgacaccccatatcagaggagacagaaaatcagtggggcctgcatggccctcctcagccagcctgggcaagaccagaccacgggtgtcaacccctacgctgtcaccctccctgaagaggaagccagggagggtgacagcaggagggccgatgcctggctgcttctccacctcatcggtccccacgactga

SEQ ID NO: 118174 - DNA, 1119 bp, Homo sapiens
atgctcatcagccacaagcagctgtcaccgcagctcctctctctgactctgcctttatcagaaggcaaggcgggctgggcaggagaatgcccaaatccgcccagcaaagactctccagtacaaggaattggagacctccaccagttaccaaaaatgcagataagatacagcatccatgctgacgatggctccgtgccacgggccgcacacaaaagggggctgagaaaaagaacactgaaaaccatttctctccctcggcaagagtcagccttccctttccatggtcagggtggagacccaggagtggttccagggtcatccttcctgcatcccctgggcaccacccctggccaaggcccgagagccagaaatgggcttggcaccttccagggctgctccaccggctggcaggggggtggctgggggatcgccatctggtgggacctgctgctactggcgctcgctgtctgcctgcagcgcgtggtccggtggggccttacacccagcagtcccaacgggcaagctgaaagggcagccttggcccaggtgccaggcaccagagaacttatgactgactgccaagaccctgcggagcagctggcctgggctctccacctgcctgacaccccatatcagaggagacagaaaatcaatggggcctacatggccctcctcagccagcctgggcaagaccagaccacgggcgtcaacccctacgctgtcaccctccctgaagaggaagccagggaggtccccagaaagccgcagtctctcagcaaattccacgggctgggcaggaaggtacgcactgagatcctactgaatgggggcctccagatggggatcaaggaggccccagggagtcctgcaggggtctccaggggggccgaggacagtgcttgtgtgactggtcccccaacacctctgagatttagtatcctcatgcgtgaaatggggactgaaaagcaggatcctcccatggacaccaagtcccagctgcaagtgagcacacctaagtcccctgcctcacatggagaggacgtggcccgactggaagagccagaggccagtggagatggagtgtacctgcggcttcctggtgctgccaggaagcattaa

SEQ ID NO: 118175 - DNA, 337 bp, Homo sapiens
  misc_feature (1)...(337): n = a,t,c or g
tatagatatttatagaacagggcaagggcataccacagaaggggcacaagttttcaccaacggtcacacctgaatgtatcagctcaccactacaacagattaagtcacagatgaagggggctggctttggggctgggggagccactgtcaagtcacagaacagccgtccaggcaggcttggaaagggaggtctccgagaagaggagggatctgtttagaggtcgaaggggggcctggggctctcaggacgggatggacttgcctgacccgatcggctggggaccccgggcggggcgcggttggggcgcnagggcacctgagggggagggccgaaagg

SEQ ID NO: 118176 - DNA, 453 bp, Homo sapiens
ctggtggcctgttctctctgtccctccagagtgccggctgcccggcaggctcccttcaggctgagttcgtggccctgccccctggtggccagagccggcttcacaggacaagagccagctaagttccaggggctttccaggaaaagtgtcccttggaaagggtatggccttttcacccctccaaacagcaccctagaaatggcttggcctttcccctcccctgagctccacagagaacacagccagcagaggacacacttccccgtcatccagaaatgggtttgattctcagccaagggacagcaggactggtagagagtgtcaggccacacagctgcctgcacagcactcccatgcggaggtcttgcactttggaggggcaatgtcgggacagctttctcttgttgggccacaagactccaagaggacagcacggttgactgattcccagca

SEQ ID NO: 118177 - DNA, 1858 bp, Homo sapiens
tttttttttttttttttttttttttttttttttttttttttttttttcattccccatcatccagaaatgggttttattctcagccgagggacagcaggactgggtagaaactgtcaggccacacggctgcctgcacagcacccccatgcttggtagggggtgggagggatggcgggggctggctgtccacaggccgggcatgacaaggaggctcactggaggtggcacactttggagttggattgtcgggggcacaagcgttcttttggtaggttgggccacaaggcccccacaaggatagcacagtgactgattcccagcgctagagggcgagggcggttggcccatgtgtagggtgtgtatatatatgagtatttatagatatttataggaacaggggcaagggcataccacagaagggggcacaaggtttttcaccaacggtccacacctgaatgtattcagcttcaccactaccaacaggattaagttcacagatgaaggggggctggctttgggggctggggggagccacttttcaagtcacagaacagccgtccaggcaggcttggaaaggggaggtctccggaggaagagggagggatctgtttaggaggtcsgaaaggggggcctggggctctcaggacgggatggacttgcctgacccgatcggctggcagttggagagaaagcagagagaaaacgggagagagaaaagtgaggagagagctggtaaggcaagcgcagcacacggccggggccggccgcgccgcagcagtggtgggagggccggggaggggaggctgcaggtgtgggtgtggcaaggttcctggaaaaggggctggaagggaaaggggaggaagatggagggaggagccgtagcttcacagatagcgcctgggggctgtggcggccctccccaccccacacacgctggcccttctcaacacggcaaccccaggcagggcaacccgcaaattcaaggctgaatgctcgggccccctcgggcttcccctcttctctggtcaccctgtcttcccaacccaactggcctggggccaccccttgccttggggagccccatgcaacagccacccaggcctgatagagaaagaacactgcttgaaccaggagggtgaaactaaaagggatggctggagggagcgccggaggcccctctgggtgttcagaaagcccaggcccctctgaagggaccctgggggaggcagggagggcaggcagccggatgccagggcccatagacttataagtctaagaggggaccctcagctggtcggggggctgcaggtctcgtaaggtgaagctgggcccttcctgctgggaaaagcagaagagcgagagtcagtggcaggagaatggggggtgggctcactgggcggagctcagctgggccagcaggcacggtcgtccccttggctgaatggcacaagtgaccctaggagcaacaggccaaggtgcgtgaagcccgctggctggctacggtgcttcagctggggccagggacactgccttcagtcacactagcagctatgacggtacctggaagggagggaagggggctgtgtgtccctgcctggcctgtgaggtatgtcgtgggatgaccgtgtgtatgggactctcaagcttttaccctaggtcaccactggattgccggcagatagaggaggtgggaccctgactctcacccctgctctacggtggatttggctctcagcactcccaggctgggagctggatgccctacccagggagcatcactcagactgcacaccacgcacggtgtgcccaggataacgttcctaggcctctggccgcctcagagtccagacgaaatcgt

SEQ ID NO: 118178 - DNA, 1704 bp, Homo sapiens
atgcccatccttcaaccaaactacagtgaacaagggatagtaggcacttattggcttaagccaatccagacctactctagagctgggggtgagatcaatctcggtgaaaacaacagagctgaagatatgtgcatcatgacggtaaacatttcttggttatttagaaacagcccatgggcccagcgctcagcagtgtccaacgggtctttttgctttcagatcactgggtcggggtctgctgctgacctctttaccaaaacagccagcccgctcaccacctcgcgaggacgttcccaggagtacgactcaggaaatgacacgtcctcgccaccctccacgcaaaccagctcagccaggtctcggggccaggagaaggggagccccagtgggggcttgagcaagagccgggagctcaacagtggcaacacctctgattcagggaactccttcaccacctcctcaccccagaacaagggggccatgttggagaatctctcccccaccagcaggggcagagagtcaaggggatgctatgctgttggccagaatgtgtcagatgccatcactagggctaatgagtcgaaccttcccacactcctctacaggaaaagccaggggatttcagtcaccgtgtctggaatgtgccgaagtgaagaagtccagtttggtcccatccacagcccggagctcacccatgaaagggtgttcccgcagctcctcctatgccagcacccgatcctccagtcactcgtcccaatccccaaatcccagggcttcccccagggtaaggactattattacctgcattttatagacaagaaaacggcccagggaaacgaaatcatctgccaaggtcacacagctactattcctccaagtctggcaagaggagcccgcccagcagaagctctaggtcccgccgcagccctagctactcccgctacagccccagcagcccaaacagtcccgcagacataccccagaattcacatccccagccctcagcctctacagaccgtccccatattcagagcccccagttcttacccacgcaccagggcctgcgtaacattcacgtcctcacccctgcagcacctgccctgctatgatgcccacctgcaaatgctgacacccctgcacaagcccagcccccacccctacggtactaacaaccctcgcagactcttaccgcagccccgtcatcctccctccggtctcccttgcggcaacgtgcagaccccatcccgtgacccagtgggggagcgggatcccaaatacagtgagaaggactcgcagcagcgggagcgcgagcgagcgcgtcggagacgtcggtcctactcgcctatgagaaagcgccggagagactccccgagccacctggaggcccggaggataaccagtgcccggaaacgccccatcccctactatcggcccagcccctcctcatccggcagcctcagcagcacctcctcctggtacagcagcagcagtagccgctcggccagccgcagctactcccggagccggagtcggagccggagccggagacggagccggacccgcacgagcagcagctctagctcccgcagccctagtccgggctcccgcagccggagccggagcaggagccggagccggagccggagcaggagccagagccggagctacagctcagcagacagctactccagcacgaggcgctaa

SEQ ID NO: 118179 - DNA, 1068 bp, Homo sapiens
atgcttctcttggaactcaatgcacctgagcatgtgttggaaaccattaatttccagacacttacagctttctgcaatacattccacatcttgaggcctaccaaagctcctggctttgtatatgcctggcttgaactgatttcccatcggatatttattgcaagaatgctggcacatacgccacagcagaaggggtggcctatgtatgcacagctactgattgatttattcaaatatttagcgcctttccttagaaatgtggaactcaccaaacctatgcaaatcctctacaagggcactttaagagtgctgctggttcttttgcatgatttcccagagttcctttgtgattaccattatgggttctgtgatgtgatcccacctaattgtatccagttaagaaatttgatcctgagtgcctttccaagaaacatgaggctccccgacccattcactcctaatctaaaggtggacatgttgagtgaaattaacattgctccccggattctcaccaatttcactggagtaatgccacctcagttcaaaaaggatttggattcctatcttaaaactcgatcaccagtcactttcctgtctgatctgcgcagcaaccgtacaggtatccaatgaacctgggaatcgctacaacctccagctcatcaatgcactggtgctctatgtcgggactcaggccattgcgcacatccacaacaagggcagcacaccttcaatgagcaccatcactcactcagcacacatggatatcttccagaatttggctgtggacttggacactgagggtcgctatctctttttgaatgcaattgcaaatcaagctccggtacccaaatagccacactcactacttcagttgcaccatgctgttacctttttggcaggagggccaattcgggaaggccattccaaggaacagatcacaagagttctcttggaacggttgattgtaaataggccacatccttggggtcttcttattaccttcattgagctgattaaaaacccagcgtttaagttctggaaccatgaatttgtacactgtgccccaga

SEQ ID NO: 118180 - DNA, 984 bp, Homo sapiens
atgcaggccaatttagaaatggcaggaaatggggtgacttccatgggaatggagcctctggccattcctcacatctactgctgctctgagggcacctgcaacttcagcaacacagagaaccactgcctgagagcggccttgtcaatgctgctaaatggtactccatttgcctttgttattgaccttgctgcacttgcttcacgtcgtgaatacctcaaacttgataagtggctcacagataaaattcgagagcatgggccttccgtccacggcctgttccctagccgggtgctctcgcctgctcttggccctggggcttttcctggacgccataattgtggttcctgtgtggccccccagtctgggcttcccggagttcatcctgtggaattaccttggtcaattagtaagttattccgcttgcgttctccagcaaacttcagtgatgttttggggtcaagatcgaaagttcttctgcttatgtgcaccctcaagtactgcgggatgcagctcggcgctgatgctactagagtcgacatgctaaccttcctacctaccctgggattcataaggaacaacgactatacggacgacaccaaggcgtcggaactcacggaactctcccacaacttacacgcgtacgactcggtaactggggtgccgggcgacgagactgaatgtagtaaaactgtctccacttgggcatacacggcagaaagtttgcaaggctacatggcagccaaacttcttggcagaaatctgacggtgcccagtcgctatctctttttgaatgcaattgcaaatcagctccggtacccaaatagccacactcactacttcagttgcaccatgctgtacctttttgcagaggccaatacggaagccatccaagaacagatcacaagttggtacgtgaaaggatataaagttaagccaatgcttactggcattcggaaaaattttaccaatttacatgtgaactag

SEQ ID NO: 118181 - DNA, 399 bp, Homo sapiens
atggcttgggaaaagaggaaagagaactggggggcatcggaaaagcccagtgtctgggggaggcgggagagcatccatggcgggtgggaggaccgggacagcacactggccgcccggggggtcacctgcgacgttcggcggcggcaagccaaggtggtagtgctgccacagcccctgcaggaaagctgcgctgctattcatgcagcggtgcttggaactggtgatgagccgcaagcggacgaagtttcactgcttgaaagggcccggaagagcgaggccagacgcagcggcagctgttggaaatactgccgtccttttttactagactgccgtcattcagatcgggtccacaaaagccagtcggcagcgcttaacccagttggggtggcggtattctag

SEQ ID NO: 118182 - DNA, 957 bp, Homo sapiens
atggccaacgtctgtaatcccagcactttgggaggcagaggcgggcggatcacaaggaggcccgaggacccaggcagccccgtttattcagtccccccagcttcataccaccctaagccatggctgggagctcagccggctacagttgtgacccctggggtcaacgtgaccttgagatgccgggcaccccaacccgcttggagatttggacttttcaagcctggagagatcgctccccttctcttccgggatgtgtcctccgagctggcagaattctttctggaggaggtgactccagcccaagggggaatttaccgctgctgctaccgaaggccagactgggggccgggtgtctggtcccagcccagcgatgtcctggagctgctggtgacagaggagctgccgcggccgtcgctggtggcgctgcccgggccggtggtgggtcctggcgccaacgtgagcctgcgctgcgcgggccgcctgcggaacatgagcttcgtgctgtaccgcgagggcgtggcggccccgctgcagtaccgccactccgcgcagccctgggccgacttcacgctgctgggcgcccgcgcccccggcacctacagctgctactatcacacgccctccgcgccctacgtgctgtcgcagcgcagcgaggtgctggtcatcagctgggaagactctggctcctccgactacacccgggggaacctagtccgcctggggctggccgggctggtcctcatctccctgggcgcgctggtcacttttgactggcgcagtcagaaccgcgctcctgctgttcccccaggtaccacatcgagcaactactccctgggtaacttcgtacgactgggtctggctgccgtaattgtggttatcatgggagctttcctggtggaggcctggtacagccggaatgtgtctccaggtgaatcagaggccttcaaaccagagtga

SEQ ID NO: 118183 - DNA, 270 bp, Homo sapiens
tgtgtcatcattagtggagagagtggagctgggaagacagtggcagccaaatatatcatgggctacatctccaaggtgtctggcggaggcgagaaggtccagcacgtcaaagatatcatcctgcagtccaacccgctgctcgaggccttcggcaacgccaagactgtgcgcaacaacaattccagccgctttggcaagtactttgagatccagttcagccgaggtggggagccagatggtggcaagatctccaacttcttgctggagaag

SEQ ID NO: 118184 - DNA, 919 bp, Homo sapiens
ataagaatgtccaggaaaattctgccctacaggcagcaatgtgccggaaaatgcttatcgtctgtcagacccagtgtgtcatcattagtggagagagtggagctgggaagtcagtggcagccaaatatatcatgggctacatctccaaggtgtctggcggaggcgagaaggtccaggtgagacgaggaaaacagaaggataagctgggtcgccctcacctgcatggtagtgcagccccacccatctgcactcctgcctcagtgtgacttcttcccactccacctgcctctgccccagcacgtcaaagatatcatcctgcagtccaacccgctgctcgaggccttcggcaacgccaagactgtgcgcaacaacaattccagccgctttctgctggaagggcctcccaggagcaaaggcagaacctgggcctcatgacaccggactactatactacctcaaccaatcggacacctaccaggtggacggcacggacgacaaagcgactttggccaaccacaacctccgggagctggacttgagtttcacgacctgggagactggggcctgtggttgctggctgaggggctgcaacatccgcctgcagactccagaaactgtggcctcacggagactggggccactcaacgggtacgggcaccctagtccggaaggagacagccccagcgtcaaaggcgggaagtctgtccagataggagagattgtagaaaaaagacacaagacaaagagagagaagaaaaggcagctgggcctgggggacactaccaccaagacgtggagaccggtagtggccccgaatgcgtggccggccgttatttattgtatacgaggcaaaagggcaggaaggcggagccaggtgtgcgagcggaacgtgaaagtggaccaggagcgtgaccgctga

SEQ ID NO: 118185 - DNA, 466 bp, Homo sapiens
atggccgcgcgctctgcccgccccgcctcctcgctgcgggaagggtcctgggccccgggcggcggtcgccaggtctcagggccgggggtacccgagggtgacgctaaggtggggccgagcctcgaccgggtgcgcctagaggtcgagtgctgccgccctccgctgggtctggacagttctcggcggcgacaccagctcaaaacggcctccccgccctccgcggacctgggtcgcgcccaggaatccgatccaaggctgtgaggcctgtccctttgggaagggtgggtgtttatttccgggatgcactcagagcctctggacagtcaggtcggaaactttgctgtattgggaacactctgtcacctacttccttctcagttgggaaggaagtgccaagaaaacatgaaacaaaccaaaaacacgaaaaagggattctctgtatggaagccgtgaagcctcaaaaata

SEQ ID NO: 118186 - DNA, 1647 bp, Homo sapiens
atgtggcgctggttatacgctggtgcgcggatgacggtacgtgataaacagccattggagcaaatgctggcaggctgtactcacgcttcactggtgccaacacaactctggcgtttgctggttaaccgtagttccgtttccctgaaagcggtgttacttggcggcgcggctatcccggtcgagttgacggaacaggcgcgcgacatggggattcgttgcttttgcggctatggtctgaccgagtttgcctccacggtgtgtgcgaaagaagccgacggcctggcagacgttggttcgccgctgccgggtcgggaagtgaaaatcgttaataatgaagtgtggctgcgggctgccagtatggcagaaggttactggcgtaacgggcaactggtttcactggttaatgacgaaggctggtacgctacgcgcgatcgccgtgagatgcataatggcaagctgaccattgtcggacgtttagacaatctattcttcagtggcggagagggtattcagccggaagaagtcgagcgcgtaattgctgcacatcctgcggttttgcaggtgtttatcgtccccgttgccgacaaggagttttgtcatcgaccggtggcggtgatggagtatgaccacgagagcgttgatcttagtgaatgggtgaaagataagctggcccgttttcaacacctggtgcgctggctaactctgcccgcggagcctaaaaacggcggtattaaatttcacgtcagcgctaaaagagtgggtgcactaaccacgcggatggaagccgcacagcaacatgctgacgataaaattcgccagatgattaacagcgagcagcgcctcagtgagcagtttgaaaacctcgccaaccgtatttttgagcacagcaatcgccgggttgatgagcaaaaccgtcagagtctgaacagcctgttgtcgccgctacgtgaacaactggacggtttccgccgtcagttcaggacagcttcgttaatgaaagtagccggatgggattacctgatgaattcactctacaacgcgaattcgagcgcgctcgtcaacagggtgcgctacaaatggattgcggcttttgaaggtggtttcactggtatcgtcgccaccctggataccggtcgccccggtccggtgatggctttccgtgtcgatatggacgcgctggatctcagtgaagagcaggatgtcagccatcgcccctaccgcgacggttttgcgtcatgtaacgccggaatgatgcatgcctgtggtcatgatggacataccgccattgggcttgggctggcgcatacccttaaacagttcgagtccggactacatggcgtcatcaaactgatttttcagcctgcagaggaaggtacgcgtggcgcgcgggcgatggtcgatgcaggtgtcgtagatgatgttgattattttactgccgtgcacattggcactggcgtacctgcgggcactgttgtgtgcggcagtgataattttatggcaaccaccaaatttgacgcgcacttcaccggtaccgccgctcacgcaggcgcaaaaccagaagacggtcacaatgccttgttggcggcacacaagccactcttgcactgcatgcaatcgccccgcacagcgaaggagcttccagagtaa

SEQ ID NO: 118187 - DNA, 1812 bp, Homo sapiens
ctacccaggaagataactctgccctggagaaagcggcatgttctcttcatcacgacgataggcacaggtaacgtgcttcgctccctggcgcacggacgtacgcacgcagtccatcgcagtgtcgccaccgccaaggaccaccacgcggaccgcaggcatggaagttccaaacccgtgtgcgctgatgtctgtaggtgtgagcctgtcgcatgggccgtagtacacatgcttgggcgctgtcggtgggcggggctcgccctcgtgcggggcttcagcaggtttgtggttgttgccgcccgtgtgatggcaggtgttgggaactaaagaattttcaaggtttgtggagctgtgccctgtgtggtacgggccgttgttagtcttgctttcaacatagcggaactgcaccaccgtcagcacgatgacgaggaacatcaacaccaccgactgtgcggcagacgaagccagatccagtccggtaaaaccttcgcggtagatcttataaatcagcgtcgtggtggcctgaaccggcccgccggacgtggcggcgtcgatcaccgggaaggtgtcgaagaaggcatacaccaggttcactaccagcaggaagaaactcaccggggcgataagcggcagcgcaatcttaaagaagcggcgaatcggccctgcaccgtcgatggctgcggcttcgatcaacgaacggggaatggattgcagcgcggcatagaagaacaggaagttgtagctgatttgcttccatactgaggcaaacaccaccagaaacattgcctgaccgctgttttgcgcgtggttccagtcgtagccgaactccgcgagaaaatgggtgatcagcccgcgaccggggttaaacaggaagatccacaatacggcggcaacggcgggagccacggcgtaaggcagcaacattaaggtttgatagaaacggctgccgcgcacgatgtactccaccagcgccgcaaagaacagcgataccagcaaaccgctgacggtgacaaaggtgctgaattttatcgtcgtccagaaggagtcgagatagtagctgtcatggaacagcgtgacgaagttatccaggccgacaaactggctggagaaaccaaacggatcgacgctttgtagcgagtaccacaacgcttcgcccgcaggccagataaaaaagataacggtgatgatgagctgcggcgcgaccagcagataaggcagccagcgcgagcggaacaccggacgggatgatgacattacggttaattcctgaactgtgccggatgcgcttcgcttatccggcttcgtcgatttctcaaagcggcgcagcaactgatttccacgctcaacggcggtatccagtgcctgctgtggtgtcttcttaccggtccacacgctctccagctcttcatccacaatcacgcggatctgcggcatgttgcccagacgcagccctttggtgaacggcaacggcggcttattcagcatctgacgcgtcgcggtatccgcccctgggtttttctcataaaagccctgctcacgggtcaggtcatacgctgctttggtgattggcagataaccggttttctgatgccactcggcagcgttttctggcttcgcgaggaaatcgaggaacttcgccacaccggtatacgtttctttatctttaccctgcatcacccacaggctggctccggcgataatggcgtttaggggggatctttcgctcggggtctccgccattgtgtgtccgcccgagttattatccctcgttaatgtgtgccgcttcatattacttgttcgatcatccaggatcat

SEQ ID NO: 118188 - DNA, 2340 bp, Homo sapiens
atggggcttgatgatggcgtggcgcgcaatctcgggctggccttgtcgcttgcgcgtctggcagacgctgtcgctggcgatgtcatcagtgcgctgctggtgaacgctgtggggattatcgggcttatcgggttgttcgcgaccgctgtggccaaaattgtgggggagcggtggttcgccagacgccattttttcgatattgcgccgtggatggaggaaatcgccatcaagaaacgcggcatgaagttgatgcgccacttcactggcgaccgcagatttgccgctgcccgatacgcccatcaagacgtaaatgtggtgatcatggttagtcgtgctcaaagtggtgcccccacaatacaagaattaaaaatgttacgggtaactgttatcggtaacattgtccagccggacaatatcagaagcaatatccatccatgccttaagtgtataagtattcgccacgaatacgcgccagcaggcgttcagcgccaatactgcccatccgctcacgcggcgtcagcacgctcgcaagtcgtggctccatcacctgaccaatgtcatgaccgtggaaaccggcaatcgccatatcgtcaggaacttttaaccccagacgctgacattcaaacgccgcgccgaccgccaggtcatcattcgtacagaacacgccatccagctgcggatattcccgccgcgcctggcgaatcagttcaataccggaagaaacagaccgaacttcataccggaatattcaatgtggtaaccatccgccagttcctgctcggcttccggctggtcaaacgggtgacggtgacataccgccacgcccgcgatggcaaagcccgcaaacagcaccgcgtaaaccgccagacctgccatcatcaggaagaacaaaatcccgatgttcaggtcggcaaccacccaacccggactgactggcacaatcgcaaaggccagcagcagcgaggtaaaggcaatcatcggtgccagggtaaagatgacgcgatccgagaatttcgggatccagtcttctttaaagaacattttgatcatgtccgcaaccagctggagcgaaccgccccagccaacacggttaggtccgtaacggttctggaacagacccagcaggcgacgttcgccaaagctcatgaatgccccgcaggtgacaaccaccagcaggatcaccaccgctttgaggatgatcctcaagatgcgcgccagccagcaccggagcatgccgacatttcctcggaagccacctgcctggcggcaggcctcggcgaattcaccggggcgggacgggatatgggcggtctgggcttctggtacaagtggaacctcggctggatgcatgacaccctggactacatgaagctcgacccggtttatcgtcagtatcatcacgataaactgaccttcgggattctctacaactacactgaaaacttcgtcctgccgttgtcgcatgatgaagtggtccacggtaaaaaatcgattctcgaccgcatgccgggcgacgcatggcagaaattcgcgaacctgcgcgcctactatggctggatgtgggcattcccgggcaagaaactactgttcatgggtaacgaatttgcccagagccgcgagtggaaccatgacgccagcctcgactggcatctgttggaaggcggcgataactggcaccacggtgtccagcgtctggtgcgcgatctgaacctcacctaccgccaccataaagcaatgcatgaactggattttgacccgtacggctttgaatggctggtggtggatgacaaagaacgctcggtgctgatctttgtgcgtcgcgataaagagggtaacgaaatcatcgttgccagtaactttacgccggtaccgcgtcatgattatcgcttcggcataaaccagccgggcaaatggcgtgaaatcctcaataccgattccatgcactatcacggcagtaatgcaggcaatggcggcacggtacacagcgatgagattgccagccacgttcgtcagcattcactaagcctgacgctaccaccgctggccactatctggctgggcacagtggcgacatttggcacggttatctgccggatgcgcgcccgggtttgcgttatggttatcgcgttcatggccctgcaacccgccgaggggcatcgcttaacccgcgaagagcgtctaacagtcgccatctctaaggccttcagattcaggcaacgctattcgaagcggagtagactctccattcgcactcggcaagacgttagtgtcatcattgtccacggcttaccattgcatgacaaggctaaaccacatgacggcaacgtgaacgactcttaa

SEQ ID NO: 118189 - DNA, 3201 bp, Homo sapiens
tcatcggcgcggcatagacggcctgtttatccagcgcgccgcgacaaacgccacgtacagcgggaagaggatcaccgcgatcccgggatcagcatggtatggcttgctttcaacatagcggaactgcaccaccgtcagacgatgacgaggaacatcaacaccaccgactgtgcggcagacgaagccaatccagtccggtaaaaccttcgcggtagatcgggcgataagcggcagcgcaatcttaaagaagcggcgaatcggccctgcacgtcgatggctgcggcttcgatcacgaacggggaatggattgcagcgcgcatagaagaacaggaagttgtagctgtatgcttccagtaggaccgcgattggcgattgccggtttccacggtcatgacattggtcaggtgatggagcccgacttgcgagcgtgctgacgccgcgtgagcggatgggcagtattggcgtgaacgcctgctggcgcgtattcgtggcgaatgtcttgatgggcgtatcgggcagcggcaaatctgcggcgccagtgaagtggcgcatcaacttcatgccgcgtttcttgatggcgattcctccatccacggcgcaatatcgaaaaaatggcgtctggcgaaccactaatgacgacgatcgcaaccgtggttgcaggcgcgaacgacgccgcgtatctatgcagcgcactaataaagtgtctaaatcgtggttggtccagctagtccctcgcccgggaattttcccgaccacccgtcctggacctttggaagcttctcccacttctttctggtcgattggcatccgtttcatggtgtgtgccccgggaagccctgcatcgaccatcgcccgcgcgccacgcgtaccttcctctgcagctgaaaaatcagctttgatgacgaccatgtagtcacggacatcgaactttcccgtcatcagtaaaaagtgtgacccggttccggccttcggtcgcgctgttggtgctgctcggtctgctcgccgccctctcgcgctttcctccggtcgtccgcggctcggtgctcgttcgcgctcttcctgtgccactccgttggccgcgtgcttcgccagccgtgctggtctcgctttccgtcgctctgtccgcttcttcttcgttactacccgttcctgctcactgtcgtcctcgccctgtcctcctcctgtctccgccgctggtcggtctcggatcgtggctgtcctcctgccttctcttgtgttgctgctaccctctctatacgacgcacccccgctctctggccctgcagttggtgtattctctactcgtcgtgtggtctgtcgcgtggtggtctcttgccacggcattgatgtggttcgtgcgtgtggcttgttcgcttcgtgactatcagttgtccgtgggtagtgtggtgtcttgttctgtgttgattctctttgtgtgtgtgtggtgtgtcttggtgtctccgtgtgtgtttggcttgttctgttccgttggttgttggctgtcgcgttctggctctcgtgttttggtctattggtgtttggtctgctgtgtgtgggcggtttctttgctctgtgcgtggtctccttgctcggttgttcatgctgtcgcttgggggctatcgtactggctggtcccgtgtggtctctgcttgcgtgtggctcggtgctgtttgtttggttgtaggcttgtagggcaatgtagtaaagttggcctgtggaaactcccagtatagtcgagtatatgttggacagtgtgaagtctggaaggatgctctggtcacacgggcaaacgctgcaaggcccattcgttgtgactgcgcctgatatgttccggtattcgatgtcggtagccacgtcgtaccgggttctcaccaccagctggccggcacctactcggcgtggatcctcccgtgtcttgttctcaaacttcaaggctgaggctgaggggcttggtggtttggcaggactggcggtcttgggtgggtgcagggactctccctggactgtgtgaacgaggtattggcatccggcagctgtcccagtccctgctccctgccattgtggagcggctgaggacgccaagtggcgggtgcggctggccatcattgagtacatgccctcctggctggacagctggtgagtgaggaggccttggaacccttggtttctcctgtagggagtgagttctttgatgagaaacttaactccttgtgcatggcctggcttgtggtcatggtgagtaccttcacaggagcagcaagaggagatgggagctccagaaggcaggatggattggctggggctgtggcggtcagtggaggaggctaggtcactccccacgccgctggatgctcgtatggaccagctcgcatgcttgtagagtcctagagaagtgttgagtgggaggaggacgaaacagatcacccggggttgcctgctgggttgaagatggcaatggtgacgccgtccgtgacggatggggcattggacgccgactgtcaggccagccaggcgatgcggcgtaagcaacaaccggaatgactggcagcatgatgctgcgacagctgacgcggacaggcagatgaacatgccggtgattgcatgcgggcgctggtggctggcagggcgcaggagatgaatggggcacagggcaaaacgttgttgaaagggtggggatgaagcgagcgcccggcgcggaactgaaaactgaagatttgctgcgaggaagacacccgcgatgatgcaatgatagcctggatgccgcgatgacccggagtgctgccacgggcagatgcgtgggcaaacgtgctgaaccatggcgttggctggaaaaaagcgcagttgaagtgccacgtggatggccacaggtgcagcaatgatggcgtggggatgaaagcggcaaacagcaatgcagccgtggcgcacacggttgtgctgctgaatagcggtggcgacgctacccagacgccgcgttcccaatatcgtcaccgttgtccgtagggaagtgtgtgtcaccatggtcatagcatagttttggatgtgggacagtggtagtggtggtgtcgtgttgtgttcaagtagtggaaggtcgttgacgtcgtggtcagccaccaaggtgcgtggtagggtcacaagggtagatggtgtagtcgtcaaggcgtcacgtgtcaagtccgtcacggcggtcacgtagcaccccat

SEQ ID NO: 118190 - DNA, 1944 bp, Homo sapiens
cggttctcactcttgacgttgtccagctccagcaccttggcaactcccccagcttggacggccggcccgccgctccatgggggagtcatctgagcacagctgctggccgcagtctgacaggaaagggacggagccaagatggcggcggccgacggcgacgactcgctgtaccccatcgcggtgctcatagacgaactccgcaatgaggacgttcagcttcgcctcaacagcatcaagaagctgtccaccatcgccttggcccttggggttgaaaggacccgaagtgagcttctgcctttccttacagataccatctatgatgaagatgaggtcctcctggccctggcagaacagctgggaaccttcactaccctggtgggaggcccagagtacgtgcactgcctgctgccaccgctggagtcgctggccacagtggaggagacagtggtgcgggacaaggcagtggagtccttacgggccatctcacacgagcactcgccctctgacctggaggcgcactttgtgccgctagtgaagcggctggcgggcggcgactggttcacctcccgcacctcggcctgcggcctcttctccgtctgctacccccgagtgtccagtgctgtgaaggcggaacttcgacagtacttccggaacctgtgctcagatgacacccccatggtgcggcgggccgcagcctccaagctgggggagtttgccaaggtgctggagctggacaacgtcaagagtgagatcatccccatgttctccaacctggcctctgacgagcaggactcggtgcggctgctggcggtggaggcgtgcgtgaacatcgcccagcttctgccccaggaggatctggaggccctggtgatgcccactctgcgccaggccgctgaagacaagtcctgggccgtccgctacatggtggctgacaagttcacagagcttccagaaagccagtggggcctgagatcaccaagacagacctggtccctgccttccagaacctgatgaaagactgtgaggccgaggtgagggccgcagcctcccacaaaggtcaaaagagttctgtgaaaacctctcagctgactgtcgggagaatgggaacatgttccaaaattttgccttgattcaaggagcttgtgtccgatgccaaccaacatgtcaagtctgccctggcctcagtcatcatgggtctctctcccatcttgggacaaaggacaacaccatgcgcagacacctgctttgcccctcttgcctggctcagactgaaggatgagtgccctgaggttacggctgaacatcatctctaaccctggactgtgtgaacgaggtgattggcatccggcagctgtcccagttccctgctccctgccattgtggagctggctgaggacgccaagtggcgggttgcggctgggccatcattgagtacatgcccctcctggctggacagctgggaagtggagttctttgatgagaaacttaactccttgtgcaatggcctggcttgtggatcatgtatatgccatccgcgaagcaagccaccagcaaccctaaagaagcttagtggaaaagtttgggaaggagtgggcccatgccacaatcatccccaaggtcttggccatgtaaagagacacccaactacctgcacctgatgactacgctcttctgcatcaatgtgctgtctgaagtctgtgggcaggacatcaccaccaagcacatgttacccacggttctgcgcatggctggggacccggttgccaatgtccgcttcaatgtggccaagtctctgcagaagatagggcccatcctggacaacagcaccttgcagagtgaagtcaagcccatcctagagaagctgacccaggaccaggatgtggacgtcaaatactttgcccaggaggctctgactgttctgtctctcgcctgatgctggaagag

SEQ ID NO: 118191 - DNA, 1359 bp, Homo sapiens
ctaagcacacatacatgctttcaatactgaaaccagtgcgcacatccgcactcccgcctccggctcccgcacagacgctgtgcacgcagctctctcgcgtgtcttctcgtttgctctaagaccacccttccaggtggggattgcggcatccactgggatgagccaggccagggcctgcagccctgggagcctcgggtggatgcagcgtagctcattcacaccaggcgccggccgtgtgcggcacataccgaactgctgcagggagtacacggcgtcctgcatgtggatccagaagcgcagccgccccagtgagaccttgtcgtaggacacggtgaggggcagctcggtggtggagcggtttatgacggcgctgagcttggcctgcagagccctgccagggccgtaagcagccccaggccccagcatcacccggcgtttcacaatcagtgctgaactcaaagacacgaggttgccagagaacatgtggtccctctcgtgtgcactcacgccatcgcggtgcccgacaggggtgctgcggtgaggcccaccaggcgcagggatgctgcggcccctccgagcccacttgttggagatgtcacactgcagtgccccagccagtgaaggggctccaatgcacctgaccaggtacgcctgccgtgtgtgggttagaggcccaggtccagcctccagcgctctggcctgagcgtcttcagtgcagacggcagcacttctgggcctgagccggcctctgggaggaaggatgctggctggccagcgcgtgtgcttcgttttggcaccttgtccagaggcgctcccgaggctggtgctgactggggtccgtacagtcctggcagtccaggcgcagcagcgtccggggctccgtggcttggacaacctcaggctctgcagggggcaggcggccagctggtgggatctgagaatggtgaacgggggacaggaaccaagccccgtgtgagtgtgagtgttgcttatggtgaaatagcccttcccgctgacacaagctggagctcccgtgcaggggctgccgtgctcctgggtctgagccggagcacaggtggtgagggccccgggaacatgggacacgggggacagtcgcagatgctgacattggaggtcctctgactctgccatcaggacactgcttgaattcctctcttgaacacagagctgcttccctgtggccactttccgttggactgcgcccgtctcttgatttcttctactgttttcctgcgagaatcctggtctgaccgggacacgaacacaggccgtatatactggatcagaggatggggacctgcagggcgtggccggctggagcccatggccagcagccat

SEQ ID NO: 118192 - DNA, 588 bp, Homo sapiens
  misc_feature (1)...(588): n = a,t,c or g
atggaggncccacttgaaatggagctcaatcttataagtatagaagtctggggtgagcgtctaggaatttcaacaggcactgagaaaatgcccactctgaagcacagaacatggcctgtggaatgctcgaaagcttccagcctggagggcgacctgagatccctgactgattggaagtcatttccgctttttcagcagacccagcctcagctgatgattcacctggttgctggaagaagaaagatgactgctcgatggtacacctccacagacaggaatggcagcagcaacaatgctgtcaatgaaagtaaaggaagcaaccaccaggagagcgaaggaataaatgtgggagccacccagtctgtggtactgtgctatggcagccttagcaaactcatccagatctcttcctgtcctacggtgggctgtccaccttcccacagctccttcagcatcctcgatggggccaatgctggccaagagaagcagagcacgaccgaaccagagcccgcgctcttcctcctgccacccagccgtggagcatttggaccctttgggctgctgtctgatctaagacggcagctctga

SEQ ID NO: 118193 - DNA, 477 bp, Homo sapiens
atgctggggggctccaggcctctgttctttgtggtgcatcaggctctggccctaggaagagttctctttagatgtcagcagccccctcccttgtttccaaagccagattgcaagtggctcttaaccattgacgataacttctgtggcctggacatgaatgctcccctgggagtgtccgacatggtgcgtggaattcccgtcttcacggaggacagggaccgcatgacgtctgtcatcgcatatgtctacaagaaccactctctggcctttgtgggcaccaaaagtggcaagctgaagaagagaaggcatacgcagacaatgcacatcagagacctgttggagcggctctgtggtgggttacaagggggcggcagcaatacagaaaacacgaccatgatcttggctctcattagactatgcaacagatgtgccagcgtctcctctcttcttatttgtgtccagtgctacccaatgtga

SEQ ID NO: 118194 - DNA, 612 bp, Homo sapiens
ctatgcagctgtagtttgttcattcttattgctgtgtagcattccgttgtgtgggtacaccaacattgacttttccatgttattgttgatgaacatttgaataactttcagtttttgccttctatgaacagtgctgcccttgatactctcatgcaggtcttctggtgaccatatatattcacatttctgttggaaatatacctgcttctcttggccagcattggccccatcgaggatgctgaaggagctgtgggaaggtggacagcccaccgtaggacaggaagagatctggatgagtttgctaaggctgccatagcacagtaccacagactgggtggctcccacatttattccttcgctctcctggtggttgcttcctttactttcattgacagcattgttgctgctgccattcatcccgatcccatctctcctagtaacttctgtgcgagcctgagcaagttgcatggcctctgtggatatcagtgtgctcacctgtatgtggaggtgtaccatagagcagtcatcttccttcctctgcctcctcacccctttatgggagtagagctggtgccatgtgaccaggatctgtccgttcatctctttgggcat

SEQ ID NO: 118195 - DNA, 1314 bp, Homo sapiens
atgggaagaccagatctgattttgtcttccatcctggggctcagatggctgctgctgccccagagcagcagggcaggaagaaggggagccatcagagaggcttcagatgctgagcaggtcaccttctctggagggacagtgcctgcccgcacctcttctgggagggagtggaggagcctgctggggccagatatggagaccacatccctcttctgtatagatacgaagaccacattcctctttgtgtatagatacggagaccacatccctcttgtgcctgagcagagcggcctggagcccctgctcatctgggctgacccagggcttttccacgtgaggcttttccacctcttaaccattgacgataacttctgtggcctggacatgaatgctcccctgggagtgtccgacatggtgcgtggaattcccgtcttcacggaggacagggaccgcatgacgtctgtcatcgcatatgtctacaagaaccactctctggcctttgtgggcaccaaaagtggcaagctgaagaagggaggtcaagtgcagcaccatgagtttgggatcaggacacccccaggagcctgggccagcaaggcgctcagagacaaccctcctgaggcagtgtgtttataccttcttccaattaaactgaaggtgcccccacagtactgcccgaagagagctaaggactggggggtttattccaactcggtcacaccaggatggattgaggagtgcagccagatgtacccaaggaaccacccagtgagccagctggagctgtgtgcatgtgtgtgcaagtgtgagagccatgtgcagttactgctgatggcattagaggggacaggaataaaacatggtcgttatttggatgggtccttaggtgacttcactccaatccaaggaccaagctctggggatcagaagtccaaaataggattcactggcctgaaaccaagctgcacgcttgatgcacaatttcgaagcccagaaagaaaggtcagggtggtacttctacagcctcaggctgccacccagtgcagggatacacagaacctgcttctcttggccagcattggccccatcgaggatgctgaaggagctgtgggaaggtggacagcccaccggccatttcccaggcagcttcttgttaaagccaagaaatgcccctcacagaacccaagccccttttcttgcaagggtgataagtcagcttttggctttgtggtttgcaaattaactgcaaagaaaatggagaggcttcttgttgttgttcttaagaaggcaatgcagaagcaggaacaagaactttga

SEQ ID NO: 118196 - DNA, 237 bp, Homo sapiens
atgaaattttggtgccatgactcggatcaggggacctcccttgggagatcaatcccctatcctcctgctcttcgctctgtgagaaagatccacctaccacctcaagtcctcagaccaactagcccaaggaacatcacaccaattttcaatcagagacaggagacgagttttatccgtggacccaaaacttcagcaccggtcacggactcgggaagacagtcttcccttggtgtttaa

SEQ ID NO: 118197 - DNA, 1779 bp, Homo sapiens
tcagtagaagcagacggtgtgaagaaagctttttcctgccttctcctccatttgcaagagcagctcctccagattgtcttccatgtcgtctgactgctgcaggcactggcaaatctcacagatgaggaaagctcccagggtggcatcttccagggtatcttggatgtccatgttgatcacgtgcacaggctgaaaggtctgctgttctctggaacacagatcttccaccactgtgtcatagacactctcctcacaggtgaagatgacatcaaaggaatcagtgcactcctgaaatctttctggaccgggcttgattctctcatttcttcccaagatgtgtaagattccgttgcgggtgtagcattctctatctttcctgaggaggtcattgtacatctccttatatgttgttgcaaaatcataaactacaggacgattgggtcttggtcctggtagcctcacatgagattcagttccaaaagaccggacacttatcccttttctcctgaggatgctgtgggcctccatgctcctgttgacattgctcacgcacaccacatccaccctgagtgtggaggatagcatgatggtggccacttccattgtgagagttacccagagcatctgtgatggtcctgtaggcttccgaggtgatcgggcaatgtcagtcttcagctggaaggcgaggttaattagatcctgttgtggggtttgagggccggaatttaatttttgaagttttttcctaatgttgggagtggactgggtgataaaatgcatattaagaataaggcggccctctggcccttctgggtctagggcagtaaagcgtctaagggtcactgctaagtgggccatgtactgggctgggttttcatctttaccttgggtagtttctttcagcttgtcataattaacagctttgtaagctggggaatctgcctgatagttccattggggatcctctcgaggaactgctctaataccttcctggaggtctggctcatgaagccggtggttatcagcatgagattgggctctgaaacgtggatgaataatcaggtgtccccgtgtgattaaacaccaagggaagagtgtcttcccgagtccatgaccggcgctgaagttttgggtccacggataaaactcatctcctgtcttgggcagtatggccattttcacgatattgattcttcctacccatgagcatggaatgttcttccatttgtttgtgtcctcttttatttccttgagcagtggtttgtagttctccttgaagaggtccttcacatcccttgtaggttggattcctaggtattttattcttgctttgaatgtgtcccagagattctggtatgttgtgtctttgtgctcgttggtttcaaagaacatctttatttctgccttcgtttcattatgtacccagtagtcattcaggagcaggttgttcagtttccatgtagttgagcggttttgagtgagtttcttaatcctgagttctagtttgattgcactgtggtctgagagacagtttgttataatttctgttcttttacttttgctgaggagtgctttacttccaactatgtggtcaattttggaataagtgcggtgtggtgctgagaagaatgtatattctgttgatttggggtggagagttctgtagatgtctattaggtccacttggtgcagagctgagttcaattcctggatattcttgttaactttctgtctcattgatctgtctaatgttgacagtggggtgttaaagtctcccat

SEQ ID NO: 118198 - DNA, 654 bp, Homo sapiens
caagggttgctttacctccccaggccctgacctccagcctctgactccccagcaccatcagactgctagtctttgcataactgtttagcttcacagctgctgctttccattcaggtgctgagaatcttgccctgaacatgcacagctaaggaattggcaaactcctcaaggggaatcagcacgctgaattttggcccaattttctctaaggctgcctcttctatctcaggtctcagactccatggtatccctgaactgcaacttctttattcctagcctgctgagtttcactcgcgtccatgtgaagaaattttggtgccatgactcggatcaggggacctcccttgggagatcaatcccctgtcctcctgctctttgctccgtgagaaagatccacctacgacctcaggtcctcagaccaaccagcccaagaaacatctcaccaattttaaatcaggtaagcggcctcttcttactctcttctccaacctctctcactgtccctcaacaactttcttctttccattcttcaatctctcccttctcttaatttcaattcctttcattttctggtagagacaaaggagacacgttttatctgtggacccaaaactccggcgctggtcacggactgggaaggcagccttcccttgg

SEQ ID NO: 118199 - DNA, 468 bp, Homo sapiens
  misc_feature (1)...(468): n = a,t,c or g
gcgtcacattcttggcagacactccagcatagtggaaggtattcaaggtcatctgggtggcaggttctccaagggactgcgcagccagagcccccaccatttccccgggatgcgcaatggcttggttgaacttggactcaatctccccaagcagccagtcgaaggcctcccctctgagccagctgacgtgcccagagacttcttacacaggatgcccatgatcagctccccattctccaccaccaccttggtgtccccaggagagatgtgcttgtaagggccactgtcttcatcatcgggatgggtgctgtgggtacggatacaattgatgtgaccaggtatgatagggagaagacttgcttgcctgtccacaagggcaaaggctttaggatgccggctgtgggaccttcccatcccncgtcgncccgggnnttccggnccggtccgaaggtcatcaaggcttcaaan

SEQ ID NO: 118200 - DNA, 436 bp, Homo sapiens
  misc_feature (1)...(436): n = a,t,c or g
gtcgattcttacgaggaagtgcaagtatggcatggagatccccaccatatccccggcctgggggctgctggacccaccggcatgttctttggttcagcacccagtcccatgggtggaatctctcctgccatgacaccttggaaccagggtgcaacccctgcctatggcgcctggtcccccagtgttgggagtggaatgaccccaggggcagccggcttctctcccccaaaggctcaacctactctcccacttcccctggttactcgcccaccagccccacctacagtctcacaagcccggctatcagcccggatgacagtgacgaggagaactgagggcacgtggggtgcggcagcgggctagggcccagggcagcttgcccgtgctgccgtgcagttcttgcctccctcacggngcgtcacccccagcccagctc

SEQ ID NO: 118201 - DNA, 1260 bp, Homo sapiens
  misc_feature (1)...(1260): n = a,t,c or g
atggacaacaagttcggtgtggaacaacctgagggtgacgaggatctgaccaaagaaaagggccatggtggctgtgggcggtaccagcccaggatccggcgttctggcctagagctgtatgcggaatggaagcacgttaatgaggactctcaggagaagaagatcctgctgagtccagagcgagtgcatgagatcttcaaacgcatctcagatgaggangatgacctgactcacaaactggctgacatcgtgaagatcaacaatcagctgcggcgcaatgagcagaacggcgcagcggcccatgtcattgcagaggatgtgaagctcctccagttccatgtggccaccatgngcaagcaaatcttctccctcatcatacctggtcacatcaattgtatccgtacccacagcacccatcccgatgatgaagacagtggcccttacaagcacatctctcctggggacaccaaggtggtggtggagaatggggagctgatcatgggcatcctgtgtaagaagtctctgggcacgtcagctggctccctggtccacatctcctacctagagatgggtcatgacatcactcgcctcttctactccaacattcagactgtcattaacaactggctcctcatcgaggggaacactctgcggcagacgtttgagaatcaggtgaaccgcattcttaacgatgcccgagacaagactggctcctctgctcagaaatccctgtctgaatacaacaacttcaagtctatggtcgtgtccggagctaaaggttccaagattaacatctcccaggatgactacgggcctgagagccgtggctttgtggagaactcctacctagccggcctcacacccactgagttctttttccacgccatggggggtcgtgaggggctcattgacacggctgtcaagactgctgagactggatacatccagcggcggctgatcaagtccatggagtcagtgatggtgaagtacgacgcgactgtgcggaactccatcaaccaggaggacctggtgaaggacgtgctgagcaacgcacacatccagaacgagttggagcgggaatttgagcggatgcgggaggatcgggaggtgctcagggtcatcttcccaactggagacagcaaggtcgtcctcccctgtaacctgctgcggatgatctggaatgctcagaaaatcttccacatcaacccacgccttccctccgacctgcaccccatcaaagtggtggaggaaatttattaa

SEQ ID NO: 118202 - DNA, 543 bp, Homo sapiens
  misc_feature (1)...(543): n = a,t,c or g
ttatacatgtgacacgctgacttctaggacccccattacctcttgcatcttgttctcatcgctgttcatgatgcgaatacggagcaccagcttctctgcattgtcatcattaaagatgcagttcaagtcgtcaccaaaaccagcattgatcttttcagcaatctgctccatggtgagcttccggtcagtcatgtgcttccgatccagctccacccgcaacagccagggggagattcgggccacatcaaagtcaggcatttcatagtagacattcacccattcctgatcctctgccaccaccgtgctctgggggttggggtcatagtagatggncttggctctctcagcatctcgagcggactggcccaacaggaagacagtaagcgaaggagtctttggcttcttggaaatgttgatgagctccttaagtcggggcacacccagcgtcacattcttggcagacacaccagcatagtggaaggtattcaaggtcatctgggtggcaggttctccaagggactgcgcagccagagcccccaccat

SEQ ID NO: 118203 - DNA, 3276 bp, Homo sapiens
  misc_feature (1)...(3276): n = a,t,c or g
atggatgatgatgtctntcctgcgctgcantcgagtccanacatgctgacagatatgaccctgcagggcatcgagcagatcagcaaggtgtacatgcacttgccacagacagacaacaagaagaagatcatcatcacggaggatggggaattcaaggccctgcaggagtggatcctggagacggacggcgtgagcttgatgcgggtgctgagtgagaaggacgtggaccccgtacgcaccacgtccaatgacattgtggagatcttcacggtgctgggcattgaagccgtgcggaaggccctggagcgggagctgtaccacgtggacgtgcttatggaagcagccgcacacgggagtggaatgaccccaggggcagccggcttctctcccagtgctgcgtcagatgccagcggcttcagcccaggttactcccctgcctggtctcccacaccgggctccccggggtccccaggtccctcaagcccctacatcccttcaccaggtctagttcaccgccgggaccctcgcttttctccccaggcagagctcttggtgcttcgtgatgggattcgcgagggctccctggatctggggcatgcacccctgggtccctacgcccggggacctcactacgatgccggcttcacactcctagtgcccatgttttcactggacggcactgaactgcaactggacctggaatcctgttacgcacaggtctgcctcccagagatggtgtgcggaacccccatccgggagatgtggcaggattgcttaggacccccagtcccaggagcacgtgattcgatccaccgaacggagagcgaagaaagttccaaggactggcaaagctctgtagaccagccgcacagctacgtcactgagcacgaggcgccgcggcgcgtgtgtccccgcggcaccaagtccctttgccagaagcagctcctcatcctgctgtccaagctacctcgccagccagccctctatgcgccctcctcctgtgacctgcgcttcaagaacggagctgggcacccctcccataacccccgcgccactccgaaatcgggtcccctcccaccccccatatccttgccgcatttcacagctgagtgtcgctttaaggagtgtgtctttgagaattactacgtcctgtacgcctctgctctctaccgccagcgtcgttctggccgggcctggtacctcggcctggacaaggagggccagacctcccaaactccaccagcgctgactggttctctggcagctctagtgactctctcctccatccaggtcacctacttccccttcgactggcagaattgcactatggtgttcagctcctacagctacgacagctcggaggtgagaaggtacccagaggcctacacctctccccctgcttcttccccaccccgggtcctggagttgccaggagtcccagcagctgcgttttctgatgtcctcaacttcatctacagcgcccggctcgcactgcctggtggtggaggggacggggcagctgtagcagagattggagctttggggcgccgtctgggcatctcccgccttcagggcctgggggagggaggtgatgcctggtgtggaaaaagcttcatccatcccaaacggctgcagacccatgaggcccagtgccgacgaggggccagcacgcgggggtctacagggctgggagctgggggcgctggccctggtggtcctgcaggggtggacgcctcagccctgcctccaccagtgggcttccgagggggccccgagcacgtggtgaagcgttcctacgtgaccctgtccagtctgaagagacacagcaatgtacactcgtggcggaggaagtacccctgccgctattgtgagaaagtgtttgctctggcggagtaccgcacgaagcatgaagtgtggcacacgggggagcgcagtgagaagacacccaatggaggctacaagcccaagctcaatacactcaagctctaccgcctgctccccatgcgggcagccaagcggccctacaagacctacagccagggagccccggaggctcccctttctccaaccctcaacacaccggcccctgtngcaatgccagccagcccgccgcctgggcctccacctgccccagagcctggccctccaccctctgtcatcacttttgcccacccagccccctctgtcattgtccatgggggcagtagcagtggtggaggggggagtgggacggccagcacaggagggtcccaagctgcctcggttatcacttacactgctcccccgaggccacccaagaaacgagaatacccacctcctccccctgagcctgcagccacacccaccagcccagccacagcagtcagcccagccaccgctgcagggccagccatcgccaccaccacggaggaggccaagggccggaatccacgggctggaaggactctgacttacacagccaagccagtgggcgggattggtggaggtgggggtccccccacaggggctggccggggcccctctcagctgcaggctccacctccactgtgtcagatcactgtgcgaataggggaggaggccatcgtcaagcgccgcatctcagagactgacctgcgtcctggggagctgagcggagaggagatggaggagagtgaggaggacgaagaggaggaggacgaagaggaggaggaggaggatgaggaggaatcaaaggctggtggggaggaccagctctggaggccctactactcctacaagcctaagcgcaaggctggagctgctggagctgccctgagccgccacgggcagaggcatgctgctgagcggcccgggggcaccccaacccctgtcattgcctattccaagggcagcgctggcaccaggcccggggatgtcaaggaggaagccccccaagagatgcaagtctcctcatccagcgggggtgaggagcccccagtagtggcaagcgggggcagctatgtatacccacctgtgcaggaatttccactggccttgattgggggcggccgggaacctggcggtggcaggggaaaatctgggagtgaagggccagtgggggctggtgagggggatcggatggaggggataggggctgccaaagtcactttctaccctgagccctacccgctcgtctatggcccccagctccttgccgcctacccttacaacttcagtaacttggccgctctcccggttgctctcaacatggtcctacctgatgagaaggtgttacggagggatgggcaggtaaactaa

SEQ ID NO: 118204 - DNA, 2976 bp, Homo sapiens
  misc_feature (1)...(2976): n = a,t,c or g
atggctggagctctgaggggcccaggctccctgagccaggaggagaggagaaagtccaaggaaagatgcctccgctggcaccagtgctgccagccctctgatgccaccaatggcctgctggtggccctgctgggccgggcctacttctatgccctgctcaacgtcctcagcattggatgtgcctacagtgcggttcaggtggtgcccgctggcaacgctgccactgttcgcaaaggttcttccaccgtctgctccgccgtcctcaccctctgccttgagagccagggtctcagtggctacgactgcgcatgcccgctgcgcaccatcaagagagtccagttcggagtcctgagtccggatgaactgaagcgaatgtctgtgacggagggtggcatcaaatacccagagacgactgagggaggccgccccaagcttggggggctgatggacccgaggcagggggtgattgagcggactggccgctgccaaacatgtgcaggaaacatgacagagtgtcctggccactttggccacattgaactggccaagcctgtgtttcacgtgggcttcctgaacaacccaaagatcaaggatatcctggctaagtccaagggacagcccaagaagcggctcacacatgtctacgacctttgcaagggcaaaaacatatgcgagggtggggaggagatggacaacaagttcggtgtggaacaacctgagggtgacgaggatctgaccaaagaaaagggccatggtggctgtgggcggtaccagcccaggatccggcgttctggcctagagctgtatgcggaatggaagcacgttaatgaggactctcaggagaagaagatcctgctgagtccagagcgagtgcatgagatcttcaaacgcatctcagatgaggagtgttttgtgctgggcatggagccccgctatgcacggccagagtggatgattgtcacagtgctgcctgtgcccccgctctcncgccacaaacgtgtttctgaatctataaatgatagtgggcagtcctgcctcctggggtggtgtgaggatgagagctgtgctgtgtgcctgtccctgaagcagcggttgaagggcaaggaaggccgggtgcgagggaacctgatgggcaaaagagtggacttctcggcccgtactgtcatcacccccgaccccaacctctccattgaccaggttggcgtgccccgctccattgctgccaacatgacctttgcggagattgtcacccccttcaacattgacagcgtgacaactccgtacaatgcagactttgacggggatgagatgaacttgcacctgccacagtctctggagacgcgagcagagatccaggagctggccatggttcctcgcatgattgtcaccccccagagcaatcggcctgtcatgggtattgtgcaggacacactcacagcagtgcgcaaattcaccaagagagacgtcttcctggagcggggtgaagtgatgaacctcctgatgttcctgtcgacgtgggatgggnaaggcaagcaaatcttctccctcatcatacctggtcacatcaattgtatccgtacccacagcacccatcccgatgatgaagacagtggcccttacaagcacatctctcctggggacaccaagactgtcattaacaactggctcctcatcgagggtcatactattggcattggggactccattgctgattctaagacttaccaggacattcagaacactattaagaaggccaagcaggacgtaatagaggtcatcgagaaggcacacaacaatgagctggagcccaccccagggaacactctgcggcagacgtttgagaatcaggtcattgctgtcgttggacagcagaacgtcgagggcaagcggattccatttggcttcaagcaccggactctgcctcacttcatcaaggatgactacgggcctgagagccgcgagagcgttgagttccagaacctgggtacgcttaagccttccaacaaggcttttgagaagaagttccgctttgattataccaatgagagggccctgcggcgcactctgcaggaggacctggtgaaggacgtgctgagcaacgcacacatccagaacgagttggagcgggaatttgagcggatgcgggaggatcgggaggtgctcagggtcatcttcccaactggagacagcaaggtcgtcctcccctgtaacctgctgcggatgatctggaatgctcagaaaatcttccacatcaacccacgccttccctccgacctgcaccccatcaaagtggtggagggagtcaaggaattgagcaagaagctggtgattgtgaatggggatgacccactaagtcgacaggcccaggaaaatgccacgctgctcttcaacatccacnctgcgtcccttggagaacctgccacccagatgaccttgaataccttccactatgctggtgtgtctgccaagaatgtgacgctgggtgtgccccgacttaaggagctcatcaacatttccaagaagccaaagactccttcgcttactgtcttcctgttgggccagtccgctcgagatgctgagagagccaaggatattctgtgccgtctggagcatacaacgttgaggaaggtgactgccaacacagccatctactatgaccccaacccccagagcacggtggtggcagaggatcaggaatgggtgaatgtctactatgaaatgcctgactttgatgtggcccgaatctccccctggctgttgcgggtggagctggatcggaagcacatgactgaccggaagctcaccatggagcagattgctgaaaagatcaatgctggttttggtgacgacttgaactgcatctttaatgatgacaatgcagagaagctggtgctccgtattcgcatcatgaacagcgatgagaacaagatgcaagaggtaatgggggtcctagaagtcagcgtgtcacatgtataa

SEQ ID NO: 118205 - DNA, 940 bp, Homo sapiens
  misc_feature (1)...(940): n = a,t,c or g
atgggggatntgtctgtagttctgcggccgctgctggtggttgcagcagcgacggcgacaacgccggtggcggcggcggcggcgacgaacacagcgaagaagactgctactgtgatggttggagaaatggtggcaggagaaagaggagtactgcagatgggtcatgacatcactcgcttcttctactccaacattcagactgtcattaacaactggctcctcatcgagggtcatactattggcattggggactccattgctgattctaagacttaccaggacattcagaacactattaagaaggccaagcaggacgtaatagagacgtttgagaatcaggtgccccgcattcttaacgatgcccgagacaagactggctcctctgctcagaaatccctgtctgaatacaataacttcaagtctatggtcgtgtccggagctaaaggttccaagattaacatctcccaggggggggggtcccagggagggagggggggtcccccgatcagcatgtggctcctggcgctgtgtctggtggggctggcgggggctcaacgcgggggagggggtcccggcggcggcgccccgggcggccccggcctgggcctcggcagcctcggcgaggagcgcttcccggtggtgaacacggcctacgggcgagtgcgcggtgtgcggcgcgagctcaacaacgagatcctgggccccgtcgtgcagttcttgggcgtgccctacgccacgccgcccctgggcgcccgccgcttccagccgcctgaggcgcccgcctcgtggcccggcgtgcgcaacgccaccaccctgccgcccgcctgcccgcagaacctgcacggggcgctgcccgccatcatgctgcctgtgtggttcaccgacaacttggaggcggccgccacctacggggggtgctttagagtccccaaaaaggcgt

SEQ ID NO: 118206 - DNA, 1386 bp, Homo sapiens
  misc_feature (1)...(1386): n = a,t,c or g
ttatacatgtgacacgctgacttctaggacccccattacctcttgcatcttgttctcatcgctgttcatgatgcgaatacggagcaccagcttctctgcattgtcatcattaaagatgcagttcaagtcgtcaccaaaacggggcaagccaggcagctcattgtccaccatggtggccacatggaactggaggagcttcacatcctctgcaatgacatgggccgctgcgccgttctgctcattgcgccgcagctgattgttgatcttcacgatgtcagccagtttgtgagtcaggtcatcctggttacgggcagagccctgcatcacaacagcaggccgcacggagagcgggggcacaggcagcactgtgacaatcatccactctggccgtgcatagcggggctccatgcccagcacaaaacactcctcatctgagatgcgtttgaagatctcatgcactcgctctggactcagcaggatcttcttctcctgagagtcctcattaacgtgcttccattccgcatacaactctaggccagaaacgccgatcctgggctggtaccgcccacagccaccatggccccgtgtgcggctgcttccataagcacgtccacctgactgtcccatcaccacagcccagctgcccaaagtgtgtgcccttcttctcacactactccctccttctgccctattcagaaattccactgtttccgtttcctcaaaggaacacttcatgagtggtcctgtgtcctggcggttgactccgtgtcgggtgatggccatcaagtggccacgacaggtcatggtatcacacaagagagccaagtgtcggtaattgacataggagccatcaaaggagatgacgtggtacagctcccgctccagggccttccgcacggcttcaatgcccagcacggggttcacgttcttctcactcagcacccgcatcaagctcacgccgtccgtttccaggatccactcctgcaggccttggattcccatctgcccgctttccagtcgggaaacctgtcgtgccagctgcattaatgaatcggccaacgcgcggggagaggcggtttgcgtattgggcgccagggtggtttttcttttcaccagtgagacgggcaacagctgattgcccttcaccgcctggccctgagagagttgcagcaagcggtccacgctggtttgccccagcaggcgaaaatcctgtttgatggtggttccgaaatcggcaaaatccccagtcttggcgaagttggtccagtaggtcatgaccacggcactgagcatgacgtcgttcttggagaagttcaggggaagaggtcngtggcacccaccatgggcacgccaaaacataaggcagttcatccccgtgcgccgcat

SEQ ID NO: 118207 - DNA, 402 bp, Homo sapiens
tccctgaagcagcggttgaagggcaaggaaggccgggtgcgagggaacctgatgggcaaaagagtggacttctcggcccgtactgtcatcacccccgaccccaacctctccattgaccaggttggcgtgccccgctccattgctgccaacatgacctttgcggagattgtcacccccttcaacattgacagcgtgacaactccgtacaatgcagactttgacggggatgagatgaacttgcacctgccacagtctctggagacgcgagcagagatccaggagctggccatggttcctcgcatgattgtcaccccccagagcaatcggcctgtcatgggtattgtgcaggacacactcacagcagtgcgcaaattcaccaagagagacgtcttcctggagcgg

SEQ ID NO: 118208 - DNA, 802 bp, Homo sapiens
gtggtggtggagaatggggagctgatcatgggcatcctgtgtaagaagtctctgggcacgtcagctggctccctggtccacatctcctacctagagatgggtcatgacatcactcgcctcttctactccaacattcagactgtcattaacaactggctcctcatcgaggggaacactctgcggcagacgtttgagaatcaggtgaaccgcattcttaacgatgcccgagacaagactggctcctctgctcagaaatccctgtctgaatacaacaacttcaagtctatggtcgtgtccggagctaaaggttccaagattaacatctcccaggggggggggtcccagggagggagggggggtcccccgatcagcatgtggctcctggcgctgtgtctggtggggctggcgggggctcaacgcgggggagggggtcccggcggcggcgccccgggcggccccggcctgggcctcggcagcctcggcgaggagcgcttcccggtggtgaacacggcctacgggcgagtgcgcggtgtgcggcgcgagctcaacaacgagatcctgggccccgtcgtgcagttcttgggcgtgccctacgccacgccgcccctgggcgcccgccgcttccagccgcctgaggcgcccgcctcgtggcccggcgtgcgcaacgccaccaccctgccgcccgcctgcccgcagaacctgcacggggcgctgcccgccatcatgctgcctgtgtggttcaccgacaacttggaggcggccgccacctacggggggtgctttagagtccccaaaaaggcgt

SEQ ID NO: 118209 - DNA, 384 bp, Homo sapiens
aaggcgtgggttgatgtggaagattttctgagcattccagatcatccgcagcaggttacaggggaggacgaccttgctgtctccagttgggaagatgaccctgagcacctcccgatcctcccgcatccgctcaaattcccgctccaactcgttctggatgtgtgcgttgctcagcacgtccttcaccaggtcctcctgcagagtgcgccgcagggccctctcattggtataatcaaagcggaacctggaagtgcaaggggtagctagtggacaggtgggctctgggaccttggtccccacaaaacgcactgtaccggttcccaaaggtgcacagccgaccaggtacagtggtttggaggcaagaatcctggacagagaaaaatt

SEQ ID NO: 118210 - DNA, 518 bp, Homo sapiens
ggtcccccagtgttgggagtggaatgaccccaggggcagccggcttctctcccagtgctgcgtcagatgccagcggcttcagcccaggttactcccctgcctggtctcccaaaccgggggtccccggggtcccccaggtcccctcaaagccccttaaatcccttcacccaggtggagttgtccgccatctgtcaggccaggtttgtttcctccacagttctgggtgagtctgtccattgctcatctcctttgttggctgcttccccacaggtggtgccatgtctcccagctactcgccaacgtcacctgccttacgagccccgctctcctgggggctacacaccccagagtccctcttattcccccacttcaccctcctactcccctacctctccatcctattctccaaccagtcccaactatagtcccacatcacccagctattcgccaacgtcacccagctactcaccgacctccggcagctactcacccacttccccaagttactcacccaccaa

SEQ ID NO: 118211 - DNA, 6798 bp, Homo sapiens
  misc_feature (1)...(6798): n = a,t,c or g
gagagcgcggccgggacggttggagaagaaggcggctccccggaagggggagagacaaactgccgtaacctctgccgttcaggaacccggttacttatttattcgttaccctttttcttcttcctcccccaaaaaccttttccttttcccttctttttttttcctttttgggagctgaaaaatttccggtaagggaaagaagggctcctttcgctccttatttcgccgcctccttccctccgccaccttcccctcctccggctttttcctcccaactcggggaggtccttcccggtggccgccctgacgaggtctgagcacctaggcggaggcggcgcaggctttttgtagtgaggtttgcgcctgcgcagcgcgcctgcctccgccatgcacgggggtggccccccctcgggggacagcgcatgcccgctgcgcaccatcaagagagtccagttcggagtctctgagtccggatgaactgtttcgaatgtttgtgacggagggtggcatcaaatacccagagacgactgagggaggccgccccaagcttggggggctgatggacccgaggcagggggtgatagaccgcactggccgatgccaaacatgtgcaggaaacatgacagagtgtcctggccactttggccacattgaactggccaagcctgtgtttcacgtgggcttcctggtgaagaccaagaaagacttgcgctgtgtctgcttcttctgctccaaactgcttgtggactctaacaacccaaagatcaaggatatcctggctaagtccaagggacagcccaagaagcggctcacacatgtctacgaccttttgaagggcaaaaacatatgcgagggtggggaggagatggacaacaagttcggtgtggaacaacctgagggtgacgaggatctgaccaaagaaaagggccatggtggctgtgggcggtaccagcccaggatccggcgttctggcctagagctgtatgcggaatggaagcacgttaatgaggactctcaggagaagaagatcctgctgagtccagagcgagtgcatgagatcttcaaacgcatctcagatgaggagtgttttgtgctgggcatggagccccgctatgcacggccagagtggatgattgtcacagtgctgcctgtgcccccgctctccgtgcggcctgctgttgtgatgcagggctctgcccgtaaccaggatgacctgactcacaaactggctgacatcgtgaagatcaacaatcagctgcggcgcaatgagcagaacggcgcagcggcccatgtcattgcagaggatgtgaagctcctccagttccatgtggccaccatggtggacaacgagctgcctggcttgccccgtgccatgcaaaagttctgggcgtcccctcaagtccctaaagcagtggttaaagggcaaggaaggccgggtgcgagggaacttgatgggcaaaagagtggacttctcgggccgcactgtcatcaccgccgaccccaacctctccattgaccaggttggcgtgccccgctccattgctgccaacatgacctttgcggagattgtcacccccttcaacattgacagacttcaagaactagtgcgcagggggaacagccagtacccaggcgccaagtacatcatccgagacaatggtgatcgcattgacttgcgtttccaccccaagcccagtgaccttcacctgcagaccggctataaggtgaaacggcacatgtgtgatggggacattgttatcttcaaccggcagccaactctgcacaaaatgtccatgatggggcatcgggtccgcattctcccatggtctacctttcgcttgaatcttagcgtgacaactccgtacaatgcagactttgacggggatgagatgaacttgcacctgccacagtctctggagacgcgagcagagatccaggagctggccatggttcctcgcatgattgtcaccccccagagcaatcggcctgtcatgggtattgtgcaggacacactcacagcagtgcgcaaattcaccaagagagacgtcttcctggagcggggtgaagtgatgaacctcctgatgttcctgtcgacgtgggatgggaaggtcccacagccggccatcctaaagccccggcccctgtggacaggcaagcaaatcttctccctcatcatacctggtcacatcaattgtatccgtacccacagcacccatcccgatgatgaagacagtggcccttacaagcacatctctcctggggacaccaaggtggtggtggagaatggggagctgatcatgggcatcctgtgtaagaagtctctgggcacgtcagctggctccctggtccacatctcctacctagagatgggtcatgacatcactcgcctcttctactccaacattcagactgtcattaacaactggctcctcatcgagggtcatactattggcattggggactccattgctgattctaagacttaccaggacattcagaacactattaagaaggccaagcaggacgtaatagaggtcatcgagaaggcacacaacaatgagctggagcccaccccagggaacactctgcggcagacgtttgagaatcaggtgaaccgcattcttaacgatgcccgagacaagactggctcctctgctcagaaatccctgtctgaatacaacaacttcaagtctatggtcgtgtccggagctaaaggttccaagattaacatctcccaggtcattgctgtcgttggacagcagaacgtcgagggcaagcggattccatttggcttcaagcaccggactctgcctcacttcatcaaggatgactacgggcctgagagccgtggctttgtggagaactcctacctagccggcctcacacccactgagttctttttccacgccatggggggtcgtgaggggctcattgacacggctgtcaagactgctgagactggatacatccagcggcggctgatcaagtccatggagtcagtgatggtgaagtacgacgcgactgtgcggaactccatcaaccaggtggtgcagctgcgctacggcgaagacggcctggcaggcgagagcgttgagttccagaacctggctacgcttaagccttccaacaaggcttttgagaagaagttccgactttgattataccaatgagagggccctgcggcgcactctgcaggaggacctggtgaaggacgtgctgagcaacgcacacatccagaacgagttggagcgggaatttgagcggatgcgggaggatcgggaggtgctcagggtcatcttcccaactggagacagcaaggtcgtcctcccctgtaacctgctgcggatgatctggaatgctcagaaaatcttccacatcaacccacgccttccctccgacctgcaccccatcaaagtggtggagggagtcaaggaattgagcaagaagctggtgattgtgaatggggatgacccactaagtcgacaggcccaggaaaatgccacgctgctcttcaacatccacctgcggtccacgttgtgttccccgccgcatggcagaggagtgttcggctcagtggggaggccttcgactggctgcttggggagattgagtccaagttcaaccaagccattgcgcatcccggggaaaaggtgggggctctggctgcgcagtcccttggagaacctgccacccagatgaccttgaataccttccactatgctggtgtgtctgccaagaatgtgacgctgggtgtgccccgacttaaggagctcatcaacatttccaagaagccaaagactccttcgcttactgtcttcctgttgggccagtccgctcgagatgctgagagagccaaggatattctgtgccgtctggagcataccacgttgaggaaggtgactgccaacacagccatctactatgaccccaacccccagagcacggtggtggcagaggatcaggaatgggtgaatgtctactatgaaatgcctgactttgatgtggcccgaatctccccctggctgttgcgggtggagctggatcggaagcacatgactgaccggaagctcaccatggagcagattgctgaaaagatcaatgctggttttggtgacgacttgaactgcatctttaatgatgacaatgcagagaagctggtgctccgtattcgcatcatgaacagcgatgagaacaagatgcaagaggaggaagaggtggtggacaagatggatgatgatgtcttcctgcgctgcatcgagtccaacatgctgacagatatgaccctgcagggcatcgagcagatcagcaaggtgtacatgcacttgccacagacagacaacaagaagaagatcatcatcacggaggatggggaattcaaggccctgcaggagtggatcctggagacggacggcgtgagcttgatgcgggtgctgagtgagaaggacgtggaccccgtacgcaccacgtccaatgacattgtggagatcttcacggtgctgggcattgaagccgtgcggaaggccctggagcgggagctgtaccacgtcatctcctttgatggctcctatgtcaattaccgacacttggctctcttgtgtgataccatgacctgtcgtggccacttgatggccatcacccgacacggagtcaaccgccaggacacaggaccactcatgaagtgttcctttgaggaaacggtggacgtgcttatggaagcagccgcacacggtgagagtgaccccatgaagggggtctctgagaatatcatgctgggccagctggctccggccggcactggctgctttgacctcctgcttgatgcagagaagtgcaagtatggcatggagatccccaccaatatccccggcctgggggctgctggacccaccnggcatgttctttggttcagcacccagtcccatgggtggaatctctcctgccatgacaccttggaaccangggtgcaaccccttgcctatggggcctgggtcccccagtgttgggacgtggaatgaccccaaggggcaagccggcttctctcccaagtgctgcgtcagattgccaagcggtttcaagccaaggttactccccttgccttggtcttcccacacccgggctccccgggggtccccaggttccctcaagcccctacatcccttcaccaggtggcgccatgtctcccagctactcgccaacgtcacctgcctacgagccccgctctcctgggggctacacaccccagagtccctcttattcccccacttcaccctcctactcccctacctctccatcctattctccaaccagtcccaactatagtcccacatcacccagctattcgccaacgtcacccagctactcaccgacctctcccagctactcacccacctctcccagctactcgcccacctctcccagctattcgcccacctctcccagctactcacccacttcccctagctattcgcccacttcccctagctactcgccaacgtctcccagctactcgccgacatctcccagctactcgccaacttcacccagctattctcccacttctcccagctactcacctacctctccaagctattcacccacctcccccagctactcacccacttccccaagttactcacccaccagcccgaactattctccaaccagtcccaattacaccccaacatcacccagctacagcccgacatcacccagctattcccctactagtcccaactacacacctaccagccctaactacagcccaacctctccaagctactctccaacatcacccagctattccccgacctcaccaagttactccccttccagcccacgatacacaccacagtctccaacctataccccaagctcacccagctacagccccagttcgcccagctacagcccaacctcacccaagtacaccccaaccagtccttcttatagtcccagctccccagagtataccccaacctctcccaagtactcacctaccagtcccaaatattcacccacctctcccaagtactcgcctaccagtcccacctattcacccaccaccccaaaatactccccaacatctcctacttattccccaacctctccagtctacaccccaacctctcccaagtactcacctactagccccacttactcgcccacttcccccaagtacttggccccaccagcccccaccttactcgcccaccttcccccaaaggctcaacctacttctcccacttcccctgtttattggcccaacaagccaccactacaattctcacaaggccgccttttcagccccggatgacagtgacgaggagaactgagggcacgtggggtgcggcaagcgggctagggcccagggcagcttgcccgtggctgccgtgcagttctctgccctctcaacggggcgtcaacccccagcccagctccgttggtacataaaagcccttgtggcagagctcccgggtgaactttctggattcccgtttctgatgcagattcttgtcttgttctccaacttgtgctgttaaaactcacgtggcccaggtggtgttctcactcctaccccaccccaccccctgcctgtccccaaattgaagatccttcccttgcctgtggcttcgatgcggggcgggtaaagggtattttaacttaggggtagttcctgctgtgagtggttacagctgatcctcgggaagaacaaagctaaagctgccttttgtctgttattttatttttttgaagtttaaataaagtttactaattttgaccaaaaaaaaaaaaaaaaaa

SEQ ID NO: 118212 - DNA, 910 bp, Homo sapiens
  misc_feature (1)...(910): n = a,t,c or g
attgactttacagaagtaaaaccacaccgggctgggtacaaataccttctagtactggtagacaccttctctggatggactgaagcatttgctaccaaaaacgaaactgtcaatatggtagttaagtttttactcaatgaaatcatccctcgacatgggctgcctgttgccatagggtctgataatggaccggccttcgccttgtctatagtttagtcagtcagtaaggcgttaaacattcaatggaagctccattgtgcctatcgaccccagagctctgggcaagtagaacgcatgaactgcaccctaaaaaacactcttacaaaattaatcttataaaccggtgtaaattgtgtaagtctccttcctttagccctacttagagtaaggtgcaccccttactgggctgggttcttaccttttgaaatcatgtatgggagggtgctgcctatcttgcctaagctaagagatgcccaattggcaaaaatatcacaaactaatttattacagtacctacagtctccccaacaggtacaagatatcatcctgccacttgttcgaggaacccatcccaatccaattcctgaacagacagggccctgccattcattcccgccaggtgacctgttgtttgttaaaaagttccagagagaaggactccctcctgcttggaagagacctcacaccgtcatcacgatgccaacggctctgaaggtggatggcnnnnnnnnnnnnnnnnnnnnnnnnnnnnnnnnnnnnnnnnnnnnnnnnnnnnnnnnnnnnnnnnnnnnnnnnnnnnnnnnnnnnnnnnnnnnnnnnnnnnnnnnnnnnnnnnnnnnnnnnnnnnnnnnnnnnnncttaattttgtaaaacaatgcatagcttctgtcaaacttatgtatcttaagaa

SEQ ID NO: 118213 - DNA, 3042 bp, Homo sapiens
atggactcagagacccggagaacagcgaaagtgagacttttaatgacggtcttgagagatcaagatcgggtgtctggcgtgcaggcacacccagaacagtttcaacaagcaatttgtcccctatgtggcgtttctctaactcgctcgggtacaacatttggaagccccagcgagatatattcgccactgggcgagagccgggctagctccgggctcccccggagggacggccggcttataggcgaggagccacctgaaaaaaaattttccaggtccccgaaaggcgaccgtcttccggaggacagcggatcgactaccgtgtgtgtgtgcccacaaaattcaacctctgagtcctcagcttctgaccccggggtcagggcgctggaggacagagccctggtttttctgttaggcgccttttggttctggtttggtcttctgggacctttgtttagaacgggaaataacaaaaattgttataaactctttgtgaatgtgtgcacgactgaggagtccaggggcctgcctctggatccccagtttgtagctccacggcgaaagctacggagttcgagaaagatccgagtggccctttttcctcctcatccctaccacttaccccgtacatctcgttttcccgtgtcacagcaagttcagcgtctccaggacttggctctgctctcactcctcaaactcttaaaagaaaaggccgaatttgagctatttgcctttgagtcgtggagacaccaaaagtatttaggctacaggtccagggaaagagggaggacgcctaggtccatccagccaaggagacctaaggtcgttttgagccagaccgcacttccgcctggaccctcagtctgttcggctcaccctgtactgcctccctctgaagaagaggagagtctcccccactcagttccgccgccttataaccgtcctgctcccttagaatcttcccttgtctcctcgactacatcccctgtaggctcgccgcctattgcctctcgattgcggccgcggcaggaggaagtagccccccctctaccgcggaaagaagcacaagtccctccgggtgatgagcgctcagccccattcttggtttatgtccctttttctccttctgacctctgtaactggaaggctcataatcctcccttctctgaaaagccccaggtcttgatctcactgatggagtctgtgctccggacccatcggcccacctgggatgactgtcagcagctccttttgaccctttttacctctgaagagagggaacatatccgaagagaggccagaaagtatttcctcacatcagccaataggccagaggaggaagctagagactttcttgaggaggtctttccctctacccggcctaactggcacacgaattcctcgggtaggaagaaagctttggacgattttcaccggtatctccttgcagaacgcctccaggaggcctatcggacttacacctcttttgacccggcggctcccgaaaatagccgtgctcttaatttggcatttgtggctcaggcagcccctgatattaaaagaaaactccaaaaactggagggatttcctgggatgaatatcactcagcttttagagatagcccaaaaagtttttgacaatcgagagtttgaaaaaagaaaacaaacagcacaggcagcagctgataaagcatacaaaagacaagcaaaaatcttagctgcggccatcggagaggagcccacggtgaccgctacagtgaggggccagcctgtacgcttcctagtagctaccggggcggagcactcggtactacagacccccttgggcagtgtctctaataaaagagtggctgtacaaaggtctactggagctattcaggaatatcctgtcacacactcacgagaagagctcgggtatcgagtctcagccaagaaggtccagctttgtcttcccacagtgtcctacctaggatacgacataagccaaggaaaaagggcactcaccagtgcccggaaagaagccatcctacgaatccccactcccaccaccaagagacaggcggtagcagctttctcaaaacagggagtacgaaaggctggtgcagccattactacaaagacagatgtgctatgggcccaggctttaccggcaaatacctcggcacaaaaagctgaattgatcgccctcactcaggctctccgatggggtaaggataaacttattaacatttacactgacagcaggagcgtgggcacctcagcaggaaagactatcaaaaacaaagaagaaattctagccctgcttgaagccgtatggctccctcagcaggtggctgtaatccactgcaaaggacatccaggagaaaacacggccattgcccgtggtaaccagaaagctgactcagcggcccgggatgcagccagacttccagtcatgcctctaaacttattacccacagtctcctttccacagccagatctgccctacaatcccgcgtactcaacggaagaaaaaaaactagcttcagatctcagggccaataaaaatcaggaagtactagtagacaccttctccgtatggactgaggcatttgccaccaagaatgagactgccaccatggtagttaggtttttactcaatgaaatcatccctcgacatgggctgcctgctgccatagggtctgataacggactggccttcacctcgtccatagctcagtcagtcagtaaggcattacacattcaatggaagctccattgtgcctatcgaccccagagctctgggcaggtacaagatatcatccagccacttttccgaggagcccatcccaatccggttcctgaccagatggggccctgccactcattccagccaggtgacctggtgtttgttaaaaagttccagagagaaggactcactcctgcttacataggacctcatactgtcatcctcaccatgccaacagctctgaaggtggatggcattcctgcttggattcgtcactcccgcatcaaaaaggccaacaaagcccagcaagaaacatag

SEQ ID NO: 118214 - DNA, 772 bp, Homo sapiens
atggtggcgcgcgcctttctgtggtcccaggtaatccggaggctggggcgaaagggtggcctgagccagggagatcgaggctgcaacacagcgctcgccgagggtcgcttggaccctgatcttacccgtgggcaccctgcgctctgcctgccgcgaagaccggctccccgacccgcagaagtcaggagagagggtgaagcggagcagcccgaggcggggcagcctcccggagcagcgccgcgcagagcccgggacaatggggccgcggcggctgctgctggtggccgcctgcttcagtctgtgcggcccgctgttgtctgcccgcacccgggcccgcaggccagttatggattgaggtatatagccaaagtactgaagaattcgatccatgagaaattccccgatgcaacagaagatgagctattaaagattgttggaaacctcctgtactatcggtacatgaatccagccattgtagctccagatggctttgatatcatcgacaatgacagctggagggcagaataattctgaccaaaggaaaaacttacgatcaacggccaaggttcttcagcacgcagcctccaacaagctgtttgaaggagaaaatgagcatctctcatctatgaacaattatttatcagagacgtatcaggaattcaggtttaagaatgttacatttgatatcatagctactgaagatgtaggcattttcgatgtaagatcaaaatttcttggtgttgagatggaaaaggtgcaactcaatattcag

SEQ ID NO: 118215 - DNA, 447 bp, Homo sapiens
atgtccttagctcaggtggcctccctaacttgtggaaaccttaagttataccagttcctattggttttgggagcacgggagccaggcacctctgcccaccaggtgtctattgttggaaacctcctgtactatcggtacatgaatccagccattgtagctccagatggctttgatatcatcgacatgacagctggagaaatactcggagatgagattaaactagatggaaaaggagaacccaaaggggccgaagagagcgaagccacgtcgaagtacactgcagcaaagctgcatgagaaaggtgtcctgctagatatagatgatcttcaaacaaaccagaacgctgtgaatgatttctctgttggcccacaagatgaggttattgttgaagacatcaccaattgctatttgtgtgagatctttaagcggtatgaatgggtgacctga

SEQ ID NO: 118216 - DNA, 571 bp, Homo sapiens
atgctccctgacaagggggcctggatgtccagggagagccaggagggaagcggagactcaagtggagagtgtgtgggagggaacgttgctgggctccacaaaggagggggcaccagggctgactcccaggttcctggtggcatgcgtggaggcaggatgtcctacgaggaccctcacggcagaaggaccgatggggaggagtggccccagagagcagttccttctctgtacccaccagggttcagcagaggctcctgctccaggcagtacagtggggcccacatgcccatcctcactggccacgtgggctggtcagagtccagcctggatccccccagggcaggacaggacaggttcctgggcacagccaggccctgaggtacatcgcataggggtgcctctcagagaaggtgctgcccacccctctccaaaacagggcccaagacgccctgtgggaaaggagcaccatcagcaccatttattccagcaggtcccacatttgaccacaaagcccttatgtgatacccccaacattccaaagaatttcaactccatggaccgtgacccgtga

SEQ ID NO: 118217 - DNA, 1322 bp, Homo sapiens
  misc_feature (1)...(1322): n = a,t,c or g
gggccgccagcccgccgcagtggccccgcaaggcgtgcggagggggcccccccggccgcggcgcgcccccttcttttaccgcacgagaccctcggagcgcccgccggagagacccgaccccggctgccccatcctcgagcgcgagtaccgnncttttgggcccgccaaaggcggtttaaaggggggaccccccagggtttttcccagtccgccgcgttgtaaacccccggccaggcccaaggcttgcattgcctccaggtcggcctctagaggattccagccgcctcggctttccaaaggtgttaggtttccaggcgtgaccccccccgggcggccaaatttggggagcaattttcttaatctcatggagcctcagttttctcttctacaaaaatgagccgacaattgtactactggtcatagagtagtaagaggataagcgaaatctgagtgacattgcctatcaagagcctcgtataaagtccgagaggttcaggtctgtaagtcagagtccgcctcctggtccctaaacgctcattttaatcccgcgcccctccgtgacacgcccctgctgtctgtctccaaggcaacgcccaccagtttcctctccgggattcctttcccgggggcagtctcttttctctcctcacctgccggctcccctccgcgcctccgggggctccctcaggcctccccacggtcatttcagctggccagaggcagcagcgacagtgacagcgatagtggcagcagcggtggcagcgaaagttatgcggggccagggtccacccctttatagattaggcgtagtggttggcttcccaggcagcctcccgatccttttataacccgacctggcggcctgccaagccttggcccttggccggccgttattacaacatcgtcgacttgcgagaaaaccctggccgtttcaccccacattcacccgcctggctgggcgacactacccatccatcatcctccgctctctccctcccgcgcggcaatacgctacaatgtccgtatcccgtgcccctacagcgcgtcgccgctcagcactcagttcctggtagccaatctacccaccttatcagtcatgactgtgtctcctagtctcccggctgatagatgtgcccgcgtttcattccttctgtctcacctgttaacggcctccctagcgcgccacgccgctgcaccccatgcgctacgcgtgcgccgccgctgacctagacgttgctgacctttgtcacatcctcttcactgctcataactcgtctatacctcgccatatacgctgtgtcgtcgacgcgtattccgccccg

SEQ ID NO: 118218 - DNA, 2151 bp, Homo sapiens
gtccggacattacgggtcgacgatttcgtgatggatcggaggctgccctggaagccaaccagacgccacagctataatggggtggaccctggccccgcatagctctcgctgccaccgctgctgccactatcgctgtcactgtcgctgctgcctctgtccagctgaaatgaccgtggggaggcctgagggagcccccggaggcgcggaggggagccggcagatatttccccccgagtccttcgcagacacagaggcaggagaggagctgtccggggatgggctggttttgcccagggccagcaaacttgacgaggtcctcagcccacaggaggagatagatcctacttctgactcaactgggagcatttaccacaccttactggatctggcgcagaaagggagatggttgtctgtttggagtctctctttcagtctgacccagagagtgatgaaaacctctctgaagatgaggaggacctggagagtttcttccaagacaaggacagggggatggtgcaggtccagtgcccgcaggctctgaggtgtggctccacaaggcgctgcagctccctgaacaaccttccctccaacattcccaggcctcagacccagccaccctcaggctcccggcctccctcccagcacagaagcgtcagctcctgggcatcatccattactgtccctcggccattccgcatgacgctgcgcgaggcccggaagaaggccgagtggctgggctcacctgcctcctttgagcaggagaggcagcgggcccagaggcagggtgaggaagaggccgagtgccacaggcagttccgggcacagcctgtgcctgcacatgtctacctgcccctctaccaagagatcatggagcgcagcgaggcccgaaggcaggcagggatccagaagaggaaggaactgctcctctcttctttgaagcccttcagcttcctggagaaggaggagcagctaaaggaagctgctcgacagagagacttggcagccacagctgaagccaagatctccaagcagaaggccaccagaaggattcccaagtccattctggagccagcccttggggataaactccaggaagctgagctcttcaggaaaattcgcatccaaatgagagccctggacatgctccagatggcctcttcccctatcgcctcctctagtaaccgggctaacccacagccccgcacagccacccgaacccagcaggaaaagcttgggtttctgcacactaacttcagattccagcctcgggtgaatcctgtggtccctgactatgagggcctttacaaggccttccagagaagagcagccaaaagaagagaaacccaagaggccactcgcaacaagcccttcttgctgaggaccgccaacctgcgccaccctcagcggccctgtgatgctgccaccaccggaaggaggcaggattccccacagccaccagctacacccctgccaaggagtcgttctctgagcggccttgcttccctctctgccaacactctccctgtgcacatcacagatgccaccaggaagagggaatctgcagtcagaagtgcacttgaaaaaaagaacaaagcagatgagagtattcagtggctggagatacacaaaaagaagtctcaagcaatgtccaaatctgtgaccttgcgtgcaaaagccatggatccccataaaagcctggaggaagtgttcaaagcaaagctgaaagagaaccggaacaatgaccgtaaaagagcgaaagaatataagaaagaactggaggaaatgaagcagcgaatacaaacaaggccctatctctttgaacaagttgccaaggatctagccaagaaagaagcagaacagtggtatctagacaccctgaagcaggctgggctggaggaagactttgtgagaaacaagggtcaaggcacccgggctgttcaagagaaagagaccaaaatcaaggattttcccaggttccaagaaactacaaaactcagcatcagagatccagagcagggtttagaaggatctctagaacagcctgcaagccccaggaaagtactggaggagctgtctcatcagtcaccagaaaatctcgtatcacttgcttaatcactacacttaaaattactgcttttgaaaaataaaaaa

SEQ ID NO: 118219 - DNA, 637 bp, Homo sapiens
gctaatactttgtagtttaaggatttttttccttgatgtatctaattggaaggccgaaagagtcttgtcttttcttttttttgcctgcttcttctgagacatcaaaaaacatcttgatttctgcggagtagatgagatggagaaagatgagacaggcaacagaaatcttaagaggccacaggttaagatggggtactaagcagggagagcaccaaaggaagtaggccaaagtattaatagaagatcctagaacagattaaggcaaatcatttacctgttttccattgccttactatctttctggagccaattacaaactttcctgttttattttaggtctcacaagaatcttttcttatctaagttgcaacatggaacccagcaacaagaccttaataagaaagaaagaagagtaggaactcctcaaagtacaaaaaagaaaaaagaaagcagaagagccactgaaagcagaatacctgtttcaaagagtcagccggtaactcctgaaaaacatcgagctagaaaaagacaggcatggctttgggaagaagacaagaatttgagatctggcgtgaggaaatatggagagggaaactggtctaaaatactgttgcattataaattcaacaaccggaca

SEQ ID NO: 118220 - DNA, 2700 bp, Homo sapiens
ccgggtcgaaccacgcgttcgatggcggaggatgttttcttatcggccccgatcccgcggggctgtgcggatggtagggatgccgaccctactgaggagcatatggcacaaacagagagaaacgacgaggagcagttcgaatgccaggaactgctctagtgccatgtgcaggtgggggcccccgaggaggaggaggaggaggaggaggacgcggtcctggtggccgaggccgaggccgtggctgccggctggatgctcaatttcctctgcctctctctttgccgagctttccgcgaagggcgctccgaggacttccgcaggacccgcaacagcgcagaggctattattcatggactatgcagtctaacagcttgccagttgagaacgatatacatatgtcagtttttgacaagaattgcagcaggaaaaacccttgatgcacagtttgaaaatgatgaacgaattacacccttggaatcagccctgatgatttggggttcaattgaaaaggaacatgacaaacttcatgaagaaatacagaatttaattaaaattcaggctatagctgtttgtatggaaaatggcaactttaaaggagcagaagaagtctttgaaagaatatttggtgatccaaattctccatatgcctttcaaaagcaaattgcttatgataatctctcagaaagatacatttcattccttttttccaacacttcagctacaaccacatgatggagaaaattaagagttatgtggaattatgtgctaagtgaaaaatcatcaacctttctaatgaaggcagcggcaaaagtagtagaaagcaaaaggacaagaacaataacttctcaagataaacctagtggtaatgatgttgaaatggaaactgaagctaatttgggatacaagaaaaagtgttagttgacaaacagtctgcggtaactgaatcctcagagggtacagtatccttattgagggtctcacaagaatcttttcttatctaagttgcaacatggaacccagcaacaagaccttaataagaaagaaagaagagtaggaactcctcaaagtacaaaaaagaaaaaagaaagcagaagagccactgaaagcagaatacctgtttcaaagagtcagccggtaactcctgaaaaacatcgagctagaaaaagacaggcatggctttgggaagaagacaagaatttgagatctggcgtgaggaaatatggagagggaaactggtctaaaatactgttgcattataaattcaacaaccggacaagtgtcatgttaaaagacagatggaggaccatgaagaaactaaaactgatttcctcagacagcgaagactgattgtgtttgtaaaagcttgatgaaaggacagttaagtattttgatcactgcattttgtttgaaacttgtgtcattgatgtaatttaaaacttttgtttaaagcattacagtatttttctgtgacccatcaaataaatgagggtttgtgctaccagagttaaagcatatgctatcattgtattctttaagaaccttattttgataaaatgtaaatttgttgaaccctgccacatttagtatccccacccccaaatcctgttccaatgaaaaaattaaaacctgatacgaaaaaaaaaaaattccagttaacctattttgtgtctgtaggctgacctcaaccctgtaacgtaacccattaaaatgaatttctttttttttaagacagagtttctctctgttgcccaggctggagtgcagtggcgcaatttcagctcactgaacctctgcctcccaggtcaagtgattctcctgcctcagcctctgagtagctgggattacaggcacacaccaccagccagctaatttttgtatttttagtagaggcggggtttcaccatgctggtcaggatgttctccaactcctgacttcatgatccacccacctcggcctcccaaagtgctgagattacagacgtgagccactgcgtcctgcctaaaatgaattttctagatgattgaataacagtagtagtcctttgatagaagataatgacttggtttatggccttaatatactacttaattacttaagatgtttattaatagaatgataaatgtacagagtaacctataagcatgacatacttttgctttcagtagtttcatgtaaagaaaaaaacttgaaaatagtaatacctgagtacccatgggaataatagacactggggaggtagggtggggagcgggacgaagagctgaaaaacttacctactggggactgtgctcactacctgggtgacaggatcatacgtaccccaaacctcaacatcacacagtatactcagctaacaaacctgcccatgtgtttcctgaatctaaaataaaaatcgaaataatttttttaaaaaagaaaaagacaatagtattacccatgggacaaaatttgtactattagcaagaatcattttgtgtctcatttagaaacaatttgacttttgttccagtgtttaaactttgacaaaaatggttttgaatagatctttataacctgatgcctaaatacaagattctctgataccttcatttaatatatcaatattggcctaaaacgtattctgtaaagcttaaattggtattaactatgatcatcttgatgtctatgatagataataaacaaggtcatacataccttaa

SEQ ID NO: 118221 - DNA, 2676 bp, Homo sapiens
attcccgggtcgacgatttcgtgcctgaaggggcagtacccaagcgagccatttaacatggcggaggatgtttcctcagcggccccgagcccgcggggctgtgcggatggtagggatgccgaccctactgaggagcagatggcagaaacagagagaaacgacgaggagcagttcgaacgccaggaactgctcgagtgccaggtgcaggtgggggcccccgaggaggaggaggaggaggaggaggaggacgcgggcctggtggccgaggccgaggccgtggctgccggctggatgctcgatttcctctgcctctctctttgccgagctttccgcgacggccgctccgaggacttccgcaggacccgcaacagcgcagaggctattattcatggactatccagtctaacagcttgccagttgagaacgatatacatatgtcagtttttgacaagaattgcagcaggaaaaacccttgatgcacagtttgaaaatgatgaacgaattacacccttggaatcagccctgatgatttggggttcaattgaaaaggaacatgacaaacttcatgaagaaatacagaatttaattaaaattcaggctatagctgtttgtatggaaaatggcaactttaaagaagcagaagaagtctttgaaagaatatttggtgatccaaattctcatatgcctttcaaaagcaaattgcttatgataatctctcagaaagatacatttcattccttttttcaacacttcagctgacaaccacatgatggagaaaattaagagttatgtgaattatgtgctaagtgaaaaatcatcaacctttctaatgaaggcagcggcaaaagtagtagaaagcaaaaggacaagaacaataacttctcaagataaacctagtggtaatgatgttgaaatggaaactgaagctaatttggatacaagaaaaaggtctcacaagaatcttttcttatctaagttgcaacatggaacccagcaacaagaccttaataagaaagaaagaagagtaggaactcttcaaagtacaaaaaagaaaaaagaaagcagaagagccactgaaagcagaatacctgtttcaaagagtcagccggtaactcctgaaaaacatcgagctagaaaaagacaggcatggctttgggaagaagacaagaatttgagatctggcgtgaggaaatatggagagggaaactggtctaaaatactgttgcattataaattccaacaaccgggacaagtgtcatgtttaaaagccagatggaggaccatgaagaaactaaaactgatttcctcagacagcgaagactggattgtgtttgtaaagctttgatgaaaggacagttaagtattttgatcactgcattttgtttgaaacttgtgtcattgatgtaatttaaaacttttgtttaaagcattacagtatttttctgtgaccatcaattaatgagggtttgtgctaccagagttaaagcatatgctatcattgtattctttaagaaccttattttgataaaatgtaaatttgttgaaccctgccacatttagtatccccacccccaaatcctgttccaatgaaaaaattaaaacctgatacgaaaaaaaaaaaattccagttaacctattttgtgtctgtaggctgacctcaaccctgtaacgtaacccattaaaatgaatttctttttttttaagacagagtttctctctgttgcccaggctggagtgcagtggcgcaatttcagctcactgaacctctgcctcccaggtcaagtgattctcctgcctcagcctctgagtagctgggattacaggcacacaccaccagccagctaatttttgtatttttagtagaggcggggtttcaccatgctggtcaggatgttctccaactcctgacttcatgatccacccacctcggcctcccaaagtgctgagattacagacgtgagccactgcgtcctgcctaaaatgaattttctagatgattgaataacagtagtagtcctttgatagaagataatgacttggtttatggccttaatatactacttaattacttaagatgtttattaatagaatgataaatgtacagagtaacctataagcatgacatacttttgctttcagtagtttcatgtaaagaaaaaaacttgaaaatagtaatacctgagtacccatgggaataatagacactggggaggtagggtggggagcgggacgaagagctgaaaaacttacctactggggactgtgctcactacctgggtgacaggatcatacgtaccccaaacctcaacatcacacagtatactcagctaacaaacctgcccatgtgtttcctgaatctaaaataaaaatcgaaataatttttttaaaaaagaaaaagacaatagtattacccatgggacaaaatttgtactattagcaagaatcattttgtgtctcatttagaaacaatttgacttttgttccagtgtttaaactttgacaaaaatggttttgaatagatctttataacctgatgcctaaatacaagattctctgataccttcatttaatatatcaatattggcctaaaacgtattctgtaaagcttaaattggtattaactatgatcatcttgatgtctatgatagataataaacaaggtcatacataccttaa

SEQ ID NO: 118222 - DNA, 492 bp, Homo sapiens
  misc_feature (1)...(492): n = a,t,c or g
gtctgacttccgggtcgagggctgaccaaggcgagggccaagaagaaggcgcggaaggaggccgcannnnnnnnnnnnnnnnnnnnnnnnnnnnaagaggtccccaacaccatcctcatctgcatggtgatcctgctgaacatcggcctggccatcctctttgttcacctcctgacctgaccgtcgcttaccagagccagaagttcctgctgaggacatgaggacccgtctttttgcagtgccaggcagggtggccaaagaggactggactctggacctggagccccgtggtccagttcacattcaccccactcgaggtttcaggaggcctcccacggtgcctgtgctgggtggcggtggtgtagacaagaagaattgtaatgttctggcatctctgcgagtctttctaaccaggcccccggctaggtcattggaggagctccctctgcttcctaaactttcgttagcctcgtccatcttccccaccaaccg

SEQ ID NO: 118223 - DNA, 1044 bp, Homo sapiens
tcaggtcaggaggtgaacaaagaggatggccaggccgatgttcagcaggatcaccatgcagatgaggatggtgttggggaccttgcccgacagcctcacctcttccacctccacctccgcctctgccgccagtgcggcctccttccgcgccttcttcttggcccccgccttggtcagccctcgagcctcagtcttgcgggccttggccctgggctcggctttggggatgatgggcttgggctccagcttggcgggggtctcgcgtgcaggctcggggcctcggagcgtgggggcctgcagcggggcggtggccggggacgagggcgcggactcggacccggagacctcgggctcgggctggtcctcaaagggtgggggctcgggcggcgtggtgcgcacagcatagctgtggtagccctggtaaagcgccacctccggctcccgcgacggcgcaggcggtgcctgcagagcctcgatggccatgcgctcggtggctggacgcgcggggctgcggcggcccgcgccctcggacggagtgactgaccggctgccctcaccgctgggctcgccgttccaggcgcctgggctcagcaggccgtccttggacaccccgggcctgggccgcttgggctgcgggggcgtcccggccggtgacggggagccaccctcgggccgaggggtctcacgctcgtgcagctgcgggctctcgcggggcggctgtgggaggcccgctgcgccggcgccccggtcggggggctccagcaggctctccgagttctccaggatctcctgcagcagccggcgcttctgatattccggacctggctggtagaagtccggagccagctccctggccaaagtgcgagcaatgttggactcctggttggcagccagggcggcctgttccgctgcctcagctttggccttggcgtggcttgtccatctctggatccatgcctctgggtgagggtctggaggatggctctgaccccatgacaccaagctgctgccttcctggtaccacttctgagccaggtccgtcat

SEQ ID NO: 118224 - DNA, 732 bp, Homo sapiens
tcgctgactcaggcgggcaccgtgagcctgggcctggacgccgagggccaggaggtgttcgtacccttcagcgcggtgctgcccatggtggcgcccaacgacctcgtgttcgatggctgggacatctcgtcgctgaacctggccgaggcgatgcggcgcgcgaaggtgctggactgggggctgcaggagcaactgtggccgcacatggaggccctgcggccccggccttctgtttacatccccgaattcatcgcggccaaccagagcgcgcgcgcggacaacctcatcccaggctcgcgtgcgcagcagctggagcagatccgcagggacatccgagacttccggtctagcgcggggctggacaaagtcatagtgctgtggacggcgaacacggagcgcttctgtgaggtgattccaggcctcaacgacacagccgagaacctgctgcgcaccattgagctcggtctggaggtgtcgccctccacgctctttcgccgtggccagcatcctgggagggctgtgcctttccttcaatgggtctccgcagaacaccctggtgcccggagctcttgagctcgcgtggcagcaccgggtttttgtgggcggagatgacttcaagtcaggccagaccaaagtcaagtccgtgcttgtggacttcctcattgggttccggcttcaaagaccatgtccatcgtgagttacaaccacctgggcaacaacgatggggagaac

SEQ ID NO: 118225 - DNA, 1073 bp, Homo sapiens
  misc_feature (1)...(1073): n = a,t,c or g
atggagaaagcgcctccacagacccagcacgagggcctcaagtccaaggagcatcttccggaacagactgacgaaggcaagacggagtaccgccgggtaccaagcctccgggctgtggtccttttccgccagcgcagctgcatcgagaacatcctcagggcctgcgtggggctcccgccacagaaccacatgctcctggaacacaaaatggagcgcccagggcccagcctcaagcgagttggacccgtggctgccacctaccctatgttgaacaagaaaggaccgctcgtctgggaggtatcgcccgccacgctcttcgccgtggccagcatcctggagggctgtgccttcctcaatgggtctccgcagaacactctggtgcccggagctcttgagctcgcgtggcagcaccgggtttttgtgggcggagatgacttcaagtcaggccagaccaaagtcaagtccgtgcttgtggacttcctcattggctccggcctcaagaccatgtccatcgtgagttacaaccacctgggcatacaacgatggggagaacctatcggcgccattgcagttccgctctaaggaggtggtccaggagcaacgtggtggacgacatggttgcagagcaaccccagtgctctatacgcccggcgaagagcctgaccactgcngtatgggcaggaacctcccggaatgagggtcttccacggagcacgccgagagtgaactttggcggctttgtggcggttaatgctgtgttaccggggggaaagggtcccgtgtctctgtaccgtccttgtggagaggaaactggttgctatgtgttcacggggaaaagggcaaacttggcggaaaagtacccctattaccacgggatcccccaaagtgggaagctccttgcgctcatgacgccaaggggccatcaggccgagcaccgagcgggaactccggggaatgggaaacatgcctgcccacccagccataggctcaccgagtttccactggggctggcccacgggccacgaactcctgggcccctggaagagaccgcggatgacagactctggggctag

SEQ ID NO: 118226 - DNA, 529 bp, Homo sapiens
ttattctcggatgtcaacattcccctccgcgctgagctcagcacggaggctgttgtgcggtacatggaattccgtggtgtatgagaatgtggcgcccgtccgggctccagcacgaggccaccagcccggctgagccctcgtctattttgcagtgccattcgggctgctctaaagaccagacctgcaccagccctcgcttgtacatggcgcacaggatgaagagcgagtctgccgaccactcgatgtgctggatctggtctaggcacgtgtacagctgaaggatctgaagggtgttcacatcccggaccactaaccggtactggacacaggaagcctgtccgggcaccgcacctgcaggatccccaagctgcctccacccacgcggccgcccccggccctgcccgccggggacgctggcaccgaggatgtcctgcccgtggcccaggtccccgccgctcaccaggtacttgccgtccggggagaacttgcagagtaagctggagagcttgaatacctcggagaagttcat

SEQ ID NO: 118227 - DNA, 324 bp, Homo sapiens
  misc_feature (1)...(324): n = a,t,c or g
atgactatgctaagcttggcccgaggtacaaatgtgaagaatgtgaaaaagttttcagtcgcaaatcacatcttgaaagacaaaacttaaaagaggtggcgttgcccttgtttttgagaatgccctactgtgcaagtggtagaggtctttcnnnnnnnnnnnnnnnnaaaacggggcccccccggagcgacccccggcccgggcctaattaataatgggaataannnnnnnnnnnnnnnnnnnnnnnnnnnnnnnnnnnnnnnnnnnnnnnnnnnnnnnnnnnnnnnnnnnnnnnnnnnnccctcnnnnnnnnnnncccaagcg

SEQ ID NO: 118228 - DNA, 505 bp, Homo sapiens
atataaatgtgaggtatgtgacaaggtctttaatcagaattgattccttgtatgccataatagatgtcacactggtaagaaaccttacagttgttatgagtgtggcaagaccttcagtcagacgtcatcctttacatgctatcgtagacttcatactggagggaaaccttacaagtgtagtgagcataacaagacctttggttgaaattcagcccttgtaattcataaggcaattcatactggagagaatccttgcaagtgtaatgaatgtggcaaggtttttaatcagaaagcacaccttgcacgtcatcatagacttcatactagagagaagccttacaaatgtgaagaatgtgaaaaagttttcagtcgcaaatcacatcttgaaagacaaaacttaaaagaggtggcgttgcccttgtttttgagaatgccctactgtatatcaaaatacttcctgtctcaggtcattgtcctgctcttatcctatgtccctaaatggtga

SEQ ID NO: 118229 - DNA, 6195 bp, Homo sapiens
atgaccacctatcgggccatccccagcgatggtgtggacctggcagccagctgtggcgccagggtgggcgatgtcctccctgggccacacacaggggactacgctcccttgggattctgggcccagaatggcagcatgtcccagcctcttggcgagagcccggccaccgccaccgccaccgccaccgccaccacccgccccagccccaccactcccgcaatgcccaagatgggcgtgcgcgcaagggtggccgactggccgcccaagcgggaggccctgagagagcacagcaacccaagcccctcccaggacacagatggcacaaaggccaccaagatggcccattccatgaggagcatacagaacggacagccccccaccagcaccccggcttcctcagggtccaaagccttccaccgactctccaggagaaggtccaaagacgtggagttccaggacgggtggccccggtcccccggcagggccttcctcccccttcggcaccgcagcagcagcgagatcaccctcagcgagtgtgacgcggaggacgcgggggagccgcggggggcccggcacacgggggcgctgcccctcttccgcgagtacgggagcacctcgtccatcgacgtgcagggcatgcccgagcagagcttcttcgacatcctgaacgagttccgcagcgagcagcccgacgcccgagggtgccaggccctcaccgagctcctccgggcagatcctggcccacacctcatggggggcggcggcggagccaagggggactcccacaacgggcagcccgccaaggacagcctcctgccactgcagcccacgaaggagaaggagaaggcccggaagaaacctgcgcggggcctcggcggcggggacacggtggactcgtccatctttcggaagctaaggagcagcaaacccgagggggaggctgggcgttccccgggggaggccgacgagggccggagccccccggaagccagcaggccgtgggtgtgtcagaagagcttcgcccacttcgacgtgcagagcatgctgttcgacctcaacgaggcggccgccaacagggtgtcggtgtcgcagcggcggaacaccaccacgggtgcttcggccgcttccgccgcctcggccatggcctccctcacggcctcgcgggcccacagcctcggaggcctggacccggccttcaccagcacagaggacctaaactgcaaggagaacttggagcaggacctcggcgatgacaacagcaacgacctgctgctcagctgcccgcacttccgcaatgagatcgggggcgagtgtgagcgcaacgtgagcttctcccgggcttccgtgggctccccgagcagcggcgagggccacctggcagagcccgccctgagcgcctaccgcaccaacgccagcatctcggtgttggaagttcccaaggagcagcagcggacgcagagtcggccccggcagtacagcatcgagcatgtggacctgggcgcccgctactaccaggattacttcgtgggcaaagaacatgccaattacttcggcgtggatgagaagctggggccagtggctgtgagcattaagcgggagaagctggaagaccacaaggagcacggacctcagtaccagtacaggatcatcttccggacccgcgagctcatcaccctgcggggctccatcctggaagatgctacgcccacagccaccaagcatgggaccgggcggggcctgcccttgaaggatgccctggagtatgtcatccccgagctcaacatccactgcctgcggctggccctcaacacccccaaggtgacggagcaactgctgaagctcgatgagcaagggctctgccggaagcacaaggtgggcatcctctattgcaaggccggccagagctccgaggaggagatgtacaacaatgaggaggccggccccgcctttgaggagttcctctccctcatcggcgagaaggtctgcctgaagggcttcaccaagtacgctgcccagctggacgtcaagaccgactccacgggaacccactccctctacacgatgtaccaggactacgagatcatgttccatgtctccaccctgctcccttacacccccaacaacaggcagcagctgctacggaagaggcacataggaaatgacatcgtgacgatcatcttccaggagcctggcgcgctaccgttcacccccaagaacatccgctcccacttccagcacgtcttcatcattgtccgagtccacaacccctgcactgataacgtctgttacagagccaaaatcaccagccaggcctgggcactgggcttcaaggaccaagaggcacgagtgatggcccagaggaaagtcggagggaagcagggcctacctgtggagtgtgcaatttccgaatggccacccgcatcatccctgcagcctgtggactctcaaaacccagtccctcctgctgggaatatggctgtgacccgatccaaagacgctcctcctttcggcccccccatccccagtggaaccacattccgcaaatccgacgtcttcagagacttcttgctggccaaggtgattaacgctgagaacgccgcgcacaagtccgacaagttccacaccatggccaccaggacccgccaggagtatctcaaggacctggccgaaaactgtgtctccaacacccccatcgactccaccggcaaattcaacctcatctccctgacctccaagaagaaggaaaagacaaaagcacgggctggcgctgagcagcacagtgcaggggccatcgcctggagggtggtggcccaggactacgcccagggggtggaaatcgactgcattttgggaatttccaatgagtttgtggtgctcctggacttacgcaccaaggaggtggtgttcaactgctactgcggggatgtcattggctggactccagactcctccacactcaaaatcttctatggacgaggagaccacatcttcctacaggcgacagagggttctgtggaggacataagggagatagtgcagagactgaaggtgatgaccagtggctgggagacggtggacatgacgcttcggcggaacgggctcgggcagctgggcttccacgtgaagtacgacggcacggtggccgaggttgaggactatgggttcgcctggcaggccggcctccggcagggcagccgactagtggagatctgcaaggtggccgtggtcacactgacccacgaccagatgatcgacctgctgcgcacctctgtcactgtgaaggtggtcatcatcccgccttttgaggacggcactccccggaggggcaagtcaaggccagataaccccacaggcaagtgccctggtggctacgctcctcgaggaaggacatgcacccctctccacacactcccacgggtgcacacgataagccagcttgcgcatcgcatgactctcaccccaaacatgcaggctctgatagacgttcatattgttattgttcctcacctggtgcctggtgagacattggcagctgccagtccaaagggacagccagaagacactgccaagtgtcagttccagccatggcgctaccgaggggtgcggggttggccggagacctacgacatgaatacctcggagcccaagacggagcaggaaagcatcactcctgggggccggcccccctaccgcagcaatgctccctggcagtggagcgggcccgcatcccataactctctaccagcctccaagtgggccactccaaccactcccggccatgcccagtccctgagccggcccctgaagcagacccccatagtccccttccgggagtcccagccactgcacagcaagaggcctgtcagcttcccagaaaccccttacacagtatcaccagcaggggccgacagagtccctccctaccgacagccttctgggagcttctccacccccggttcggccacctacgtgagatacaagccatccccagaaaggtacacggctgccccacaccccctgctatctcttgatccccacttcagccacgatgggacgtccagcggcgactcctcttccggcggcctgaccagccaggagagcaccatggaacgccagaagccagagcctttgtggcatgtgcctgcccaggccaggctctcagccatagccggaagcagcgggaacaagcacccgtccaggcaggatgcagcaggcaaagattctcccaacaggcattccaaaggagaacctcaatactcaagtcattccagcagcaacaccctctccagcaacgcatccagcagccacagcgacgaccgctggttcgaccccctggaccccctggagccagagcaagaccccctctccaagggtggctctagtgacagcggcatcgacaccaccctctacacctccagccctagctgcatgtccctggccaaggctccacggcccgccaagccacacaagccccctggaagtatgggcctttgtggcgggggtcgcgaggccgctgggaggtcccaccacgcagacaggcggcgggaggtctcccctgcccccgcagttgccggccaaagcaagggctaccgaccgaagctgtactcctccggctccagcacccccacgggactggcggggggcagccgagacccaccgaggcagcccagcgagacaggaggcaaagtctctgagggggctgaggcttggatctgcatgggaggacgtgggcctgagctggaggacaaagcaactgtggatgtggcagcaggcggcattgccaggaatgacatgggctcgagggttggctaccccgctcaggtttacaaaactgccagtgcagagactcctcggccctcccagctggcccagcccagcccctttcagctctccgcctccgtccccaagtccttcttctccaagcagcctgtacgcaataagcacccaacagggtggaagagaacggaggagcccccaccacggccactccccttcagtgacccaaagaaactagtcattggagaacagatgattgatgtcttagggccggagaaacgcagacggcgtaccacacaggaaaagatcgcaattgttcagcagagctttgaaccggggatgacggtctccctcgttgcccggcaacatggtgtagcagccagccagttatttctctggccaataccaggaaggaagttttatctgctgtcgcccgccggaaaacaggttgttcctgcctctgaacttgctgccgccatgaagcagattaaagaactccagcgcctgctcggcaagaaaacgatggaaaatgaactcctcaaagaagccgttgaatatggacgggcaaaaaagtggatagcgcacgcgcccttattgcccggggatggggaacgaaccgatgactggatggatggccgccgcagtcgtcacactgatgatacggatgtgcttctccgtatacaccatgttatcggagagctgccaacgtatggttatcgtcgggtatgggcgctgcttcgcagacaggcagaacttgatggtatgcctgcgatcaatgcccaacgtgtttaccggatcatgcgccagaatgcgctgttgcttgagcgaaaacctgctgtaccgccatcgaaacgggcacatacaggcagagtgcccgtgaaagaaagcaatcagcgatggtgctctgacgggttcgagttctgctgtgataacggagagagactgcgtgtcacgttcgcgctggactgctgtgatcgtgaggcactgcactgggcggtcactaccggcggcttcaacagtgaaacagtacaggacgtcatgctgggagcggtggaacgccgcttcggcaacgatcttccgtcgtctccagtggagtggctgacggataatggttcatgctaccgggctaatgaaacacgccagttcgcccggatgttgggacttgaaccgaagaacacggcggtgcggagtccggagagtaacggaatagcagagagcttcgtgaaaacgataaagcgtgactacatcagtatcatgcccaaaccagacgggttaacggcagcaaagaaccttgcagaggcgttcgagcattataacgaatggcatccgcatagtgcgctgggttatcgctcgccacgggaatatctgcggcagcgggcttgtaatgggttaagtgataacagatgtctggaaatatag

SEQ ID NO: 118230 - DNA, 3391 bp, Homo sapiens
gttcctctccctcatcggcgagaaggtctgcctgaagggcttcaccaagtacgctgcccagctggacgtcaagaccgactccacgggaacccactccctctacacgatgtaccaggactacgagatcatgttccatgtctccaccctgctcccttacacccccaacaacaggcagcagctgctacggaagaggcacataggaaatgacatcgtgacgatcatcttccaggagcctggcgcgctaccgttcacccccaagaacatccgctcccacttccagcacgtcttcatcattgtccgagtccacaacccctgcactgataacgtctgttacagtatggctgtgacccgatccaaagacgctcctcctttcggcccccccatccccagtggaaccacattccgcaaatccgacgtcttcagagacttcttgctggccaaggtgattaacgctgagaacgccgcgcacaagtccgacaagttccacaccatggccaccaggacccgccaggagtatctcaaggacctggccgaaaactgtgtctccaacacccccatcgactccaccggcaaattcaacctcatctccctgacctccaagaagaaggaaaagacaaaagcacgggctggcgctgagcagcacagtgcaggggccatcgcctggagggtggtggcccaggactacgcccagggggtggaaatcgactgcattttgggaatttccaatgagtttgtggtgctcctggacttacgcaccaaggaggtggtgttcaactgctactgcggggatgtcattggctggactccagactcctccacactcaaaatcttctatggacgaggagaccacatcttcctacaggcgacagagggttctgtggaggacataagggagatagtgcagagactgaaggtgatgaccagtggctgggagacggtggacatgacgcttcggcggaacgggctcgggcagctgggcttccacgtgaagtacgacggcacggtggccgaggttgaggactatgggttcgcctggcaggccggcctccggcagggcagccgactagtggagatctgcaaggtggccgtggtcacactgacccacgaccagatgatcgacctgctgcgcacctctgtcactgtgaaggtggtcatcatcccgccttttgaggacggcactccccggaggggttggccggagacctacgacatgaatacctcggagcccaagacggagcaggaaagcatcactcctgggggccggcccccctaccgcagcaatgctccctggcagtggagcgggcccgcatcccataactctctaccagcctccaagtgggccactccaaccactcccggccatgcccagtccctgagccggcccctgaagcagacccccatagtccccttccgggagtcccagccactgcacagcaagaggcctgtcagcttcccagaaaccccttacacagtatcaccagcaggggccgacagagtccctccctaccgacagccttctgggagcttctccacccccggttcggccacctacgtgagatacaagccatccccagaaaggtacacggctgccccacaccccctgctatctcttgatccccacttcagccacgatgggacgtccagcggcgactcctcttccggcggcctgaccagccaggagagcaccatggaacgccagaagccagagcctttgtggcatgtgcctgcccaggccaggctctcagccatagccggaagcagcgggaacaagcacccgtccaggcaggatgcagcaggcaaagattctcccaacaggcattccaaaggagaacctcaatactcaagtcattccagcagcaacaccctctccagcaacgcatccagcagccacagcgacgaccgctggttcgaccccctggaccccctggagccagagcaagaccccctctccaagggtggctctagtgacagcggcatcgacaccaccctctacacctccagccctagctgcatgtccctggccaaggctccacggcccgccaagccacacaagccccctggaagtatgggcctttgtggcgggggtcgcgaggccgctgggaggtcccaccacgcagacaggcggcgggaggtctcccctgcccccgcagttgccggccaaagcaagggctaccgaccgaagctgtactcctccggctccagcacccccacgggactggcggggggcagccgagacccaccgaggcagcccagtgacatgggctcgagggttggctaccccgctcaggtttacaaaactgccagtgcagagactcctcggccctcccagctggcccagcccagcccctttcagctctccgcctccgtccccaagtccttcttctccaagcagcctgtacgcaataagcacccaacagggtggaagagaacggaggagcccccaccacggccactccccttcagtgacccaaagaagcaggtggacacgaacaccaaaaatgtctttgggcaaccgaggttgagggcatccctccgagacctccggtcaccacggaagaactacaaatccaccatcgaggatgacctgaagaaactcatcatcatggacaacctggggccagagcaggagagagacacgggacagtcaccgcagaagggcctgcagcggacgctgtcggacgagagcctgtgcagcgggcgccgggagcccagcttcgccagccccgctggcctagagccagggctgcccagcgacgtgctcttcaccagcacctgcgccttcccgtccagcacgctgcctgcacgccgccagcaccagcacccccacccgcccgtcggccccggtgccacccctgccgccggcagcggctttcccgagaagaaatccaccatctcagcctcggagctctcgctggctgatgggcgggaccgccccctgcggcgcctggaccctgggctgatgcccctgcctgacacagctgctggcctcgagtggtccagcctggtgaacgcagccaaggcatacgaagtgcaaagagccgtctcactcttctctctgaacgacccggccctgagcccggacatcccgcctgcacacagtcctgtccacagccacctgagcctggagaggggacccccgacccccaggaccacccctaccatgagcgaggagccacccctggatctgacaggcaaggtgtaccagctggaggtgatgctgaaacagctgcacactgacctgcagaaggagaagcaggacaaggtggtgctccagtcagaggtggccagcctgcggcagaacaaccagcggctgcaggaggagtcgcaggccgccagcgagcagctgcgcaagtttgcggagatcttctgcagggagaagaaggagctctga

SEQ ID NO: 118231 - DNA, 1771 bp, Homo sapiens
atggggaggaagctgccctttcactgtgcatgcattcaactgatgatgccaccaggctgggcgccagggatacggagcctttgtggcatgtgcctgcccaggccggctctcagccatagccggaagcagcgggaacaagcacccgtccaggcagatgcagcaggcaaagattcccccaacaggcattccaaaaggttccaagccctctgctgggtccctgcgtctttccagcagggagggggaggacaggacggcatggacaggaccacgcggagccgtggagcaggaagtgacaggtcccgatctgtgttgaggacgcgggcagcagggtttgctagtgggctggacatagtgagagcaaaagcggggtcaagggaaacctcaatactcaagtcattccagcagcaacaccctctccagcaacgctccagcagccacagcgacgaccgctggttcgaccccctggaccccctgggccagagcaagaccccctctccaaggctgcatgtccctggccaaggcccacggcccgccaagccacacaagccccctggaagtatgggcctttgtgcgggggtcgcgaggccgctgggaggtcccaccacgcagacaggcggcggaggtctcccctgcccccgcagttgccggccaaagcaagggctaccgaccaagctgtactcctccggctccagcacccccacgggactggcggggggcaccgagacccaccgaggcagcccagcactctgtggcatagaacttggtatttattcacacagcgagcgctgctgtgcaccggggcctctgcagggagctggaacaggcagaccagatcccaccgtcctggtacggacggaggcccatgggaaacagctagtgaatatgccaaaagtcatgaatgaattgtgccaggggacagcctgcagagacggtgcgcagcatccttcccttatggagctgtcattctcctggagacaggacaaacagacagacagccgaaccaccgtggagtgtgccaggaggccacaggggcaatgtggctgcttacgctcctacactggagcacaattccagccgcatgcagggatgaattggttcccagcccatgacacacgtcagggagagaaagcaagattggtccaggtgacacagctggcatctagtgcagcaggctggctccaagtctatgcccctcacccctcagacgctgctcaccaagccggagtggctgtgggagcgagttagaacacgggacgcccctggcagcagcgccctgcgttgttaaagcgccgcggaggaagctgtattgtcgcgggcccaggcgcccttggccttaggacccaacttctcttaccgccatggagttcgacctgggagcagccctggagcccacctcccagaagcccggtgtgggggcgggccacgggggagatcccaagctcagtccccacaaagttcagggccggtcggaggcaggggcaggtccgggtccaaagcaaggacaccacagctcttccgactccagcagcagctccagcgattcggacacggatgtgaagtcccacgctgctggctccaagcagcacgagagcatcccgggcaaggccaagaagcccaaagtgaagaagaaggagaagggcaagaaggagaagggcaagaagaaggaggctccccactgaagggccctggacagggctcattaaaccttcctctctgccttctgtaaaaaaaaaaaaaaaaaaaaaaaaaaaaaaagtcgtatcgatgtcga

SEQ ID NO: 118232 - DNA, 426 bp, Homo sapiens
  misc_feature (1)...(426): n = a,t,c or g
cccacgcgtccgcggacgcgtgggctgtgagtcaaccaaacttccttttaaannnnnnnnnnnnnnnnnnnnnnnnnnnnnnnnnnnnnnnnnnnnnnnnnacgtagagggtgtgagagccagaagactttaaggagagggacgagctggggcctggatgcccggggaggtggacctggaccaggacaggtgtcagcgggcagagatggggcagaggtgtggctgtctacctgcgaccggggccatgccctctcgggctcggttgaggagctgctcttcctccagaatgcgctcggacggaacgttaggaaggccctggtgagtggccccgacctcctcccccaggactggcttctccggccctctgccctttcgggcagaacagctcgtggctctttcaggaccttgggctccatcttgcagaan

SEQ ID NO: 118233 - DNA, 565 bp, Homo sapiens
  misc_feature (1)...(565): n = a,t,c or g
cccacgcgtccgcggacgcgtgggctgtgagtcaaccaaacttccttttaaannnnnnnnnnnnnnnnnnnnnnnnnnnnnnnnnnnnnnnnnnnnnnnnnacgtagagggtgtgagagccacaagactttaaggagagggacgagctggggcctggatgcccggggaggtggacctggaccaggacaggtgtcagcgggcagagatggggcagaggtgtggctgtctacctgcgaccggggccatgccctctcgggctcggttgaggagctgctcttcctccagaatgcgctcggacggaacgttaggaaggccctggtgagtggccccgacctcctcccccaggactggcttctccggccctctggcgcttttgggcagaacaggtgggtggctctttccaggaactggagtctccatcttgcagaacagctcgtggctcttccaggacctggggctccatcttgcagaacagctcgtggctcttccaggacctggggctccatcttgctgaggggtgctttcttgagactccttaaggacgattctgattttccctggagct

SEQ ID NO: 118234 - DNA, 896 bp, Homo sapiens
ctgcctcggagcacaggcacaggggcctttgaaagataacccgccattgtacagctccagggaaaatcagaatcgtccctaaggagtctcaagaaagcacccctcagcaagatggagccccaggtcctggaagagccacgagctgttctgcaagatggagccccaggtcctggaagagccacgagctgttctgcaagatggagccccaggtcctggaagagccacgagctgttctgcaagatggagccccaggtcctggaagagccacgagctgttctgcccgaaagggcagagggccggagaagccagtccagggccttcctaacgttccgtccgagcgcattctggaggaagagcagctcctcaaccgagcccgagagggcatggccccggtcgcgggtagacagccgcacctctgccccatctctgcccgctgacacctgtcctgctccaagggtagggcccagactgatggcctctggggtgggccacgatgagacccctgcccctgagggcccagcctgcacctcctccacctcactggatgctgttaaccccctctgctcctcctccaggtacagggaagccacagggaggcagagggcaaacatcggggagctgtgttcccgccacagatccacactgtcggttgagtgcaccctcaccaggaaagctgggcccaccatgtgatttcctggagcctccgtgacaaaggaccacaaactgggggagttcggaggccggaagtccaaaatcaaggtgtccccggggccacgttccctctggaggctccaagggagggatcttcctgtctctgcattttccaggggccccacaatccctggaattccctggttcacagccgcatggcctgattggagcttctgtgtctgcat

SEQ ID NO: 118235 - DNA, 636 bp, Homo sapiens
atgggggttctgacaccagggtcccagctgggggacttctccctgcagcaggctatgccacttaccttcctcccgtgccttggagaagctgctggcagctgtaagagagaggtgcccttccttcaggcctcatctctcctgtgctcccagtacccccacctgagcccaagacctcaaggccccagcagcagccccaccatcacgtccctggtggactcacccagcacggccaagcagaacagcccagggagccccatgcctcgccttgtcctgacggtgtgcgtctcccagacccaggccaatgccagggccatccacaggctccggaagcagctggtgtggcaggttcaggagaagtggcacctggtggaggacctgtcgcgactgctgccggagccaggcccgagcgactctccgggccccaagtaccctgcctccacaagcttcgcgcccgcagtccttctgccccggatgcccatagccctggctccccggtccaccaggccccgcgtccgggcccctccgtcgtggatgccgcgggactgcgttccccttgccctggacagcacgcacctggcggcccccaagggcactgcgtacctggagcccggctttgcatccacaggtctgccctag

SEQ ID NO: 118236 - DNA, 1152 bp, Homo sapiens
acaccatcctcttagttgctcagactgaaaagctagcagccatcctggatttctctcacactgcctattcaacgtgtgaatgcatgagtggaaagctgagttcgcactcgtgactggccggggtcgactctgacattcactcccactttggcgcgctgatttgcctctgagcggatgaaggttgagccatggcgggcggggccggggaggcgggcttggagcgagggggcggggcaggcgccacaaaaacgcgctcgcgccggcgccgaaccgcaactcccggcgacccccgcgctcccgggtggcaagatggtggcgcgcaggacgaagctcgcggcgcgggacccggaggacggtatcccgagcccaccgtgctacgcagctattccaatcaagttctctgaaaagcaacaggcttctcactacctctatgtgagagcacacggcgttcgacaaggcaccaagtccacctggcctcagaagaggactctttttgtcctcaatgtgcccccatactgcacagaggagagcctgtcccgcctcctgtccacctgtggcctcgtccagtctgtagagttgcaggagaagccggacctggctgagagcccaaaggagtcaaggtcgaagttttttcatcccaagccagttccgggtttccaggtagcctatgtggtgttccagaagccaagtggggtgtcagcggccttggccctgaagggccccctgctggtgtccacagagagccaccctgtgaagagtggcattcacaaatggatcagtgactacgcagactctgtgcccgaccctgaggccctgagggtggaagtggacacgttcatggaggcatatgaccagaagatcgctgaggaagaagctaaggccaaggaggaggagggggtccctgacgaggagggctgggtgaaggtgacccgccggggccggcggcctgtgctcccccggactgaggcagccagcttgcgggtgctggagagggagagacggaagcgcagccgaaaagagctgctcaacttctacgcctggcagcatcgagagagcaagatggagcatctagcgcagctgcgcaagaagttcgaggaggacaagcagaggatcgagctgctgcgggcccagcgcaaattccgaccgtactga

SEQ ID NO: 118237 - DNA, 622 bp, Homo sapiens
cggcacgatggtggcgcgcaggacgaagctcgcggcgcgggacccggaggaccggtatcccgagcccaccgtgctaggcagactattccaatcatgtgctctgaaaagcaacaggcttctcactacctctatgggagagcacacggcattcagcaaggcaccaagtccacctggcctcataagaggactatttttgctttcaatgggcccccatactgctcagagcaggagagcctgtcctgcctccagtccacctgtggccttgtccagtctgtcaagttgaaggagaagctggagctgggctgggagtcaaggtcgaagttttttcatccaaagccagttccggttactgaagagcaatagccacttgagtgaggagtgcggggagcttctcctgcaaagaggaaccacgaaggtggccacaggtgacaaacaaggtcttgggttttttgcgctcattggaccaggtctggttctgaacagagaccagaggctcgcctggcggttccagtttgtggaagtcccaggcaatcactgtgtccacatgagcgaaccccagcacgtggccagtatcatcagctccttcttacagtgcacacacacgctcccagcccagctgtag

SEQ ID NO: 118238 - DNA, 1128 bp, Homo sapiens
tttttttttttttgagaatacaagaaccttttattttccatccagttgggcagcagggaaaggctaggtgggcccagcctgcccttccttcctccagctggctggatatttattattagccaggagacagcagccctggaacccagactctgtctcccccttgaggtcacagatgttgaagttggaatctcgctccttcccctgactaccatcctaggctgggcctcaagactagtgaggcctgtccccaccatccctggccttgttgtggggctcaggaactcaagagtccccagtgttgaagtctgggaagcaactaggtcttcatagttcccaggcccagagctacaagctgggctgggagcatgtgtgtgcgctgtaaagaaggagctgatgatactggccacggtgcttggggttcgctcatgtggacacagtggattgcctgggacttccacaaacttggaaccgctctttgagggtggatttcattgtgtctatcatgaacgacagggactccttgtcagagtaattctctcttggatcaaaatatccgtggactgctttgatcaacaggacatgggcctgcagcttcctgatggaatgcgcacacagctccctgctgacgaagtcaatgctgttctctgccagctccccgtccacaccgggcacccacctctgcagcagctgcttcaggctgaacacgtgcgagggctcctgggaggcctctacctgcagcacgtgctctatggctctccgcttgtaggtcagcaagttctccatttccattccgcccacgacgccacctgccacaactcttcggatctcactcacaaaagtctggaggtaatatgggacacctgggctgtaatgggacgagagcccatgacctccgaaatccatggcaacgtaataaaagtcttgcgggagaagagggatgagtctgtcgaaggagctggcattgtccagccagccgtgcaggcagagaactggagggccctgcagggagccccaggctttggctgcgatgtggccccagggcacagccagcttcagctctgagatcagaccccaggcaagccccgcaactccagcagtccccgcaactccagccgtccccgcccccat

SEQ ID NO: 118239 - DNA, 663 bp, Homo sapiens
atggcctggcagatgatgcagctgctccttctggctttggtgactgctgcggggagtgcccagcccaggagtgcgcgggccaggacagacctgctcaatgtctgcatgaacgccaagtaccacaagacacagcccagccccgaggacgagctgtatggccagtctctggagaaagaatgcctgagctttaccagcaccacccaggaagcccataagaatattcccatctatatggattcaactggaaccactgtggagagatggtacctgcctgcaaacggcactttatccaggacacctgcctttacgagtgaccccccaacttggggccctggatccagcaggtacgcatggcttcctggcatccaagagctagcagaggagctgaattttccaggcgtctctgcaggcagcaaccccagctccagttctattcagggctgggttcctgggattcttgagcctgagcccttcttttctaccaaaatctcccaggtggatcagagctggcgcaaagagtgggtgctgaatgtgcccctgtgcaaagaggactgtgagcaatggtgggaagattgtcgcacctcctacacctgcaagagcaatgggcacaagggctggaactggacctcagggtctaacaagtgccaggtggcagctgcctga

SEQ ID NO: 118240 - DNA, 782 bp, Homo sapiens
aaggaaaagcagcaaaccagatggagaaggaaggccaaaaagataagtagaaagctggaccatgagctccttgagggcagggactgaatggttactatgtccccagggcccagcatgaccttctcctggattcctcatcttccttctgtgacctgtgtctccatcagtttctcctccggcatctttttcttacaggattcttacctcaggaatagatggacatggcctggcagatgatgcagctgctgcttctggctttggtgactgctgcggggagtgcccagcccaggacgtgcgcgggccaaggacggacctgctcaatgtctgcatgaacgccaagcaccacaagacacagcccagccccgaggacgaagctgtatggccagacccatgatgtgcaaggggtcttgcaggaagaccaagagttggaacatccaaggaaaagcaagtgtgaagtcgggctggcagggaagcatgttctgtgtcagccggcactgggcgtgggccagggtgtgggaggtgggtgggagctcctcaagggccctccccaggaagtgttcctctggatgacctacctggggcagaggagccagaatatggaggagatggctgtggtcaaccagagctggcgcaaagagcgcattctgaacgtgcccctgtgcaaagaggactgtgagcgctggtgggaggactgtcgcacctcctacacctgcaaaagcaactggcacaaaggctggaattggacctcagctccatctgcagtatgcgaccctctcctgtga

SEQ ID NO: 118241 - DNA, 754 bp, Homo sapiens
agcagtgtcgaccctggaggaagaatgcctgctgttctaccaacaccagccaggaagcccataaggatgtttcctacctatatagattcaactggaaccactgtggaagagatggcacctgactgcaaacggcattttcatccaggaacacctgccctctacgaggtgctccccacaacttgggggcctgggatccagcagggtggatccagagctggcgcaaagagcgggtactgaacgtgcccctgtgcaaagaggactgtgagcaatggtgggaagattgtcgcacctcctacacctgcaagagcaactggcacaagggctggaactggacttcagggtttaacaaagtgcgcagtgggagctgcctgcccaacctttccatttctacttccccacacccactgttctgtgcaatgaaatctggactcactcctacaaggtcagcaactacagccgagggagtggccgctgcatccagatgtggttcgacgccagcccaggggcaaccccaattgaggaggttggcgaggttctattgttgcagccatgagtggggctgggccctgggcagcctggcctttcctgcttagcctggccctaatgctgctgtggctgctcagctgacctccttttaccttctgatacctggaaatccctgccctgttcagccccacagctcccaactatttggttcctgctccatggtcgggcctctgacagccactttgaataaaccagacaccgcaaaaaa

SEQ ID NO: 118242 - DNA, 448 bp, Homo sapiens
gaacaagggcgccatgatcatctacaccagtgggaccacggggaggcccaagggcgtgctgagcacgcaccaaaacatcagggctgtggtgaccgggctggtccacaagtgggcatggaccaaagacgacgtgatcctccacgtgctcccgctgcaccacgtccatggtgtggtcaacgcgctgctctgtcctctctgggtgggagccacctgtgtgatgatgcctgagttcagccctcagcaggtttgggaaaagttcttaagttctgaaacgccgcggatcaatgtctttatggcagtgcctacaatatacaccaagctgatggagtactacgacaggcattttacccagccgcacgcccaggatttcttgcggtgcagtttgtgaagaaaaaattaggctgatggtctcaggctcagctgccctgcccctcccatgcttgagaaa

SEQ ID NO: 118243 - DNA, 1635 bp, Homo sapiens
atggaagcgctgcccgggtctaccgcgagcggcggcgactttcccttctggaagcggtgccgggggcgcaaggcgcgaggcaggcgggcgggcgcccactcccggaccagcttccccgcggacagcccgaggacacgcgcggaactctccggcgccagcacgcaccgccggaagaaccggatcagctggtgcatggcaaacgccatgtccagcccctttgtttcccatgagcgcagggctgccagctgcctgtcactggaacccagtttagctgagggctctcaagacagggtggagggagtccttggaggctctgctgatactcagcataacagagtgacagatggcagcctggccccaaactgcagcttgtgtgtatacaccaaagataaatggaaacaggcacccaaatacttgtacgaaaatgttcatcgtgtcactggacgcaaaaggcaaaaagtggaaacaacccactgtccatcaacagaggaagagagaaacgtgtgggctccatccacggaagtgcctacaatatacaccaagctgatggagtactacgacaggcattttacccagccgcacgcccaggatttcttgcgtgcagtttgtgaagaaaaaattaggacaagctggtcttttgggccacccaggggcgtgtttgctctgcactctcccatgaacctgcaggcgtgggaacgtttcttttccctcgtggctgttgaggtgtggttcactaactggaaacgcacacgtgtggctcagctgatggtctcaggctcagctgccctgcccctcccagtgctggagaagtggaagaacatcacgggccacaccctgctggagcggtatggcatgaccgagatcggcatggctctgtccgggcccctgaccactgccatgcgcctgccaggatgtgctggttttgtccagtgccaccggccacagtcaccacgtaatatggacggaatgagcaaagcccggctcgctgaggctgcaggctgcaggcaagtgaggactgaaagggtaacgggctctgggctttgtcctctctttgttccggacatcccctgcgatggggtcatattttgcactcacatacaagaacccatgagcctgcccacggtcacgcggctggtgagtgatgcacttcccaggagcacggtggcctcttcgatggccctcactagagaagatggacagtgcccccctagccttttttactggaccagatccaaggctgagaagctgaaatcaggagcagcccatgggcccactgtctacaccgagggagtcatgagcagcccatggaccactgtctacacccagggagtcaggatcagcccggggactgctgtctacaccgagggtgtcaggagcagcccagggaccactgtctacactgagagcgtcaggagcagcccagggaccgccgtccacaccaagagcgccaaggagcagcccagggaccgccgtccacaccgagggcgccaaggagcagatagtagcccagagacccaggggaggctcaccttccccacgctggaatcagaactcctaggcgaacaggaaggagccccagacagatggcacagggagaggagtccccggctgaggagggggatccagagaccctga

SEQ ID NO: 118244 - DNA, 395 bp, Homo sapiens
  misc_feature (1)...(395): n = a,t,c or g
aaacaagcagccaatttggataccatcaagacacctgaaaccttatcatgagccagatgccaaagaagagattccgggaggatcctgaggacccaccagttgcagtcatgtcgagactgatgctgaggaggaccccaactgtcatgagcaacacctgtcaaacacagccacccacctggggacagatcaagaagctgtcatagatggcagaagaaaacctgaggaaagcaggacaaccagtcacatctgcagatgcagatcctgactcctgcaagaagtagctcactgtgacaaagccgcctttgcttttattgcactgaaaaaaaagaaaaagaagggggacannnnnnnnnnnnnnnnnnnnnnnnnnnnnnnnnnnnnnnnnnnnnnnnacc

SEQ ID NO: 118245 - DNA, 442 bp, Homo sapiens
ctgagccagatgctgaggaagagattctgggaggatcccgaggaccccctcgttgcagccatgtcaagattgatgctgaggacaaccccaagcgtcacaagcaacacacgtcgaacacagccacccaccttgggacagatcaagaagctgtcacagatggcggaagaaaacctgggggtttgactaccgtactgtgtcccttcatattccagggatcttttccttgctccagacaggtgaccagatctggcttagagacagcaatacccaagaagaccaggtttctgtagttctctaacatcactttcctatacaaatcctgctgagcagtgtccaggcattgccactcctccagagagaattctatggccacatccctaaatgtcaacggccccatgtctaggctttcaggggatcctggcatcttagctatggatgtccc

SEQ ID NO: 118246 - DNA, 286 bp, Homo sapiens
cttggcctgcgctgtcctctctcagagtactcttgccaccactctctgcccgcagactccccttcctcctgctcagaggtttgttgctgtctggggctgccccacctctgagcttggttgctgtggttaacatctctcccatggggctcactttacgctttagctttactggcaaataaacctgctctgtaatctcttctgttacttcgttatactctccttcctcctcatcatcagtgtgaaaaagttccaaggtggaacgaaccacagcccacacttttcccat

SEQ ID NO: 118247 - DNA, 936 bp, Homo sapiens
atgggacaagtgtgggctctggttcgttccaccttggaactttttcacactgatgatgaggaggaaggagagtataacgaagtaacagaagaggttacagagcaggtttatttgccagctaaagctaaagcggcaaaggagggagaggttcatccctactcttctgcaccccctccttattattttgaagaaaaagagtggccagaccctccagatctttcttttctggaggacactgggcgaaaagtagttgccccagtgactgagcagcacctcgagcgactgctgtcagttctattcaggcaggagttcagcaggctagacgagaggggaccaaaagaactgtatgcagattttatagcttggaatctcttaagacaggagtctcttaaaaaggtgatttcagattcagctgctcaggatatagtgttgcagttattagcttttggcaatgttaatctcgattgccaggctgctttgcgacctattagagggaaagcacatttagttgattatatcaaggcctgtgacggtatcggagctaagcaagacagtgaacggtttgcatttacaattcctgtggtaaacaatctgcagcctgctaagcattttcattatttcacagatgggtctagcaatggtaaagcttcttattctggatcaaaaggccaaaaccagcagccaatttggatactatcaagacacctaaaaccttatcatgagccagatgccaaggaagagattccaggaggatcccgaggaccccctggttgcagccatgtcaagactgatgctgaggaggaccctaactgtcacgagcaacacccgttgaacacagccacccacctggggacagatcaagaagctgtcacagatggtggaagaaaacctgaggaaagcgggacaactggtcacaatgactgtttactggaatga

SEQ ID NO: 118248 - DNA, 999 bp, Homo sapiens
atgggactagtgtgggctctggttcgttccaccttggaaccttttcacactgatgatgaagaagaaggaaagtataaggaagtaacagaagaagtaacagagcagaacagcttagaggagtgtgcattagagcttgggaaaaaagtcacttcgggtgaagaacaatacccttcctttagcattgtaaaacagggaccaagagaaccatacacggattttatagcttggttacaggagtctcttaaaaaggtgattgcagattcagctgctcaggatatagtgttgtggttattagctttcgacaatgctaatcccgattgccaggctgctctgcgacctatcagagggaaagcacatttagttgattatatcaaggcctgtgatggtattggagataatctgcataaggctactctgctagcccagcatggttatactaaaaaagaatgtagaaacaatcagcgagtcaggccaccagataagggaaaaaagaaaactgctgagcctgaaatatgtccaaaatgtaaaaaaggaaaacattgggctagtcattgtcactctaagtttgataaagatgggaacctgatttcgggaaacgacatgaggggcccatcctgggccccattccaaacggggcatttccagctcaggccattccctcatccctgtacaatatctgtccccatcacagccagtagtgccacagtagatttatgctgcacaaaagctgtgagccttctgcctggggaacccccgcaaaaggtcccaacaggagtctgtggacccttgccagcggggacgataggattccttctaggaaggtctagtttaaatttaaaagggatacaagtacaaacaggagtcattgattcagattacaatggggaaattcaaattgttatatccacttctgttccctggaaagcagaaccaggagagcgtatagcacagcccctgattatgccatatgtggaaatggggaaaagtgaaattaaatga

SEQ ID NO: 118249 - DNA, 1160 bp, Homo sapiens
tccaggttgaagggtcgccagagcaacagtttgaggattggggaactaagctggaggacacccaagtactcttaagcaatcctcgtagtgagtaagatggggagcttggaagcatcagggtaacaatgggataagtgtgggctctggttcgttccaccttggaactttttcacactgatgatgaggaggaaggagagtatgacgaagtaacagaagaggttacagagcaggtttatttgccagctaaagctaaagtggcacaggaggaagaggttcatccctacccttctgcaccccctcattattattttgaagaaaaagagtggccagaccctccagatctttcttttctggaggacactgggcgaaaagtagttgccccagtgactgagcagcacctcgagcgactgctgtcagttctattcaggcaggagttcagcaggctagacgagagggatgatgccgtagagcagcttagaggagtgtgcattagagcttgggaaaaaatcacttcaggtggagaacaatacccttcctttagtgctgtaaaacagggaccaaaagaactgtatgcagattttatagcttggaatctcttaagacaggagtctcttaaaaaggtgatttcagattcagctgctcaggatatagtgttgcagttattagcttttggcaatgttaatctcgattgccaggctgctttgcgacctattagagggaaagcacatttagttgattatatcaaggcctgtgacggtatcggagctaagcaagacagtgaacggtttgcatttacaattcctgtggtaaacaatctgcagcctgctaagcattttcattatttcacagatgggtctagcaatggtaaagcttcttattctggatcaaaaggccaaaaccagcagccaatttggatactatcaagacacctaaaaccttatcatgagccagatgccaaggaagagattccaggaggatcccgaggaccccctggttgcagccatgtcgagactgatgctgaggaggaccctaactgtcacgagcaacacccgttgaacacagccacccacctggggacagatcaagaagctgtcacagatggtggaagaaaacctgaggaaagcgggacaactggtcacaatgactgtttactggaatga

SEQ ID NO: 118250 - DNA, 578 bp, Homo sapiens
gaacagcgccaacctctctccacaagccagggaccctacgacccaccgccgcaggtgagctccgcccgggcgccccctcccccaccacgcctggatccctgccgggctccccgagccgagactgtgccttctgcaacagggctgtgctccaggccagaaccagcagctgatttagataccatcaagacacctaaaaccttatcatgagccagatgctgtggaagagattctgggagaatcctgaggaccccccagttgcagccatgtcaagactgatgctgaggaggacccccaactgtcacgagcaacacccgtcgaacacagccacctacttggggaaagatcaagaagctgtcacaagcaacacccgttgaacacagccacccacctggggacagatcaagaagctgtcatagatggtggaagaaaacttgtttaggaagattgcattgcagaacgggcagaggtgctgcgcaacgaatcctatggaatcattattgattggtccccttaggggatgtttagcttgaattgcacctctcagtctgcgtgccatggccacactatgttcagctggt

SEQ ID NO: 118251 - DNA, 408 bp, Homo sapiens
ctgtagggaggctgccatgcatgccctccttcatagtgagaaggacaatcctgtgattgatgaaatagacttccttgaagcttttaaaaatattcagccctcatcgtttcgaagcgtcattggattaatggatatcaagcctgttgactgggaggagattggtggccttgaagatgtaaaactgaagttaaaacagagcattgagtggcctctgaaattcccttgggaatttgttagaatgggcctgacacaaccaaagggagttctcctctatgggccccctggatgtgctaaaaccactctggtgagggccctggccacaagctgtcactgctctttcgtttcagtgagtggagctgatctgttttcaccggttgttggagattcagaaaaagtgttgtctcagat

SEQ ID NO: 118252 - DNA, 853 bp, Homo sapiens
  misc_feature (1)...(853): n = a,t,c or g
gcctgctgaaggtgataatgagcgccaaaattttcacaaagaaaaatgagaattccactgagagactttgcggagatggggagaagaggggaccagatttccgtactgagaggtcagtctggctgctgaggcttgaggaagctgtggcaatggttcagcggggcagtcgagcacccgagagccgcgtagtggcccaggtgttgacgctgttggacggcgccagtggggaccgcgaggtcgtggttgtgggagccactaaccggccggacgctctagacccagcgctgcgtagacccgggagatttgaccgagaggtggtcattgggactcccacacttaaacaaagaaaggaaattctgcaagtgattacctcgaagatgcccatctccagtcatgttgatttgggccttcttgcagaaatgacagttggctatgttggtgccgacctgacagcactctgtagggaggctgccatgcatgccctccttcatagtgagaagaaccaggacaatcctgtgattgatgaaatagacttccttgaagcttttaaaaatattcagccctcatcgttttcgaagcgtcattgggattaatgggtatcaagcctgttgactgggaggagattggtggccttgaagatgtaaaacntgaagttaaaacagcccattgtcacttcgtcagaagtcgggtcactgcccagttgcgcgagactcccaacgggccttcttgcgacgctcgggtctgggtccgggtccggacgtgcaacagaagccgtcagtggccccgctggctaaaaaagggcaagcatcggaggctcgagccagcggccgcggcgcttcccgacagttcctaa

SEQ ID NO: 118253 - DNA, 498 bp, Homo sapiens
ggatatataagttatttgttgcagcataacaaatgatcccgcaaaattttgtggcttcaaacacgaaatgtttattctctaacaatttctacagatcaggaattcaagaacagcttatctctgtagttacactgcaggatctctcatgcctttacttacaatcaagatgtcagccaaagctatagtcatctaacatctttactgatgaacagtccacttccaagatgacttattcacacgcctggcctgggagggatttttttaagctgagagaattaacagcataaccgtattttcagaaacactgaagagatttcttcaggcttcaggaaaatgattccatagagacatacataattccaggaattaagatcaacaggaaacataagatgcaagtaaatataaatcagtactgactgtataaaacaaccctgtatagttttacaacttttatgtatatctaaactttccaaaataaaatgcttttaaaaacaaaaa

SEQ ID NO: 118254 - DNA, 1865 bp, Homo sapiens
atgggggatgtgaatcagtcggtggcctcagacttcattctggtgggcctcttcagtcactcaggatcacgccagctcctcttctccctggtggctgtcatgtttgtcataggccttctgggcaacaccgttcttctcttcttgatccgtgtggactcccggctccatacacccatgtacttcctgctcagccagctctccctgtttgacattggctgtcccatggtcaccatccccaagatggcatcagactttctgcggggagaaggtgccacctcctatggaggtggtgcagctcaaatattcttcctcacactgatgggtgtggctgagggcgtcctgttggtcctcatgtcttatgaccgttatgttgctgtgtgccagcccctgcagtatcctgtacttatgagacgccaggtatgtctgctgatgatgggctcctcctgggtggtaggtgtgctcaacgcctccatccagacctccatcaccctgcattttccctactgtgcctcccgtattgtggatcacttcttctgtgaggtgccagccctactgaagctctcctgtgcagatacctgtgcctacgagatggcgctgtccacctcaggggtgctgatcctaatgctccctctttccctcatcgccacctcctacggccacgtgttgcaggctgttctaagcatgcgctcagaggaggccagacacaaggctgtcaccacctgctcctcgcacatcacggtagtggggctcttttatggtgccgccgtgttcatgtacatggtgccttgcgcctaccacagtccacagcaggataacgtggtttccctcttctatagccttgtcacccctacactcaacccccttatctacagtctgaggaatccggaggaaagaagtcatcgtggagtgaaactcaatgaatgtaatcagtgttttaaagtcttcagcacgaaatctaacctaactcagcacaagagaattcatactggagaaaaaccctatgactgtagtcaatgtgggaagtccttcagtagcagatcttaccttactattcataagagaatccataatggggagaaaccctatgaatgcaatcactgtgggaaagcatttagtgatccctcatcccttagactgcatttgagaattcacactggagaaaaaccctatgaatgtaaccagtgttttcacgttttccgcaccagttgtaacctcaaaagccacaagaggattcacacgggggagaatcaccatgaatgtaatcagtgtggaaaagctttcagcacaaggtcctctctcactgggcacaatagcattcatacaggggagaaaccttatgaatgtcacgattgtgggaaaaccttcaggaagagctcctatctgacacagcacgtaagaactcatactggagaaaaaccctatgaatgtaacgagtgtgggaaatccttcagcagtagcttttctcttactgtgcacaagagaatacataccggagagaaaccctacgagtgcagtgactgtggaaaagcctttaataatctctcagctgtgaagaaacacttaagaactcacactggagaaaaaccctatgaatgtaatcattgtgggaaatccttcacaagtaactcctatctttctgtgcacaagagaatacataatagatggatatgaattactgcaggaacttctggaggaaagcactcattgatctttcatccctaagatagtttgagagagctcacactggatatataagttatttgttgcagcataacaaatgatccccgcaaattttgtggcttcaaacacgaaatgtttattctctaacaatttctacagatcaggaattcaagaacagcttatct

SEQ ID NO: 118255 - DNA, 264 bp, Homo sapiens
  misc_feature (1)...(264): n = a,t,c or g
ctggntcttgaaagaacatgggaggagtaaaagcagagcctcggttctcaccaggttccatttncacacgctggtctaccacatcctggcaactntggatggacactgggccaaccagctggcagccgtggctcaggnagctcgtntggctgggacacaggcctgcgccacagaaaccatagacaccagccgagtgtctctgagggcaccccaggattgtnttaaacccaaacaagccagtagtagaatggcacagagagggga

SEQ ID NO: 118256 - DNA, 533 bp, Homo sapiens
attagatccatttgcatctgccccctgcatggcctctccaacggggccatgaatatgctggaggtgtttgtgtctagcctggaggagtttcagccagacctggtggtcctttctggattgcacatgatggagggacaaagcaaggagctccagaggaagagactcttggaggtaatggcactgttacagaatttcacagatctcagctggtggttttcttcaggttccagcctctcttggcatctgctgccttgtttcctgtggaaacagcaagcagctctgcacggttcttctcatccttgccttgcagaagagcctgtttatttttgcctctgtcacttcctgaagaaatcaatgtattttcaatacagtgtggctcctttctcctaggttcagttaggtcgtgtttcctagcagtgtcactattcaagggttgagtccacatcttgctctctggagaatgtcaatgtaatgtatttttcccatcgtacagagtctttgttgatttgcaaaatgttggatttggggttcat

SEQ ID NO: 118257 - DNA, 2308 bp, Homo sapiens
  misc_feature (1)...(2308): n = a,t,c or g
tgaattcctcaggggtgaagctcttgcaggcacttggccttagtcctgggaatgggaaagatcacagcattctgcattcaaggaatgatctggaggaagccttcattcacttcatggggaagggagcagctgctgagcgcttcttcagtgataaggaaacttttcacgacattgcccaggttgcgtcagagttcccaggagcccagcactatgtaggaggaaatgcagctttaattggacagaaatttgcagccaactcagatttaaaggttcttctttgcggtccagttggtccaaagctacatgagcttcttgatgacaatgtctttgttccacccagagtncatttgcaggaagtggatgagttccacctcattttagagtatcaagcaggggaggagtggggccagttaaaagctccccatgccaaccgattcatcttctctcacgacctctccaacggggccatgaatatgctggaggtgtttgtgtctagcctgggaggagtttcagccagacctgggtggtcctctctggattgcacatgatggagggacaaagcaaggagctccagaggaagagactcttggaggttgtaacctccatttcttgacatccccactggtattccagtttcacctagagctgggccagtatgactaacaggggagctcattgagcagcattgttccttcagcagggtctttcccgcggtgacttcccttgggctgaatgaacaggagctgttatttctcacccagtcagcctcttggaccttaattcttctctctcttcctgggaacggttgttcctgatgtgggcatggtcagtgacatcctcttctggatcttgaaagaacatgggaggagtaaaagcagagcctcggatctcaccaggatccatttccacacgctggtctaccacatcctggcaactgtggatggacactgggccaaccagctggcagccgtggctgcaggagctcgtgtggctggggacacaggcctgcgccacagaaaccataggacaccagccgagtgtctcttgagggcaccccaagagtttcatgacttcccattcggaggcaggctccagggattgtattaaacccaaacaagccagtagtagaatggcacagagagggattatccttccacttcacacccagtattggtgtgtaaaagaccccattcgaactgtaggccttgggagatgccatttcagccgaaggacttcttctatttcggaagtacaccctcactattaggaagattcttaggggtaattttttctgaggaaggagaactagccaactttaagaattacaggaagaaagtggtttggaagacagccaaagaaataaaaggcagatttaaattgtatcaggtacattccagcctgttggcaactccataaaaacatttcagattttaatccgaatttagctaatggatactgggatttttgttttttatgttgagtgtcacagagctaaaaactcagttcccaaatgcccagtttatgcagcgccatcaggtattttaagctaaacttcttcacccctgagagcatgtcagctggagaaaagcagttcttccttgcccacttgagaagtgcacgcccactcacccaacatcctggtctctaggaaagcctcatgtgaggttcctctttctttcagctcagtgcccatgggcaaggatcatgatttccatttccgtgttacaatgacaatatttaatgagcataaccttctcagtctcctgctctcaaattttaggacagagccgctaagggacaaaaacaatcccctccccggtgcttttatgattggcagcaaggggctgggggagtcctctgagggactctttttcacttgcagttgtcctggaaaaccccgggtggccgtccatgaagcctgaaggatcaatgcttcccctcgggccgtgccccaaaaggtttatagggctggcctggtgaaaggttccacgtggccccaggctgaaccttccattgccctagcttttggatgtgcttttctgcccataaagactgatttttgttccgttctgagcctccaaggaattttgttttttacaactgggaatatgctcctggtgtgtgttaacagatccatgggatgttttatgttttcactgactcatttaaagagtttgacctcagagctccaggatcatcagtaaatttgtcatgttatatatttatttttttataaatcaagacttctgtgtgctcttaaatatattacacaccaatttacatttcgggaaaaaaaaaaaaaaaaaaa

SEQ ID NO: 118258 - DNA, 738 bp, Homo sapiens
atgataaagaagaatgctatgctagataaacagcatggttctatgacagttcgtggcaaaggcactgccagaggaagtgctaacctcatggcaaatggaaatcacaggaaacatattgtgactaagggcacaacaacagcacaactgagtgttaacccttcacaaaccagcgtgcacattgtctacaacctcataaaaatagctacacaaaataaggaaatagctatggcatctgcgggaccgagctcctttcatttttacttcagagatggaatactttattacagagggtgggaaaaaccacagcattttcaagattttgtggaactttgctgtcgtgcttataatattatcagaaagcacagccaactgctcttgaacctgctggaaatgaactcttacaatggatatgttggtctgcttcataatatcctacagctggagagggaagggcttgcaacaaaggaggagttgcaacaaaacttcccacctttgtctgtgtctctgccttttgatcagagcatcaatcagatatcagaacacagatccctgatatttaatggacagtatccttatggctcctgctggtttcggcaagctgtgtgcaagctgatccagaaatacgcaggagaatggggatggatagccactgctgagttaagagctgaaattgacctaaatgtactgaaatttactatccaggtcctctcctggaaggtgcaagcaagccttcagtag

SEQ ID NO: 118259 - DNA, 4498 bp, Homo sapiens
ggctcgagcggccgcccgggcaggttgagatcgtgtttcatttcaggaagatatatgcgtcaggaaaatttctatcttcttttgtattatcaaggagatatttggagcagagtcaaccctctcagttacataaaataaaaaatggcatattcttggcaaacggatccaaatcctaatgaatcacacgaaaagcagtatgaacaccaagaatttctctttgtaaatcaaccccattcttctagccaagtcagtctgggttttgatcagatagtagatgagatcagtggcaaaattccacactacgagagtgaaattgatgaaaacaccttttttgtgcccactgcaccaaaatgggactcaacagggcattcattaaatgaagcacaccaaatatccttgaatgaattcacttctaaaagccgtgaactctcctggcatcaagttagcaaagcaccagcaattggttttagtccttctgtgttaccaaaacctcaaaatacgaataaagaatgctcctggggaagccccataggaaaacatcatggtgctgatgattccagattcagtattttagctccatcattcacaagtttggataaaattaatctagagaaagaattagaaaatgaaaatcataactaccatataggatttgaaagtagcattcctccaacaaattcatccttctcaagtgacttcatgccgaaagaagagaataaaaggagtggacatgtgaacattgtggaaccatctttgatgcttttgaaaggctctcttcaacccggaatgtgggaaagtacatggcagaagaatatagagtcaataggttgttccattcagctagtggaagtacctcaaagcagcaatacgagtctggcctctttttgcaacaaagtaaaaaaaatcagagaaagatatcatgcagctgatgttaatttcaattctgggaagatctggagcactactacagcatttccgtatcagctcttttctaagaccaagtttaatatacatatttttattgataactcaacacaacctcttcattttatgccatgtgctaattatcttgtcaaagatctaattgcagaaattctgcatttttgcacaaatgaccagctactccccaaagatcatattctaagtgtatgtggctctgaagaatttttacaaaacgaccactgtttggggagccacaaaatgtttcaaaaagataaatctgttattcagctccacctgcagaaaagtagggaagctccaggaaagctatctcgaaagcatgaagaggaccacagtcagttttatctgaatcaacttctagaatttatgcatatttggaaagtatccagacaatgtctcttaacactcatcagaaaatatgacttccacctgaaatacctattgaaaacccaggaaaacgtgtataatattattgaagaagttaaaaaaatatgcagtgttctagggtgtgtggaaaccaaacaaattacagatgcagtaaatgaactaagtctaattcttcagagaaaaggagagaatttttatcaaagttcagagacttcagcaaaaggcttgatagagaaggtaacaactgaactatccacatccatctaccagctaatcaatgtctactgtaacagcttttatgcagattttcagcctgtaaatgtacctagatgcacttcctatctaaatcccgggcttccttcccacctcagcttcacagtgtatgcagcacacaacattccagaaacctgggtgcacaggatcaattttccccttgaaataaagtcacttccaagggaatccatgctcactgtaaaactgtttgggattgcctgtgcaaccaacaatgcaaatttactggcgtggacttgtcttccactgtttccaaaagaaaaatccattctcgggtctatgctgttcagcatgacattacagagtgagcctcccgtagaaatgataactccaggagtgtgggatgtaagtcagccatccccggtgaccctgcagattgattttccagctactgggtgggagtatatgaaacctgattctgaagagaatagaagtaatcttgaagagccactaaaggagtgtataaaacatattgccagactttcacagaaacagactcccctactactctctgaagaaaagaaaagatatttatggttttatcgcttctactgcaataatgaaaactgctcccttcctttagtcctgggtagtgcccctggatgggatgaaaggactgtttcagaaatgcataccattttgagaagatggacattttctcaacctttagaggctcttgggcttttgacttccagttttccagatcaagaaattcgtaaagtggcagttcaacaattagacaacctcttgaatgatgaactactggaatatctcccacagctagttcaggctgtcaagtttgaatggaaccttgagagtcctttagtgcaacttctactccaccgctccttgcagagcatccaggttgcccatcgtctttactggctgctaaaaaatgcagaaaatgaagcttattttaaaagctggtatcagaagctactagctgctctccaattctgtgcaggtaaagccttgaatgatgagttttccaaggagcagaaacttatcaaaattctgggagatattggggaaagagtcaagtctgccagtgaccatcaaagacaggaggtactgaagaaagaaattggcagactagaagagttctttcaagatgtaaatacttgtcatcttcctctgaaccctgccctatgtataaaagggattgatcacgatgcatgttcatattttacatctaatgctttgccattgaagattactttcatcaatgctaatctgatgggcaaaaacatcagcattatttttaaggctggagatgatcttcgtcaggatatgcttgttctgcagcttattcaagtgatggacaatatttggctgcaggaaggcttggatatgcaaatgatcatttatagatgtctatccacaggaaaagaccaacgattggtgcagatggtacctgatgctgtgaccctagcaaagattcatcgccattctggactgataggaccattgaaagaaaataccattaaaaagtggttcagtcagcacaaccacttaaaggcagattatgaaaaggccttgaggaactttttctactcctgtgctggctggtgtgtggtaacattcatcctgggagtatgtgaccgtcacaatgataatatcatgctgacaaagtcgggccacatgtttcatattgactttggaaaattcttaggtcatgcacaaacatttggagggataaaaagggaccgagctcctttcatttttacttcagagatgggaatactttattacagagggtggggaaaaacccacagcattttcaagattttgtgggaactttgctgtcgtgcttataatattatcagaaagcacagccaactgctcttggaacctgctgggaaatgatgctgtatgcagggactgcctgagctaagtgggatttcaagacctgaaatatgtgtataataatcttcgtccacaagacacagacctggaagcaacaagtcattttaccaagaaaataaaggaaagtctggagtgtttccctgttaaattgaataacttgatccacacacttgcacaaatgtcagccataagccctgccaaatctacttcacagacttttcctcaggaatcctgtttgctgagtacaactaggtcgattgaaagagcaacaattttagggttcagcaagaaatccagtaatctgtatctgatccaggtgacacacagcaacaacgaaacaagcctgacagaaaaatcatttgagcagttttcaaaacttcacagccaacttcagaagcagtttgcatcactgactctcccagagtttcctcattggtggcacctaccttttacaaattcagatcacagaagattcagagatctaaatcattacatggaacagatattaaatgtatcacatgaagttacaaacagtgattgtgtacttagctttttcctctctgaggctgtgcaacaaacagttgaatcatcacctgtgtacctaggtgagaagaagtttccagacaagaagcctaaggtgcagttagtcatatcctacgaggatgtgaagctgaccatactagtgaaacacatgaaaaacattcatctcccagatggctctgcgcccagtgcacatgttgaattttatcttttaccatatcccagtgaagttctgaggaggaaaacaaaatctgttccaaaatgtacggaccccacttacaatgaaattgtagtatatgatgaagtcacagagctccaaggacatgtcttaatgcttattgtgaagagtaaaactgtatttgtgggagcaattaacatccgactctgtagtgtcccactcgataaagaaaaatggtatccattaggaaacagtataatttcaccattgctatga

SEQ ID NO: 118260 - DNA, 3153 bp, Homo sapiens
atggagaagccacggcctctggaggcaccatcagcatggccacaggacgatgtacagtgtggggtgactgtgggaatggacggggcagctgtgagggcaaaccgaactccctggcctcaagacctggaacaaaccaaatggattgaaatcaaaaagagtgcttttacctggagttcccaactgtctctaaatcgtggcttcctcacctgtaaagatgagaataataatgcagggctgctgagggtatcctcatacagctctcgtgaggatcaactcaaaaacatcgcctcggactccctcttcatgctccccggaggcctctgccagtctcctactggtacctcccattgctccaaccaaatggaaacccaagggcaagggagcccgggtggagcagtccgtggagataaggccctggggcctgagaaggctagacaaggatgtggaatgaatgggagtgggaagtactgcaagtttcgtgtcctggcaatccaaggcaaaccagaatgtttggccaccctaatgcagcctgatcttggagacagccctgggctgcgagagatgaacgtggtagagcacctccgggccagcttcccagtggagcaatggtattggagaggtggacaacgtggggaggctgagggagctagatcttcgaaggcagagaacaacacgtcgctcatctgcaacttccgtctggattacgcccctattgagaaacagtgggatttgcacttcgctgattactttgcggaagatctcaagctgctcgccccgttagcaaaagatgggctggtggatgtggatgagaagggaatacaggtgacggcgaaaggtcgcttgctgatctgcaacatttgcatgtgctttgatacctatctgcgccagaaagcgcggatgcagcagttctctcgggatttgctggggacaccccttgtctctacgattcctgtggactttactactgaaataaactctttttctggggctgataatactggaagtttccatgttgcatgtacagttagtacctgcactgagacgtcgattggcagcgcaggactgctgtggcgcaggctgacaaatcagcgcgtgcgtgccacttccactacgccggatatcatcatcatgagcattttgctgatccagtgtctgttggggctaagtaccataccgttttcagcacagtatcctgatggtagcgaaatgatgaagctggtgggttgggcgcaaagcattgtcactttccgtggtggatcgtcagagatgctcaacggcgtagcgttcgtcttccgcctgcatctggtgttgggaatgaccatcttcctgctcttcccgttcacccgactggtgcatgtgtggagcgcgccgtttgagtactttactcgtcgatatcaaattgtgtaccacgtcgatgcttttacctcacaaccgtttcgcggcaattctgccggtgttgttttccccgccgataatcttagcgaagcgcaaatgcagcttatcgcccgcgagttaggccattcggaaactgcttttctgctgcacagcgacgacagcgatgtgcgcatccgctactttacgccaacggttgaagtgccgatttgcgcggtcatggcggaagtcaaacgcaaatggggcgaccgctttgttgccgtcacgcaaaaaaataccggtaaaggtggtgcgctgatgaatggcctcaattacgccacctgcgaccaggtttttttaagtgatgccgacacctatgttccgcccgatcaagacggaatgggctatatgctggcagaaattgagcgcggtgccgatgccgtaggcggcattccctctactgcgttgaaaggcgcgggtctgttaccgcacatccgcgcgaccgtaaagttgccgatgattgttatgaagcgcacgctacagcagctcctgggtggcgcaccgtttattatcagcggtgcctgcgggatgttccgtactgatgtattgcgtaagttcggtttctcggatcgtactaaagtcgaagaccttgatctcacctggacattggtggcaaacggctaccgtattcggcaggcgaatcgctgcatcgtatacccacaggaatgcaacagcccgcgtgaggagtggcgtcgctggcggcgttggattgtgggatacgcgcccgggggacggagcgagactctgctagaggatcccccggacggcagcgtcacgcagagtcagtttgacgccgtgggcaggctcagggcacagacggatgccgcaggtatcaacagagtacagcccggatgtggtgacgggcctcatcacgcgcataaccacgccggatgcagggcatcggcgttttactataaccaccacaaccagttaacgtcagccaccgggcctgacgggctggaattgcgccgggaatatgatgaattgggccgtctgattcaggaaactgcccctgacggcgatatcacccgctaccgttatgataatccacacagtgacttaccctgcgcaacggaagatgccaccggcagccggaaaaccatgacgtggagccgttacggtcagttgctgagcttcaccgactgttccggttatgtaacccgttatgaccatgaccgcttcgggcagatgacggcggtgcaccgcgaggaagggctgagtcagtaccgcgcatacgacagccgtggacagttaattgccgtgaaagacacgcagggccatgaaacgcggtatgaatacaacgccgccggtgacctgaccaccgtcattgccccggacggcagcagaaacgggacacagtacgatgcgtggggaaaagccatctgtaccacgcagggcggtctgacgcgcagtatggaatacgatgctgccggacgggtcatccgcctgaccagtgaaaacggcagccacaccaccttccgttacgatgtactcgaccggctgatacaggaaaccggctttgacggccgcacacagcgttatcaccacgacctgaccggcaaacttatccgcagcgaggatgaggggctggtcacccactggcactatgacgaagcagaccgcctcacgcaccgcaccgtgaatggcgaaaccgcagagcggtggcagtatgacgaacgcggctggctgacagacatcagccatatcagcgaaggatcctga

SEQ ID NO: 118261 - DNA, 1206 bp, Homo sapiens
atgtggccggataaccgtatcgcccgtgacgcgcactatctttaccggtatgaccgtcacggcaggctgacagagaaaaccgacctcatcccggaaggggttatccgcacggatgatgagcggactcaccggtaccattacgacagtcagcaccggctggtgcactacacgcggacacaatatgaagagccgctggtcgaaagtcgctatctttacgacccgctgggccgcagggtggcaaaacgggtgtggcggcgtgaacgggacctgacgggctggatgtcgctgtcacggaaaccgcaagtgacctggtacggctgggacggcgaccggctgaccacaatacagaacgacagaacccgcatccagacgatttatcagccggggagcttcacgccactcatcagagttgaaaccgccaccggtgagctggcgaaaacgcagcgccgcagcctggcggatgcgcttcagcagtccggcggcgaagacggtggcagtgtggtgttcccgccggtgctggtgcagatgctcgaccggctggaaagtgaaatcctggctgaccgggtgagtgaggaaagccgccgctggctggcatcgtgcggcctgaccgtggagcagatgcaaaaccagatggacccggtgtacacgccggcgcgaaaaatccacctgtaccactgcgaccatcgcggcctgccgctggcttctcttgtagatcgccattttttttccgcgagggtatatgtttcgtggtgtctatgttttttcattgttgtatacgcgtttatcatctgggtcatgggctcgcggttccccaggggggaatataggcgtccagagggagcaaatcggcatgaggtcaataggacaggcgggaggaggctatgggtttccattgtcgtgtgtaatcccccagtgaaggtaacaaatggaggggcaacaaagtcggagaaaaattggatgggcgtggggtatggcctgggcttggctagatgtaagtatgttgaagtgctactggatgggactgtggtggatgcagctggctgctgcttagttatgctggcactggctatggtagtgctagtgcctggggggagcactgacgacctgctggaggatgcccacagatgcacaaatctgcaccaaggagacggcaatgtggctgggctggtgcactgcagcaatgcaatggaggggcaatgtggatag

SEQ ID NO: 118262 - DNA, 1473 bp, Homo sapiens
  misc_feature (1)...(1473): n = a,t,c or g
atgctgcattctcgcggtttcctcgcggaagttttcggcatcctcgcgcggcataatatttcggtagacttaatcaccacgtcagaagtgagcgtggcattaacccttgataccaccggttcaacctccactggcgatacgttgctgacgcaatctctgctgatggagctttccgcactgtgtcgggtggaggtggaagaaggtctggcgctggtcgcgttgattggcaatgacctgtcaaaagcctgcggcgttggcaaagaggtattcggcgtactggaaccgttcaacattcgcatgatttgttatggcgcatccagccataacctgtgcttcctggtgcccggcgaagatgccgagcaggatggcactggcaccagcgggataggtgcccagaagaaaaaaatgtacgccaataacggcgctatagaccgaaagctgctttttgaagcgacgttcgtcacgattgaaaaatgttgtgataccaatcagaaaggcgatgacacccacgccctgggccagccaatacgcggtcatgataaatccttagcagggtctttctgctatgcctgcaggtccgaggaagggctgagtcagtaccgcgcatacgacagccgtggacagttaattgccgtgaaagacacgcagggccatgaaacgcggtatgaatacaacatcgccggtgacctgaccgccgtcattgccccggacggcagcagaaacgggacacagtacgatgcgtggggaaaggccgtccgtaccacgcagggcggccctgacgcgcagtatnggaatacgactgctgccggacgggtcatccgcctgaccagtgaaaacggcagccacaccaccttccgttacgatgtacttgaccggctgatacaggaaaccggctttgacggccgcacacagcgttatcaccacgacctgaccggcaaacttatccgcagcgaggatgagggtctggtcacccactggcactatgacgaagcagaccgcctcacgcaccgcaccgtgaagggtgaaaccgcagagcggtggcagtatgacgaacgtggctggctgacagacatcagccatatcagcgaagggcaccgggtggcggtgcattacaggtatgatgagaaaggccggctgaccggtgagcgtcagacggtgcatcacccgcagacggaagcactgctctggcagcatgagaccagacatgcgtacaacgcgcaggggctggcgaaccgctgtataccggacagcctgcccgccgtggaatggctgacctacggcagcggttacctggcaggcatgaaactcggcgacacaccgctggtggagtacacccgcgaccgcctgcaccgggaaacgctgcgcagcttcggccgttatgaactcaccaccgcttatacccctgccgggcagttacagagccagcacctgaacagcctgctgacctacaggcatgcaaacttcgcactgtaa

SEQ ID NO: 118263 - DNA, 908 bp, Homo sapiens
cccagcatggggcggataaccgtatcgccgtggacgcgcactatccttaccggtaatgccggtcccggcagggtgacagagaaaaacgaccctcatcccgaaagggggttatccgcacggatgatgagcgcacccaccggtaccattacgacagtcagcaccggctggtgcactacacgcggacacaatatgcagagccgctggtcgaaagtcgctatctttacgacccgctgggccgcagggtggcaaaacgggtatggcggcgtgaacgggacctgacgggctggatgtcgctgtcacggaaaccgcaagtgacctggtacggctgggacggcgaccgcctgaccacgatacagaacgacagaacccgcatccagacgatttatcagccggggagcttcacgccactcatcagggttgaaaccgccaccgcagtcatggaccgcatcctcaaagatcatcaaatcgtggtcgacattccccacggagaagcgtggctgcgcgatgatgaagagcgtccgatgattttgattgcgggcggcaccgggttctcttatgcccgctcgattttgctgacagcgttggcgcgtaacccaaaccgtgatatcaccatttactggggcgggcgtgaagagcagcatctgtatgatctctgcgagcttgaggcgctttcgttgaagcatcctggtctgcaagtggtgccggtggttgaacaaccggaagcgggctggcgtgggcgtactggcaccgtgttaacggcggtattgcaggatcacggtacgctggcagagcatgatatctatattgccggacgttttgagatggcgaaaattgcccgcgatctgttttgcagtgagcgtaatgcgcgggaagatcgcctgtttggcgatgcgtttgcatttatctga

SEQ ID NO: 118264 - DNA, 3258 bp, Homo sapiens
atgacccaaagtaacgggcagacgttggttgttgataccgatgaacagccacgcactgacgccagcgcagaaggcttagcccgtttaaatccttcatttgatagtctcggttctgtgacagcgggtaatgcatcatccataaacgatggcgcagctgcggtaatgatgatgagcgaagccaaagcacgagcgttgaatttacccgtgctggcccgcattcgcgcatttgccagcgttggtgtagatccggcattgatgggaattgcgccggtgtatgcgacccgccgttgcctggagcgtgtaggctggcagttggctgaagtcactccgccagaagaagcgaaagagatcccacaggttgcaggctctctggaagaagcactgaacgaactggatctggaccgcgagttcctgaaagccggtggcgtgttcactgacgaagcaattgatgcgtacatcgctctgcgtcgcgaagaagatgaccgcgtgcgcctgggatcggtggcaagcacatcacgccgggatgcgacgcaaatgcgtcttatccggcctacacgggttgatgatgtggtaggccggagcagtgtggcactggaaaaccagggcaaatgggcgcaggcggcagcacttcagcggcaacgactggcgctggaccccggcagcgtatggattacttaccgactttcgcaggatctctggcaggccggacaacgcagccaggccgatacgttaatgcgcaatctggcgcagcagaagtcgaacgacccggagcaggtttacgcttacgggctgtacctctctggtcatgaccaggacagagcggcgctggcgcatatcaatagcctgccgcgtgcgcagtggaacagcaatattcaggagctggttaatcgactgcaaagcgatcaggtgctggaaaccgctaaccgcctgcgagaaagcggcaaagaggcagaagcggaagcgatgctgcgccagcaaccaccttccacgcgtattgacctcacgctggctgactgggcgcaacaacggggatcctctagagtcaccagcagcagcaagctgcatggttgcggcattggcggattaccatgtgccggaaagaccgtgcagctctattcaagaaggtggtccccacaaagacagcgggaagaaatgcggggcccaggaagagcactccagagcgagactcaccgaagagttatcggtcaccggtcaccggagtacagtacagcacacggcaggctgacggcgttcacaccacgcagcgaatctggatatccgcatccgtatgccacagacccggcaggtaaccgcctgcccgacccggagctgcacccggacagcaccctcagcatgtggccggataaccgtatcgcccgtgacgcgcactatctttaccggtatgaccgtcacggcaggctgacagagaaaaccgacctcatcccggaaggggttatccgcacggatgatgagcggactcaccggtaccattacgacagtcagcaccggctggtgcactacacgcggacacaatatgaagagccgctggtcgaaagtcgctatctttacgacccgctgggccgcagggtggcaaaacgggtgtggcggcgtgaacgggacctgacgggctggatgtcgctgtcacggaaaccgcaagtgacctggtacggctgggacggcgaccggctgaccacaatacagaacgacagaacccgcatccagacgatttatcagccggggagcttcacgccactcatcagagttgaaaccgccaccggtgagctggcgaaaacgcagcgccgcagcctggcggatgcgcttcagcagtccggcggcgaagacggtggcagtgtggtgttcccgccggtgctggtgcagatgctcgaccggctggaaagtgaaatcctggctgaccgggtgagtgaggaaagccgccgctggctggcatcgtgcggcctgaccgtggagcagatgcaaaaccagatggacccggtgtacacgccggcgcgaaaaatccacctgtaccactgcgaccatcgcggcctgccgctggcccttatcagcaaggaagggacaacagaatggtgcgcagaatacgatgaatggggcaacctgctgaatgaagagaacccgcatcagctgcagcagcttatccgcctgccggggcagcagtatgatgaggagtccggcctgtattacaaccgccaccgctattatgacccgctgcaggggcggtatatcactcaggatccgattgggctgaaggggggatggaatttttatcagtatccgttgaatccggtcataaatgtagatccgcaaggtttggttgatataaatttataccccgaaagtgatcttatccattctgtagctgatgagattaatatcccaggcgttttcacaatcggggggcatggtacccccacatctattgaatccgcaacgcgcagtatcatgacagagcgttatggcgttgatgaagtagaacggcttctggactcgtgccacgcgctgatgaactacggcgtggaccggtacaaacgcccgcaaaaaatctcgctgcaagaagagaaagcccggcagaaaagtcgcgaagagtatctgcaaagtcaggtcaatatgctctggcgtaccctgccgaagcgcgaggaagagaaaacggttgctgaagcgcgccgctatccgtccgaaccacaagaaaacctgctctattttatggagaaaaatgcgccactgctggaatcatggcagcgtgaaatcctgcgtattgtgcgtaaggtgagccagtatttttatccgcaaaaacagactcaggtgatgaacgaaggctgggcgaccttctggcactacaccatccttaaccatctgtatgatgaagggaaagtaacggaacgttttatgctggagtttttgcacagccacaccaatgtggtcttccagcccccctataacagcccgtggtacagcggcatcaacccgtatgccctcgggttcgccatgttccaggatattaaacggatttgtcagtcgccaacggaagaagacaaatactggttcccggatatcgccggttccgactggctggaaacgctgcatttcgcgatgcgtgatttcaaagatgagagttttatcagccagttcctgtcaccgaaagtgatgcgtgatttccgcttcttcaccgtgctggatgacgatcggcctaatatctggggatttccgatattcctaatgaagaaggtgtcgggagatcggtaa

SEQ ID NO: 118265 - DNA, 1838 bp, Homo sapiens
atggagaagctgctggtggccagctctgtaccgtccgtcatgcctggcatcgcgcacgcgttcccgtccgcggggagattcaagggcgcgatattcatgccgtcgccttcaaagacgtgtctcgtaacagttacgcgttcatacaggtttgagtttaagactttagatctctgccgaatgaccatgcagaacatcatgccgttgtcagccgccatgttccaaagcgagcgcaagaacccggccccgcagtgcccaccgcggctggagatgcagatgctgatgccagtgtcctggagccgcatgcccaaccacttcctgcagagtgatcccccactgggctctatgacgaagcagaccgcctcacgcacgcaccgtgaatgtgcgaaaccgcagagcggtggcagtatgacgaacgtgctggctgacagacatcagccatatcagcgaagggcaccgggtggcggtcattacaggtatgatgagaaaggccggctgaccggtgagcgtcagacgggcatcacccgcagacggaagcactgctctggcagcatgagaccagacatcgtacaacgcgcaggggctggcgaaccgctgtataccggacagcctgccgccgtggaatggctgacctacggcagcggttacctggcaggcatgaaaccggcgacacaccgctgcgaatctggatatccgcatcccgtatgccacagacccggcagtaaccgcctgcccgacccggagctgcacccggacagcaccctcagcatggggcggataaccgtatcgcccgtgacgcgcactatctttaccggtatgacgtcacggcaggctgacggagaaaaccgacctcatcccggaaggggttaccgcacggatgatgagcgcacccaccggtaccattacgacagtcagcacggctggtgcactacacgcggacacaatatgcagagccgctggtcgaaagcgctatctttacgacccgctgggccgcagggtggccaaacggaaagaagaacccgcatccagacgatgtatcagccggggagcttcacgccactcacagggttgaaaccgccaccggtgagcaggcgaaaacacagcgccacagctggcggatacccttcagcagtccgacggcgaagacggaggcagtgctcgtgttcccacacggtgctaggtgcagatgctcagaccggactggaaagtgaatcatcggctgaccgggtgcgctcttttatcagcttagcaaatcaaagtaagtgtgttgagcatgcttactgaaggtggcagtgtcatctgggagtttgctggtggtcgtctcaccagatccctgctgtgcctcttactggcagtgtcacccgctggcactgtcacctggcttcctcatctgaagctggcagtgtcgcctggcttcctcatctgtcagagggccacagtaacaggacctcctccccagagttgttgaggagcaggatgtgtgcctggcacaccctgagtgcccagtcagtgcacctggtgtcactgtatattttggagattttagccctgatgaattcaatcaattctttgtgactcctcgacttcagttgagcctaaacatcatttcggtcacaaatttatctggttcccaacgggtggacgcttgggaacgttctcttggacgtctcctccgctgcccctgccggtatgctgccctgcctttatgtgtcgaccatctacgaacggactccccctcctctgatttgaacggtgccaacacaacgacaccacgacgactgacacacgtcacctgtgtgcctgtcaccctgaccactggcagcttgtgtgaacccaactga

SEQ ID NO: 118266 - DNA, 1711 bp, Homo sapiens
ttaatcgtgcttgttttccccttgcattttctgatgctttgacatcttactgtccttgctgacattggaggaattgcccttccctggaatagctaattccttgtagattctggatattagacctttgtcagatggatagattacaaaaatgctctcccgttctgtaggttgcctgtacactctgatgatagtttcttttgctgtgcagaagctctttagtttaattagatcccatttgtcaattttggcttttgttgccattgcttttggtgttttagtcatgaagtctttgtccatgactatgtcctgaatggtattacctaggttttcttctagggtttttatggttttaggttttacatttaaatctttaatccatcttgagttaatttctagtttattgagtgtttttagcatgaagcgatgttcagttttattgaaggccttttctgcatctattgagataatcatgtggtttttgtcgttggttctttggtctttgctgttgatgagtttttccttcagatggagtttttgcatggtcatcctttttcttgatgttgatgctattgctttctgtttgttagttttccttagaacagtcaggcacttctgcaggtctcctgaagtttgctgggggtccattccagaccctgtttgcctgggtatcaccagcagaggcttgggcagtatggccattttcacgatattgattcttcctacccatgagcatggaatgttcttccatttgtttgtatcctcttttatttcattgcgcagtggtttgtagttctccttgaagaggtccttcacatcccttgtaagttggattcctaggtattttattctctgcaagtcacaggggatgcgatggcttggcttgggctcagaggcctgatattcctgccttcttatattacataagaaaaataacacaaaatagtgttgaagtgttggggcggcgaaaatttttgggcggtggtatggagagagaatgggtgatgtttctcagggctgcttcaagcgggattaggggcagcgtgggaaccaatttcaaatccgagtcacggcaccaaatttcatgtgcgtctgtgtgaagagaccaccaaacaggctttgtgtgagcaataaagctgtttatttcacctgggtgcaggtaggctttcagatttttgaaaagcctgaacccattgaagagatatgcaaggtatgttggaggccgatggcttagagaggattgggcctttgagaggctaaggtaagcttttatttgaattgatattctaatacaaagagttagatgctcagttattaaatcaaattctggattagcctgatgagaatggagtttttttaataagcaatcttccagttgatcgcatcggctcctgaggcttctgcattcttcacatagttctcgagccttggttttcagctccatcagctcctttaagcacttctctgtattggttattctagttatacattcttctaaatttctttcaaagttttcaacttctttgcctttggtttgaatgtcctcccgtagctcagagtaatttgatcgtctgaagccttcttctctcagctcgtcaaagtcattctccatccagcttttttccgttgctggtgaggaactgcgttcctttggaggaggagaggtgctctgctttttagagtttccagtttttctgttctgttttttccccat

SEQ ID NO: 118267 - DNA, 402 bp, Homo sapiens
tcactgcgattgtgacgcgtcttgataacggattttccactcggtgatcgtgcgttgctgcccataaaggcggcgtttacaaaacctcagtttctgttcatctatgctcaggatgtggctgagatcaccccttagaaggtaacgacccccagggaacagtctcatagtatcagggaccgggacgcaccctaatcccactcgaagcagccctgagaaacatcgcccattctctctccataccacccccgaaaattttcgccgccccaacacttcgacactattttgccttatttttctgtgggcactctctctttgcccctcacattgaactcctggaagcggggactgtgctccaattgccacaagggccctggagcagtcccaccagcttctgacaaccat

SEQ ID NO: 118268 - DNA, 1033 bp, Homo sapiens
atgaagatgccggaagcaattgctacaaaagaaaaaattgacaaatgggatctaattaaaataaagagtttcttttccacaccaaaagaaacaatcaacagagtaaacagacatcatacagaatgggaggacatatccgcaatccatctatctgacaaaggtcccatatcctacatctataagaacttaaccagatttacaagaaaaaaacaaccccattataaagtgggcaaaggaaatgaacagacgcggatcctggagagtcatccgcatctgctgaaagggctggcgtcgacgccattcgacagcgaaggtgtgcgcaccgagcgtcgcgatattattaaagatggcatcctgactcagtggctgctgaccagctactcggcgcggaaactggggctgaaaagcaccggacatgcgggcggtattcacaactggcggattgccggacaaggtctaagcttcgagcagatgctcaaagagatgggcaccgggctggtggtaccagggactgcagagaatgcccggtcatgtattcgagcttatttttatgatatacatgaaactctgtgtcgtcaagaagaaatggctctaagtgttgttgatgatcatgttcgtgaaaaattgatttggctcaggcagcaccaagaagatatgactattttgttgtcagaggtttctgcagcctgcctccactgtgaaaagactttgcagcaggatgattgtagagttgtcttggcaaaacaggaaattacaaggttactggaaacattgcagaaacagcagcagcagtttacagaagttgcagatcacattcagttggatgccagcatccctgtcacttttacaaaggataatcgagttcacattgggaccaaaaatgggaaattcgggtcgttacgttagggattgggatgggtgctgggaaaaacttactatctttgttttaagtttaaaacagggtggaatttcatggcagccccttcccaaccatttggtttttaacgtgggaaactgttggatttttaaaatt

SEQ ID NO: 118269 - DNA, 1022 bp, Homo sapiens
tccgcagccgcggcctcctgccacccgggtgcccagccccctctctcttgcacgccccttggctctccgcctcctactgggagccaggagtactctcccggaggtggctggtatggatttagttggtttttgtttttcttttttctatttaagcaccagcccagggtgaggtggaggcgcccgaaaccctaaagggacttctcaatggggttcaaggtttcagtgagggacgcagggagggggaaactgcctcagatctgcaatctgactttgggaaggccacccccaggcctgtctgtgatgttgaaggccggagacccccaacaaatgccgctggtttgctctgaattccccaaaggcccagaacgtggcagttggggattgccgggtcctccactccccgcccggacacaatggccgccggcgccctgcacaaagactgggtgagggtgaggcgctgggcctctcctcaggtcaggaagaggggtcgaggcctgctcgacggccccacagctgagaccacgttttcctggggacaggcccaaagtggctttctggcgcccccgggagggctccgcggccgggggctgcacctctccggagcccaggcgcagccaatcagcgagcccagccggcacggaagcgggacggcgaaggctcctattgggcgcaacggctgtcacgcacaggggaggcggcgctctcacctgcgagccccgcgagccgtggggggccacatcccccttcatcggcccggtagcttccagacgcaagagctcttcgcggccgagttccgcgccgcggacccgggccggcctacctggctgccggcctacctggctgactgctcgcgccgtctctcccgaacaagccggcctcagtttcccctgaagagacaggggaacttgcaagctcagtcacttccggtgccgcggcaacgcgcgcgagcccgagacgcaaagggagtgcgcgccttgagtgactggcatcaggaccggggagagatcgccccctcgcggtag

SEQ ID NO: 118270 - DNA, 1629 bp, Homo sapiens
atggagagcgcgcagggcgagtggcaatcggttctaccttatgatgaatcgagcggcttaattgcagaactggtggggcatctggcttcactgctaatgcagctaaacatctggcgtcgcgggctggcacaggagcgtccgctggaagagtggttgccggtttgtcgcgatatgctcaacgccttcttcctgccggatgcggaaaccgaagcggcgatgacgctgatcgaacaacaatggcaggcgattatcgccgaaggtttaggtgcgcagtatggcgacgcggtgccgctgtcactattgcgtgatgaactggcacagcgtctggatcaagaacgtatcagccagcgttttctcgccggaccggttaacatttgtactctgatgccaatgcgttcaattccgttcaaagtggtttgcctgctgggaatgaacgacggcgtttatccacgtcagcttgcgccattgggctttgacctgatgagccagaaaccgaagcgtggcgaccgtagccgtcgcgatgacgaccgctatctgttcctggaagcgttaatttccgcgcagcaaaaactctatatcagctatatcggtcgttccattcaggataacagtgagcgtttcccgtcggtactggtgcaggaactgatcgactacatcgggcaaagtcattatctaccgggcgatgaagcgctcaactgtgatgaaagcgaggcaagggtaaaagcgcatcttacttgcctccatacccggatgccgtttgatccacaaaactaccagccaggcgaacgacaaagctatgctcgtgaatggctacctgcggccagccaggctggtaaagcacattctgaatttgttcagccgctgccgtttaccttaccggaaaccgtgccgctgaaacgctacaacgattcggtacgagcaccaacgtgtgctgaaagccgcgcaatatttacatcaacaaggaataacacgttgcaactcttcttcaacgctaacttccgccgcccctgggcgcgtggactcgccaccaacgtcaatgatcgtcgcgccagcgttgatcatcagattcgcatgtttcaccgcatctatcagcgagttatgcgtgccaccatccgaaaaggaatcaggcgtgacgttgaggatccccattactcatctgatgcgggaacttacttgtcgcctaattcgcgacaaatcagcaacggtaactggcagtcacacattggtcgtagcccgtcactgttgttatgccgcacctgggggctgctgtttactggcaaactggttgaaaccaggtttatttggcccaataggggtgttatcccgacggggaacgagcgttatattgcccataggcggtttttaccaatggaacccgatgatatgccccaatggcgttgtccccatgcaacatggttagcggaggccaagatgtttgattcactggcaaaagccggaaaatatttaggtcaggcggcgaagctgatgattggtatgcctgattacgacaactatgtcgaacatatgcgggttaaccatcccgatcaaacgccgatgacctacgaagagtttttccgtgagcggcaggacgcgcgctacggtggaaaaggcggcgcgcgctgctgctaa

SEQ ID NO: 118271 - DNA, 1575 bp, Homo sapiens
  misc_feature (1)...(1575): n = a,t,c or g
atgaatgcccagggcgggggaccgcagttaacggtgccccaattaacgtcagcggaaaatgtcccggcatttatacgacggcccgtgttacgacatcgagccggagggcgccgcacccttgacgtccacataccctcggccattgtggctcgccggggcatttggtttaagcggccccacatgcacaaccagttcgcagggggagactaccggcacctgagtgcctccgccaatgtacatttgtccctgcttcctcgacctcgaattcgcaccagtgttatcctcttctccacgcgttataggccatcctctatggttcaagggtatgtactgcaatttggtcttgagcgccatgtcaagcatatacagtgcaagcaggttacccgtagctttgccagctacgggggcggagagaataaatgctcggtgtcggggatttcgctgtcttcagtacggaagttcacctgcaaagcatctggaaaaatgcccgcaccggatgtgcccagaatcgttgtagcgttccagcggcacggtttccgttttgtggatcaaacggcatccggtatggaggcaagtaagatgcgcttttacccttgcctcgctttcatcacgttgagcgcttcatcgcccggaacagatagcggtcgtcatcgcgacggctacggtcgccacgctcggtttctggctcatcaggtcaaagcccaatggcgcaagctgacgtggcgaaacactttgtacgggagttacgccttggggtctgagtaccaatgtgtagcggtgcggggagaaaagccgctgatacgtcttggtccagaggcgggtcagttatccgccnattgtttttttctttccccctcccctccgtcatccccgccgtcgcccaaccggagccaaacaacagaagaggaaacgaagagacaggaaggagggaaaggaaaagggaggaggaggaagagaagaaaggaaggagaaaagaaacaaaaaaacgacgaaacagacaagaaggaaagcaacacaggaaagaagaaaaagaaggagaaaaacaaacgaaacaacgaacagaaacagaaagagaaacaaagaggaggagggagaacgagcaagcaaaagcacacaaaggaacaaggaagaggaaagaagaacaaaagaaggcgaaagcagcgagacggcgaacacacaagcgacagaacccgagcagaggcagggaaggaacacacccaaagcaaaggcaaggaaaagaagagggaacagacagaacaaggaagaagccaagcagaagcgagaagaagcaggaagaacgagacgggggacaggggacggaaagacgacaagaaagagcgacgacaacagcagacagagaagaaggcaaaacccaaagccgaacacggacaggagagaacggacaccacaacgaaaaaagcaagacaaagagaaggacgaccaagcgaacggagacgaagggagagagaggaaagagcaaacacgacccacaaaacagagcagaaaaaacgaacgaggagaaagaagagggaagacagcacgaaagataaacacagaagagcagcacaggaataa

SEQ ID NO: 118272 - DNA, 692 bp, Homo sapiens
atgaacgcgctgcacgccgaagcgctggaaatgacatcacagttcgatcaggagttggcggccaagttcgaagcagaccacgaaatggctctgctgatgaacaaggatttcgaccgtgaccgcgaagagcagcgccgcctggcggaacaggctcggcgtgagcacgaagagcgcattaagcgcgaagcagcagaacaagcccgccgagatgccgaagcgaagcacaaagcggagattgaagccgcagcgcgccgtgaagctgaagagaaagcacgtgcagagctggctgaacgccagcgcattgaagcggaacagcgtgcggaacgcgagaagaaggaaaccgaagagcgtgcgcgccgcgaaaaagaagaagccgttgccgccgagcgccgccgccaggaagaggcagaagccgcccgtttggtcgaagagcagcgcaaagctgaagaagaagcgcgccgagccgcagacaaagagcaccgccgcaccgtcaatcgtcgtgtctacgcagatctgattgctcagggcatcccagaagaatacgcacagaaagcagtgctggcgatcgctggcggcaaagtgcaggacgcgcacatcaaatattgaggcaaacatgaacgcatacctcacttacgaccgcatcgaagaacggcgctgggttgagcagcaactcaccgacgagaaagagaagt

SEQ ID NO: 118273 - DNA, 1166 bp, Homo sapiens
  misc_feature (1)...(1166): n = a,t,c or g
ttccaaccccaggaaaacgtgcttctcctggaggcaaccctatttttccaccctcgccctgttgttcccggaaggcaggcctggaatgtgaagcttccagtctcctgatccctttggccaacacaatcacaggagggctttggagtaatacgcctgcatcccggaggagcgcattttccaagggctgcggcagggcaggcaaaaacacccggtgtcataggacagccctcggcaccttcccaacgcgggctcaaggctggagtgcaccagcagtgatggaccccaacactctctccatggaacaggggaagcagttcttaaagcagtgcgggatcccacaaagagatatctctaaacctttatttattttgattttgacaactggatacgactttgagctcggtaccctagcgatctctgcgtctttaaccgataaaagcctggctaatcgcgatcaggttgtggcggcaatttttagctatctcaatctgttacgtgaaaaaggcattgataaacaatacttcgatgaactggcgaatgtgctggatatcgacttccgttatccgtcgatcacccgtgatatggattacgtcgaatggctggcagataccatgattcgcgttcctgttgagcatacgctggatgcagtcaatattgccgatcggtacgatgctaaagcagtaaaggaacgtctggcgatgatgacgccgcacaatgcgcgtatctggtatatcagcccgaaagagccgcacaacaaaacggcttactttgtcgatgcgccgtatcaggtcgataaaatcagcgcacatactttcgccgactggcagaaaaaagccgccgacattgcgctctctttgccagagcttaacccttatattcctgatgatttctcgctgattaagtcagagaagaaatacgaccatgccaagctgattggtgatgagtcgaatctgcgcgtggggtatgcgccaagccgttattttgccagcgagcccaaagctgatgtcagcctgattttgcgtaatccgaaagccatggccagcgcccgcaatcaggtgatgtttgcgatcaatgattatctcgcagggctggcgcttgatccccgggtgccgagctcgnntangaantcagnggntgctncggtactttgggnnnnnangactctc

SEQ ID NO: 118274 - DNA, 834 bp, Homo sapiens
atggtgaaggccaggaagatcatggagaccccacagcccgcctgggagatgcgtgtgaggatatgcaccgtggactggtccaagcttaacccttatattcctgatgatttctcgctgattaagtcagagaagaaatacgaccatccagagctgattgttgatgagtcgaatctgcgcgtggtgtatgcgccaagccgttattttgccagcgagcccaaagctgatgtcagcctgattttgcgtaatccgaaagccatggacagcgcccgcaatcaggcattgctcgaggggtactttagctttaccgctacggaagatcagctggagcaggcgaagtcctggtataaccagatgatggatttccagaaaagggtaaagcgtttgaacacgggaatatgcccgccccaaatgctcttgcaagtgccctactttttgcgagaaggaacgggagcattgaattattattactcccattctacatatgagaaaacaggaacagagtggttaagtaatttgcccaaggcggcacagctgagcatgatgcaagatttgcagactttactgatggctgcatcctattgttcagaacttggtcatgtggccacccagttccaaggaatgttagcctgcacaagaaatcctaattcctgggacaggaattcagagacaagtggaaaagcagagggctttatccccatgcaactgggggatgtggctgacccttctgtgcgatgcagctcggtttcctccctgtggggccacagcagccccaaattgctgagatcagtctgcatggcaaatagaatctgtgtcaagctgcagaggtggacctga

SEQ ID NO: 118275 - DNA, 1506 bp, Homo sapiens
atgctcaacacttgcaacagcaagattagatcacgcatacggatacgcatacatttaggcaaaggcatcgtaatgcaccaaaccggttcctgggctaggcacttcgcaattcgcatccggaaggcacacaccggtatcgtcacgtcatcgcaccggtcagcccgtcaaactagccctagcgcacccatccatatcgtagcgacgacccgtggcaactcaccacccaccagcagtcgagcatccgtcgccaccgtgtatactttggcacacaacaggttcatactttcgcaacataccagtagcatcaacaacagcctcgccagcatcggcacactagcgtattcgaaaacgctgttcaccaaacaatcctggattccccggccatatatctctgaaaccttacgtgtcgacccaactaacgaccgtctgagcgcactggtagaaatctaccgcatgatgcgccctggcgagccgccgactcgtgaagcagctgaaagcctgttcgagaacctgttcttctccgaagaccgttatgacttgtctgcggttggtcgtatgaagttcaaccgttctctgctgcgcgaagaaatcgaaggttccggtatcctgagcaaagacgacatcattgatgttatgaaaaagctcatcgatatccgtaacggtaaaggcgaagtcgatgatatcgaccacctcggcaaccgtcgtatccgttccgttggcgaaatggcggaaaaccagttccgcgttggcctgtcagcagtgagctttcgaatcagacaactggaaaatcaactgggtgtgaaccttttcacccgccacagaaacaatatccgtttaaccgctgccggtgaaaaactactgccttatgcagaaacgctcatgagcacctggcaggccgcccgtaaggaggtggcgcatacctcacgacataacgagttttctatcggtgccagcgcctcgttgtgggaatgtatgcttaatcagtggctgggacgcttgtatcaaaatcaggatgcccatacaggcttacagttcgaagcgcgaattgcccaacggcagtctctggtaaaacagctgcatgaacgccagcttgatcttcttattaccactgaagcgcccaaaatggacgaatttagtagtcagttgctgggatatttcactttagcgctttataccagtgccccttcaaaactaaagggagatcttaattatctgcgacttgagtgggggccagattttcaacagcatgaggcaggtttgatcggtgctgacgaagtgcccattctgacaaccagttctgctgaactggcacagcaacagattgcgatgcttaatggttgcacctggctacccgtcagctgggcgcgtaaaaaaggcggcctgcataccgttgtcgatagcacaacactttcacggccgctttatgccatatggctgcaaaatagcgataaaaatgcgttgattcgcgatcttttgaaaattaacgtgctggatgaagtgtattaa

SEQ ID NO: 118276 - DNA, 1116 bp, Homo sapiens
atgctcgaccggctggaaagtgaaatcctggctgaccgggtgagtgaggaaagccgccgctggctggcatcgtgcggcctgaccgtggagcagatgaaaaaccagatggacccggtgtacacgccggcgcgaaaaatccacctgtaccactgcgaccatcgcggcctgccgctggcgctcatcagcacggaaggggcaacagcacctcgagggtcccgcgacgtgccggtacccgacagtcgcgagtcgagagcgagctgcgaacaacggttcccccgcccgactcgcggtagacacacttacagtgccgtgacactaaccgcaacgtttcggacggaactgagagtctaccgagatgcacgtctcaaacgccagctgcaagaacggaaggaagagctggctatcctccaaaagcccgcgaaatacttcgcgaagcgcgtctttattgaaaaacatcaggctgagttcagcatcaaagcaatgtgccgcgtgctccgggtggcccgcagcggctggtatacgtggtgtcagcggcggacaaggataagcacgcgtcagcagttccgccaacactgcgacagcgttgtcctcgcggcttttacccggtcaaaacagcgttacggtgccccacgcctgacggatgaactgcgtgctcagggttacccctttaacgtaaaaaccgtggcggcaagcctgcgccgtcagggactgagggcaaaggcctcccggaagttcagcccggtcagctaccgcgcacacggcctgcctgtgtcagaaaatctgttggagcaggatttttacgccagtggcccgaaccagaagtgggcaggagacatcacgtacttacgtacagatgaaggctggctgtatctggcagtggtcattgacctgtggtcacgtgccgttattggctggtcaatgtcgccacgcatgacggcgcaactggcctgcgatgccctgcagatggcgctgtggcggcgtaagaggccccggaacgttatcgttcacacggaccgtggaggccagtactgttcagcagattatcaggcgcaactgaagcggcataatctgcgtggaagtatgagcgcaaaaggttgctgctacgataatgcctga

SEQ ID NO: 118277 - DNA, 966 bp, Homo sapiens
atggaactggtgccggaacgcctgcgtggtgaaaccgcatcttttgacatcgaagctaacggtaaagtgtacgtagaaaaaggccgccgtatcactgcgcgccacattcgccagctggaaaaagacgacgtcaaactgatcgaagtcccggttgagtacatcgcaggtaaagtggttgctaaagactatatggatgagtctaccggcgagctgatctgcgcagcgaacatggagctgagcctggatctgctggctaagctgagccagtctggtcacaagcgtatcgaaacgctgttcaccaacgatctggatcacggaccatatatctctgaaaccttacgtgtcgacccaactaacgaccgtctgagcgcactggtagaaatctaccgcatgatgcgccctggcgagccggcgactcgtgaagcagctgaaagcctgttcgagaacctgttcttctccgaagaccggtatgacttgtctgcggttggtcgtatgaagttcaagcggtctctggtcataggtatccgggacggggacggcgaagtcgatgagatcgaccacctcgggaaccgcggatacagaccgcaggcgacccgcgggaaccacggcccgttgggcgcacatgtcacgtgccggcaaacggcgcgccgggaacgcaaaccaggcccggatataccgccagcgttccagcaaaaacacggagcacggtgttatctgacaaaagcggtgatacgaagaggtccgaagcgcgacaagcgcggtgaacaatacaggagtgttgcgcgacagtgtttcttgaaggacatagagagatgttacattctagctgctcaatctttatttgctgtggcggcgggccgccgcgggaatggacatctccgtgaacaaggtggttaccgtgtatgcttcgcttacaggtttgcccgtggtctggaaaagatgctgaaggactgcgcgctttcgcgg

SEQ ID NO: 118278 - DNA, 1755 bp, Homo sapiens
atgctcgaccggctggaaagtgaaatcctggctgaccgggtgagtgaggaaagccgccgctggctggcatcgtgcggcctgaccgtggagcagatgcaaaaccagatggacccggtgtacacgccggcgcgaaaaatccacctgtaccactgcgaccatcgcggcctgccgctggcccttatcagcaaggaagggacaacagaatggtgcgcagaatacgatgaatggggcaacctgctgaatgaagagaacccgcatcagctgcagcagcttatccgcctgccggggcagcagtatgatgaggagtccggcctgtattacaaccgccaccgctattatgacccgctgcaggggcgatatatcactcaggatccgattggactgaaggggggatggaacctgtatggatatcaattgaatccgatatcagacatcgaccccctgggtttatctatgtgggaggatgcaaaatcgggggcatgtactaatggtctttgcggcacactatccgctatgataggtccagataaatttgattctatagatagcaccgcatatgacgccttaaataaaataaatagccaatctatttgcgaagataaagagttcgctggtttaatatgtaaggataatagtggcagatatttctcaacagcacctaaccgaggagaaagaaaaggatcatatccattcaatagcccttgccctaatggtactgagaaagtatcagcttatcatactcatggtgcagatagtcatggagaatattgggacgaaatattttcagtgaaaggtgaacaatttgaccgcctgagcctgctgaacgacattctgccggtttatcagcaagtgctggcagaactggcgaaacgcggcatcgagtgggtacagattgatgaacccgcgctgggtctgcatgttgacctcgtacatggtaaagatgacgttgctgaactgcacaagcgcctgccttctgactggttgctgtctgcgggtctgatcaatggtcgtaacgtctggcgcgccgatcttaccgagaaatatgcgcaaattaaggacattgtcggcaaacgtgatttgtgggtggcatcttcctgctcgttgctgcacagccccatcgacctgagcgtggaaacgcgtcttgatgcagaagtgaaaagctggtttgccttcgccctacaaaaatgccatgaactggcactgctgcgcgatgcgctgaacagtggtgacacggcagctctggcagagtggagcgccccgattcaggcacgtcgtcactctacccgcgtacataatccggcggtagaaaagcgtctggcggcgatcaccgcccaggacagccagcgtgcgaatgtctatgaagtgcgtgctgaagcccagcgtgcgcgttttaaactgccagcgtggccgaccaccacgattggttccttcccgcaaaccacggaaattcgtaccctgcgtctggatttcaaaaagggcaatctcgacgccaacaactaccgcacgggcattgcggaacatatcaagcaggccattgttgagcaggaacgtttgggactggatgtgctggtacatggcgaggccgagcgtatgacctggtggatactttggcgagcactcgacggattgttttacgcaaagcgtgggtccgactacggtcccgtgggtaacccgttgcctgtgcatacgacgacgatacgcatgggattccctcctaccaacagaggggcaaactgggacgcgcgatatggctga

SEQ ID NO: 118279 - DNA, 4215 bp, Homo sapiens
  misc_feature (1)...(4215): n = a,t,c or g
atgcgctcggacccggatacttcagttaatgaaattgagacgaaactttctgccctactgggtagtgagaccactggtgaaatcctttttgacctcttgtgcgctaacggtccagagtggaaccgcttcgttacgctggaaatgaaatatggccggatcatgctggatacggccaaaattattgatgagcaggacgttccgacacatatcctgagcaaactgacttttactttacgtaatcatcctgaaggagtggtgatgaaaaattttgaagttctgcagccactacagaactccctttccggtctaccgctatgggtatctgaacgtatattgcagcagataaatcagttaacccactacgagccagtgatcggcatcatgggtaaaactggggcgggaaagagtagcctttgcaatgccctgtttgccggtgaagtatcgccggtcagcgatgtagcggcctgtacacgtgatcctttacgctttcgcctgcagattggagaacactttatgaccatcgtggatctgcccggcgtgggcgaaagtggcgttcgcgataccgagtatgctgcgctgtaccgcgaacaacttccccggctcgacctgattctgtggctgattaaggctgatgatcgggcactggcgactgatgagcatttttaccgtcaggtgattggcgaagcataccggcataagatgctgtttgttatcagccagtcagacaaagctgaacccaccagcggtggaaatatcctttccacagagcagaaacaaaatatcagccgcaaaatctgcctgctgcatgagctattccagcccgtgcatccggtgtgtgccgtgtcggttcgcctgcacccggtagtagcgctactgcaacaattccgcacggatgatgagcggactcaccggtaccattacgacagtcagcaccggctggtcgactacacgcggacacaatatgaagagccgctggtcgaaagtcgctatctttacgacccgctgggccgcagggtggcaaaacgggtgtggcggcgtgaacgggacctgacgggctggatgtcgctgtcacggaaaccgcaagtgacctggtacggctgggacggcgaccggctgaccacgatacagaacgacaggagccgcatccagacgatttatcagccggggagcttcacgccactcatcagggtcgaaactgccaccggtgagctggcgaaaacgcagcgccgcagcctggcggatgcccttcagcagtccggcggcgaagacggtggcagtgtggtgttcccgccggtgctggtgcagatgctcgaccggctggaaagtgaaatcctggctgaccgggtgagtgaggaaagccgccgctggctggcatcgtgcggcctgaccgtggagcagatgcaaaaccagatggacccgcacggaagggacaacagcgtggtaccagaatacgatgaatggggtaacctgctgaatgaagagaacccgcatcagctgcagcagcttatccgcctgccggggcagcagtatgatgaggagtccggcctgtattacaaccgccaccgctattatgacccgctgcaggggcgatatatcactcaggatccgattgggctgaaagggggatggaatttttatcagtatccgttgaatccgatctcagacatcgaccccctgggtttatctatgtgggaggttgccagacagatgaacgctatcgcgagtaaattgccggaaggttttcatattggaattaattttagcgcttcgcatattatttcgccgacgtttgtcgacgagtgtttaaatttccgtgacagttttacccgccgcgatttaaaccttgttctggaagtcaccgagcgtgacctattgaatgttgatgaaagtctggttcagcggttgaacatactgcatgaaaatggttttgtcatcgcactggatgatttcggtactggctactcagggctttcttatcttcatgacctgcatattgattatatcaaaattgatcacagtttcgttggccgcgtaaacgcagacccagaatcaacccgaattctggattgtgtattggatctggcgcgtaaactttcgatcagtatcgtcgctgaaggtgtcgaaacgaaagaacaacttgactatctgaaccaaaattatatcacatttcagcagggttattatttctataaacctgttacatacatcgacctggtcaaaattatcctttctaaaccgaagaaaggcattattgcgcaaatagttgtcaaccctggtgttatcacggttgtttttatatatcaccgaaataatcctcattttggcgcttctgaggggggcaacaaggggattgatatcgcaggcagcaaaggacaggcaattatcgcgaccgcagatggccgcgttgtttatgctggtaacgcgctgcgcggctacggtaatctgattatcatcaaacataatgatgattacctgagtgcctacgcccataacgacacaatgctggtccgggaacaacaagaagttaaggcggggcaaaaaatagcgaccatggggatcacgggtaggagccaccttatgagtcagaatacgctgaaagttcatgatttaaatgaagatgcggaatttgatgagaacggagttgaggtttttgacgaaaaggccttagtagaacaggaacccagtgataacgatttggccgaagaggaactgttatcgcagggagccacacagcgtgtgttggacgcgactcagctttaccttggtgagattggttattcaccactgttaacggccgaagaagaagtttattttgcgcgtcgcgcactgcgtggagatgtcgcctctcgccgccggatgatcgagagtaacttgcgtctggtggtaaaaattgcccgccgttatggcaatcgtggtctggcgttgctggaccttatcgaagagggcaacctggggctgatcccgcgcgtagagaagtttgaccccggacgtggtttccgcttctacacatacgcaacctnntttattgacccggatgtacgcttgataagctacagtacgcggcatccgaaacatgatatgcagcatctgcttaaagaagtggacaaaatgttgcaactgaacgttgacgagcgtccgctaatttgcggcgttggcttgggcggatactgggcggaacggattggttttctttgcgacatccgccaggtgatcttcaaccctaatttgttcccttatgagaacatggaaggcaagattgatcgcccggaagagtatgccgatattgccactaagtgtgtgaccaacttccgtgagaagaatcgcgatcgttgcctggtgattttgtcgcgtaatgatgaagcgcttaacagccagcggacatctgaagagttgcatcattattacgagattgtctgggacgaagagcagacgcacaaattccaagatatctccccgcatttacagcgcattaaagcgttcaaaaccctcggccagccggatgactcatgcgactggtatcgcctgcgtcatgaagaagcgatgacgccggatgcggtgcgcgtgattacgctcgatcctaacggtgcctggtcgctgaacgaagcgattaaaatcggtaaatacctgaagagttcgctggcttatgcagaagatccgtgtggtgcggacaatggtttctccggacgtgaagtgatggcggaatttcgacgggcgaccggcttgcccgtcgcgactaacatgatcgccaccaactggcgcgaaatgggtcatgcggtgatagcccaatgcggtagatattccacttgccgatccgcacttctggacgctttccggtgcatccgtgtggcgcaaatgtgcgacgactgggggctgacctggggctgccattctaataaccatttcgatatctctctggcgatgtttacccatgtgggcgcggcggcaccgggtaatcctaccgctatcgatacgcactggatttggcaggagggcgattgtcgcctgacccaaaatccgctggagattaaaaagggaaaaattgccgttcctgatgcgcccggtctgggcgtggaactggactgggaacaggtacaaaaggcacatgaggcctataaacgtctgcctggcggtgcgcgtaacgacgcaggtccgatgcagtacctgatccccggctggacctttgaccgtaaacgtcccgttttcggccgtcattga

SEQ ID NO: 118280 - DNA, 3243 bp, Homo sapiens
gacctgttctttgaaaaagttatctttgaaatccgtgataacaagctgcagatggaactggtgccggaacgcctgcgtggtgaaaccgcatcttttgacatcgaagctaacggtaaagtgtacgtagaaaaaggccgccgtatcactgcgcgccacattcgccagctggaaaaagacgacgtcaaactgatcgaagtcccggttgagtacatcgcaggtaaagtggttgctaaagactatattgatgagtctaccggcgagctgatctgcgcagcgaacatggagctgagcctggatctgctggctaagctgagccagtctggtcacaagcgtatcgaaacgctgttcaccaacgatctggatcacggcccatatatctctgaaaccttacgtgtcgacccaactaacgaccgtctgagcgcactggtagaaatctaccgcatgatgcgccctggcgagccgccgactcgtgaagcagctgaaagcctgttcgagaacctgttcttctccgaagaccgttatgacttgtctgcggttggtcgtatgaagttcaaccgttctctgctgcgcgaagaaatcgaaggttccggtatcctgagcaaagacgacatcattgatgttatgaaaaagcctatcgatatccgtaacggtaaaggcgaagtcgatgatatcgaccacctcggcaaccgtcgtatccgttccgttggcgaaatggcggaaaaccagttccgcgttggcctgggctttaaccgcaacctgcgggtgtcggaaattatcggccaggtgtggcgtgcggcgaaaatcgtcggcgcagcaaaagtcaccggtcagcgtccgatcactaacgtagtgatgatgggcatgggcgagccgctgctcaacctgaacaacgtcgttccggcgatggaaatcatgcttgatgatttcggttttggcctgtctaaacgtcgcgtcacgctttccacttccggtgtagttccggcgctggataaactgggcgatatgatcgacgtgcactggcaatttccctgcacgcgccgaacgacgaaattcgtgacgaaattgtgccgatcaacaaaaagtacaatatcgaaacgttccttgctcgaatccaacgcaatccaggcccgagtcactattgaatacgtgatgcttgaccacgtttacgacggcactgaacacgcgcaccaactggcggaactgctgaaagatacgccgtatcaccctgatcccgtggaacccgttcccgggtgcgccgtatggacgcagctcgaacagccgtatcgaccgtttctcaaaagtgctgatgagctacggttcaccactattgtgcgtaaaactcgtggtgatgatatcgatgctgcctgtggtcagttggcgggcgatgttatcgaccgtacgaaacgtaccctgcgtaaacggatgcagggtgaagccatcgacattaaagcgcgaatgaatactgaagccacgcacgaccaaaatgaagcacttactaccggcgctcgcctgcgtaatgctcgcgaacaactaggacttagtcagcaggccgttgccgagcgactttgcctgaaggtttccacggtacgcgacattgaagaagataaggcacccgccgatcttgcttcaacattcctgccggatatatccgctcttatgcgcgtctggtacatattcttccggcgtatgataccgggccgcgttgcgtccatgaccccgcgcgtatcgtcacgtgctgagcgttacacatttgatacttcgcttcaacgccgtgtgattggcgcatcgaatatcgttgccgccccgatgagcatggaactgctgctggcagtgactcaccgcttcactaaaaatctgcgtcatcacgtagaaaatgccgatctattgatcgttgccgttggcaagccaggctttattcccggtgactggatcaaagaaggcgcaattgtgattgatgtcggcatcaaccgtctggaaaatggcaaagttgtgggcgacgtcgtgtttgaagacgcgctaaacgcgcctcatacattacgcctgttcccggcggcgatgagtaacatggcgacattttctttaggtaaacatccgcacgttgagctgtgcgacttgctgaaactggaaggctggagcgaaagcggcgcgcaggcgaaaatcgcgattgccgaaggccaggtgaaagtcgacggtgcggttgaaacgcgcaaacgctgcaaaatcgtcgccggtcagacacatcgacattttgccgaagcgaccatcatgccaaccgttattacgcacgccgccgttcccctatgcattggtttagggttgggttcgaaagtcatccctccgcgtctgttatttgccggaatcatcctggcgatgctgcccgacgccgacgtattgtcgtttaaatttggcgttgcttacggcaatgtttttggtcatcgcgggtttacccattcgctggtgtttgcgtttgttgtcccgctgttatgtgtgtttattggacgccgatggttcagggctgggctgattcgctgctggctgtttttaaccgtctcgttgctatcgcacagcttgctggattcggtaaccactggcggtaaaggcgttggctggctgtggccgtggtcagatgaacgctttttcgctccctggcaggtgataaaagtcgcgccgtttgcattgtctcgttacaccacgccgtacgggcatcagggtaaaatccttttcgttggtactaaacgcgctgcaagcgaagcggtgaaagacgctgctctgagctgcgaccagttcttcgtgaaccatcgctggctgggcggtatgctgactaactggaaaaccgttcgtcagtccatcaaacgtctgaaagacctggaaactcagtctcaggacggtactttcgacaagctgaccaagaaagaagcgctgatgcgcactcgtgagctggagaaactggaaaacagcctgggcggtatcaaagacatgggcggtctgccggacgctctgtttgtaatcgatgctgaccacgaacacattgctatcaaagaagcaaacaacctgggtattccggtatttgctatcgttgataccaactctgatccggacggtgttgacttcgttatcccgggtaacgacgacgcaatccgtgctgtgaccctgtacctgggcgctgttgctgcaaccgtacgtgaaggccgttctcaggatctggcttcccaggcggaagaaagcttcgtagaagctgagtaa

SEQ ID NO: 118281 - DNA, 2712 bp, Homo sapiens
atggccgacagagtgtccacgctggatgttgatgcaatggtggtacgcgaaaccactcacctttcagccgcttatcctttcaccgggcaatggtcgggcgacgtttgccgttctgaaaaccgcctcgggcctgacctggctagcctttgcccggaacaaagcgtgataaagggcgaatcaacaggtgtggcgctgattttagttaatggcgaagctggaatcaccactcgacagtgtgcatggccgcggcgcaaaatcccccatcacataagcatatcgttgcgcttcaacccggctccggctcgcgacttcctgacgaactgctggcgctggtggcacattcattacgccaaacgaaacggaagccagcaaaagctcaccggtattcgtgttgaaactgatgaacatgcagcgcaaggcggcgcaggcacagtcgaggtagtcatgggctcagcgtcgctggtgaaggtcagcgcgtacctgaattccgggtgcaggctgtcgatacctagctgccggagatacctttaccgacagtataccaatcgatctcggtacccatttatcgtgcggcagcaggaaaaatattgctattccgcagcagttagcggtgcgaaacggaaagtccgttctggaaatcataaccgtaaaataaactacacggttaaaatcatggccttcacgttcaatatcatcctgccagtccagttactccagcgatccagcccaatgcgcgtatacggcgtcaccgagtgttgccgagcgtcagcggcaaataggcgcgaatttcttgcgtggaaaactaccgttattgcggctgtcgtccatattgaagccgcgctcgagataatagtcactcgcaaggcaagcgtattcgttgaaggcctgctgctggtgatcagccacgcctttgccgccacggttcggacgaacacggcacgtttacactcgaaaaaacgccacaacggattgtgtgctggaactctcgttcgccgatgcgctggccgccgtggacgtcatcccatcggtattgccgacgataacgatgcaaaacgcatcctgcccgaatgctgcgcacctgaaaccgtggcagtccgtcggaacgcgcgcgcagccgagctggaagccattgccgctctgaaaccagacctgatcattgccgacagcagcgccatgcgggggtttacatcgccttgcagcaaatcgcgccgacggcgttatgcacacgacgacacgctggtggatggcctggaggcggctatcgccatgacacggtcggtaaatctggtacgtcgcgacctgaatatggacagcggttgtcgcacagacgatttctgcgacgtgtttgccgccagtaaagtgctggggccgctgggagcaaagtctccattttgcgctatcacatttcgggtccgctggacgaccgcaaatcaacgaagtgtagcgccaaccgcgataatcgttgccaaggccaacgagccagaacataaccgtaggtcggatagggcgttcacgcgcatccggcagccgatgcctgatgcgacgctgtgcgtcttatcaggcctcaaaaggaacataaccgaagcacttcacggcgtccaggctgtcggtgatggtgatgcggtctttctcatactgatacgtgtgcttaagcctgccgggtttagctgttctgtcacccgcccgtcgctgtcgaacggtaacggatttccggccggcccgtgtgacggtgcgccaccatccgccccggtatttatcatcgtaaattctccgggtattccgggtcgtgcgtcagccaacggcagacagacggatgccgttgtcccggccatattcggtgtaacccgcagggtatcaggaaaagcggacggttccgtcccgccggaaatggcctgcgccgggcttcttctgcccgctgcgcctgcgtggtcagtaccagccggaatgacgccaggcaccatccgtcacgccggtgatttcgccgctgaattcacggcggcttcgcggtggaacgtctgtgtgcgcccgaagcggtccaccagccggtcagtacccgcggagttcttccggcagcgcctgccagagtgcggccagccgggaccttcatccagtttcgccacgccgccgcgcaccagccacagtgactcctgcggctgtaaccgtcctcaccgggaaacaggtgctcaaaatacaggctctgccgccgttatcactgagtatcagtgtgttatcgcgcagctgcgaatgagctgctgcgatgatgcgggttctcatcactcagcaggttgccccattcatcatattcgcgcaccacgctgttgccccttccgtgctgatgagcgccagcggcaggcgcgatggtcgcagtggtacaggtggatttttcgcgccggcgtgtacaccggtccatctggtttatcatctgctccacggtcaggccgcacgatgccagcagcggcggctttcctcactcacccgtttggtatccgcgcggcaaactacccctttattgccacgatatggataatctggtgctacccgcgtcgctcaaaccgcttcagcaaaattgttcggcctgactatcgacccggaacgtctggcggcgattcgcgggaacgtcgggagaacagtcgctatgcctcgcttcgtcagtgcaggatgaagtcgcggaagtggaagccttgtaccgtaaaaatcagatcccgtggataa

SEQ ID NO: 118282 - DNA, 1206 bp, Homo sapiens; identical to SEQ ID NO: 118261

SEQ ID NO: 118283 - DNA, 4770 bp, Homo sapiens
atgctgaaaggcgtttcgacctggcacctgaacagtccggaagagttcaccaaagttcagaacaagatcaaagatctggttgccagcggtcagttgggtattttcgctaatggctactggggtcatccggcgatgaaactgccgccggaagtgaacctgattgcggtagcgcactacctgcaagcgttggagtgccagcgtgacgctaaccgcgtcgtggcgctgctgggcggtaaaacgccgcacattcagaacctggcggtaggtggtgtcgcgaacccgatcaacctcgacggtttgggcgtgctgaaccttgagcgcctgatgtacatcaagtctttcatcgacaaactgagcgactttgttgagcaggtttataaggggagtgttatgggtcaggttttaccgctggttacccgccagggcgatcgtatcgccattgttagcggtttacgtattgtggctcgatgtagcggtataggccataaatcgagcctgctcccagcagaatgcaacagactgcaaggatcaaaaaatactttacgaacttcactggaaatttcccatttagtttcatttgggcagtttataaacaaacgcgcgtataaaggcaagctggcgttagtcggcggtagcggcagcgggaaatcattaacctgcgccgcaacgctgggcattttgcccgctggcgttcgccagacggcgggggaaattttagccgatggcaaaccggtttcgccttgcgccctgcgcggcatcaaaattgccaccatcatgcagaacccgcgcagcgcctttaatccactgcacaccatgcacacccacgcgcgggaaacctgcctggcgttagggaaacccgccgatgacgctacgcttaccgctgccatagaagcggtggggctggaaaacgccgcgcgcgtgctgaagctgtacccgttcgagatgagcggcggcatgttgcagcgcatgatgattgcgatggcggtgctgtgtgaatcaccgtttatcatcgccgatgaaccgaccaccgaccttgacgtggtagcacaggcgcgcatcctcgatctgctggaaagcattatgcaaaaacaagcgccgggaatgctgctggtgacccatgatatgggcgttgtggcgcgtctggcggatgacgtggcggtgatgtctgacggtaagattgtcgaacagggcgatgtagaaacgctgtttaacgcccccaaacatacagtgacgcgcagcctgacgacagcggaactgtcctcttcgagttttttgaagcacggcaagtctcttgcgggaatacccctaagggacactctccgtatatcctccccgggcgcgctaacgcaacctgatggttttatccgtccgccgatattcccttacgatgatgtttatcgctcactgtcaaaagagaaatacacccgttaccttcaggagcaactacagcggatcgacgggaaatcaaaagcgctggttggctcggaagatttgccgttgctggatgaaaacacgttcaacagtcacgcccctgcgccatcgtcacgttgggcgctggcacaacgaattggttatctctattcagagggcgagattatttatctcgccgatacgccattcgagcggttactcgatattcaacgtcaggttggccagtgccagaccatgaccagcttgtcacaggctgattttgaagctcggctggaagcggtattccatcagaataccggtgagtcgcaacagattgcgcaggatatcgatcaatccgtcgatcttctctcgctttcggaagagatgcccgcaaatgaagatctcctgaatgaagattcagcggcaccggttatccgcttgatcaatgcgattttgagtgaggccatcaaagaaaccgcctctgatatccacattgaaacctatgaaaaaacaatgtcgatccgttttcgcatcgacggcgttttgcggacaattttacagccaaacaaaaaactggcggcactgcttatctcccgaattaaggtcatggctcgtcttgatatcgccgaaaaacgtattccacaggatggaagaattagtttgcgtatcgggcgacgtaacatagatgtccgcgtatccacactgccgtccatctatggtgaacgcgccgtactccgcctgctggataaaaacagcctccagctttcattgaacaacctggggatgacggcagcggataagcaggatttagaaaatctcattcagcttccgcacggtattatcctggtgacagggccgacaggctccggtaaaagcaccacgctctacgccatcctttcggcgctgaatactcccggacgaaatattctgacggtagaagatcccgtggaatatgagctggaaggcatagggccaaacgcagaacacaaaaaaccaagacacaaaggaagaaaaaagaaaaagaaaagaaacgacacaagaaagaaaacaaaccgcgaagcaaaagaaaacacaaacaggcaaaacaacgaaagacaaaaacacaaaaaaaacacaaacaaacaagaaaagaagacagaaaacaacgaaaaaaagaaaaacacgaaacacgaaacagaaaacaaagaaacgcacgggtgcgacgtacaggaccgcatccagacgatttatcagccggggagcttcacgccactcatcagggtcgaaactgccaccggtgagctggcgaaaacgcagcgccgcagcctggcggatgcccttcagcagtccggcggcgaagacggtggcagtgtggtgttcccgccggtgctggtgcagatgctcgaccggctggaaagtgaaatcctggctgaccgggtgagtgaggaaagccgccgctggctggcatcgtgcggcctgaccgtggagcagatgcaaaaccagatggacccggtgtacacgccggcgcgaaaaatccacctgtaccactgcgaccatcgcggcctgccgctggcgctcatcagcacggaaggggcaacagcgtggtgcgcagaatatgatgaatggggcaacctgctgaatgaagagaacccgcatcagctgcagcagcttatccggctgccggggcagcagtatgatgaggagtccggcctgtattacaaccgccaccgctattatgacccgctgcaggggcgatatatcactcaggatccgattggactgaaggggggatggaacctgtatggatatcaattgaatccgatatcagacatcgaccccctgggttatctatggttcataccatccgcagtatgtgcagacccttttctaaactgtaatcgtttggaagcaccccggagcttatttaacccgaagcgtttaccaaagggaatcccctctttgggaccagattttcctgccgtgatcccggtcatcttgatggctatcgccgccgtttgtgaaattacgttaccgaaaactaacaccgtgcgcctcttctttgaatttgtcggtaaccctgccgttgcgctgtttattgccattgttattgcgattttcacactgggccgacgtaatggacgcaccatcgagcaaatcatggatatcattggggattctataggcgctatcgcgatgattgtgtttattatcgctggcggcggcgcgtttaagcaggtattagtagatagcggtgtcgggcactatatttcacacttaatgaccggaactacactttcgccgttattgatgtgctggactgttgcggcgctgttgcgtatcgctctgggctctgccaccgtcgcggccattaccaccgcgggtgtggtgttgccgattatcaacgttacccatgccgatcccgctttaatggtactggcaaccggtgcgggcagcgtgatcgcgtcacacgtaaacgacgctggcttctggctatttaaagggtattttaatctgacggttggtgaaacgttgcgtacctggacggatatcgctacgctggctggcgtaacaaaaatgaccgtgagtcgttatatccgctcgccgaaaaaggtggccaaggaaacaggcgagcgcatcgccaaaattatggaagagatcaattatatccctaatcgcgctcccggcatgttgtgtagtttgccccaatgttcctggcttcttcacccgatgggcggcaactggcggttgggtaaatgcgctggaacaagaatggctacaccgttacggtacgcattaatctttttgctgtgggcgatggtggcggtgatttatgcaccgctgatcccggcagctctcacgctgatatcgcctgctttgtcgttgacacactggcaggcgttatttgccgatccacagttaccgcaggcattactggcaacgctggtgtcgacaaccatcgcggcggtcggggcattgttgattgccctgctggtgattgtggcgctgtggcctgggccgaaatggcagcgtatgtgcgcccgtctgccgtggctgctcgccattccccatgtggcttttgccaccagcgcccttctgctctttgctgacggagggctgctttatgactatttcccgtatttcactccgccaatggaccgatttggcatcggtctgggcctcacccttgcagtgaaagaaagcgcatttctgctgtggatcttagcagcagtattgagcgaaaaatggctgttgcagcaggtcattgtgctggattcgctgggctacagccgctggcaatgcctgaactggctgctgttgcccaccgtcgcgcctattctacacacaagccaccttggctgcctgacatatccctctctttaa

SEQ ID NO: 118284 - DNA, 2054 bp, Homo sapiens
ttaccgatctcccgacaccttcttcattaggaatatcggaaatccccagatattaggccgatcgtcatccagcacggtgaagaagcggaaatcacgcatcactttcggtgacaggaactggctgataaaactctcatctttgaaatcacgcatcgcgaaatgcagcgtttccagccagtcggaaccggcgatatccgggaaccagtatttgtcttcttccgttggcgactgacaaatccgtttaatatcctggaacatggcgaacccgagggcatacgggttgatgccgctgtaccacgggctgttataggggggctggaagaccacattggtgtggctgtgcaaaaactccagcataaaacgttccgttactttcccttcatcatacagatggttaaggatggtgtagtgccagaaggtcgcccagccttcgttcatcacctgagtctgtttttgcggataaaaatactggctcaccttacgcacaatacgcaggatttcacgctgccatgattccagcagtggcgcatttttctccataaaatagagcaggttttcttgtggttcggacggatagcggcgcgcttcagcaaccgttttctcttcctcgcgcttcggcagggtacgccagagcatattgacctgactttgcagatactcttcgcgacttttctgccgggctttctcttcttgcagcgagattttttgcgggcgtttgtaccggtccacgccgtagttcatcagcgcgtggcacgagtccagaagccgttctacttcatcaacgccataacgctctgtcatgatactgcgcgttgcggattcaatagatgtgggggtaccatgccccccgattgtgaaaacgcctgggatattaatctcatcagctacagaatggataagatcactttcggggtataaatttatatcaaccaaaccttgcggatctacatttatgaccggattcaacggatactgataaaaattccatccccccttcagtccaatcggatcctgagtgatataccgacccagcagcgggtcataatagcggtggcggttgtaatacaggccggactcctcatcatactgctgacccggcaggcgaatgagctgctgcagatgatgcgggttctcatcactcagcaggttgccccattcatcatattctgcgcaccacgctgttgccccttccgtgctgatgagcgccagcggcaggccgcgatggtcgcagtggtacaggtggatttttcgcgccggcgtgtacaccgggtccatctggttttgcatctgctccacggtcaggccgcacgatgccagccagcggcggctttcctcactcacccggtcagccaggatttcactttccagccggtcgagcatctgcaccagcaccggcgggaacaccacactgccaccgtcttcgccgccggactgctgaagcgcatccgccaggctgcggcgctgcgttttcgccagctcaccggtggcggtttcaactctgatgagtggcgtgaagctccccggctgataaatcgtctggatgcgggttctgtcgttctgtattgtggtcagccggtcgccgtcccagccgtaccaggtcacttgcggtttccgtgacagcgacatccagcccgtcaggtcccgttcacgccgccacacccgttttgccaccctgcggcccagcgggtcgtaaagatagcgactttcgaccagcggctcttcatattgtgtccgcgtgtagtgcaccagccggtgctgactgtcgtaatggtaccggtgagtccgctcatcatccgtgcggataaccccttccgggatgaggtcggttttctctgtccgcctgccgtgacggtcataccggtaaagatagtgcgcgtcacgggcgatacggttatccgccacatgctgaggggttttcttgactgtctttaaatctgacttggaagcgtcgttcactctcttctgctctgctactctgatctcgctcgagtgtggtaagaataggaggttggggtaccacatgtgacgtccagttgctagctgcagccagccac

SEQ ID NO: 118285 - DNA, 979 bp, Homo sapiens
ctatgcacagtgggggattcccgccggcacggtgcagatgccgaccggctggaaagtgaaatcctggctgaccgggtgagtgaggaaagcgccgctggctggcatcgtgcggcctgaccgtggagcagatgaaaaaccaatggacccggtgtacacgccggcgcgaaaaatccacctgtaccactgcgccatcgcggcctgccgctggcgctcatcagcacggaaggggcaacagcgggtgcgcagaatatgatgaatggggcaacctgtaagctccagatgaccatttttgttattctccacacgagttagttcttcttttcggatccggcacttgtcagctaccgccttggcgaaccggtgtttgacgtccaggaatgtcaaatccgtggcgtgacctattccgcaccggtgtcgacccaactaacgaccgtctgagcgcactggtagaaatcaccgcatgatgcgccctggcgagccgccgactcgtgaagcagctgaaagctgttcgagaacctgttcttctccgaagaccgttatgacttgtctgcggtggtcgtatgaagttcaaccgttctctgctgcgcgaagaaatcgaaggtccggtatcctgagcaaagacgacatcattgatgttatgaaaaagctcatgatatccgtaacggtaaggcgaagtcgatgatatcgaccacctcggcaacgtcgtatccgttccgttggcgaaatggcggaaaaccagttccgcgttgcctggtacgctgtacgggcacagtaccaccttttttgcaccagcaaaagtgcgaataccacttgcccaaaggcccgtcgcgagtactttgtcgcgatatttttgacattttcgactcaggaatttttcgatgccaagagcgaacgaaattaaaaaaggtatggtatgaattacaacggcaaactgctggccctcaattttcactcgttgttgatcgccctcacacttcat

SEQ ID NO: 118286 - DNA, 1161 bp, Homo sapiens
cgtcggttgtactcaaaatcgtcgagcgggtggatgggtattttccctctcccccgcttttcctgggtgccgcgtttggatctcacgtgcggtcgcgtgctttgcccgacccgtgtgttttattccgcgtgaccatttacttgtgcgtgcttgcgtctgtggctcggactttttcaccgctattacccgtttcacggaaaaaacacattaccccgctcggtggctttcagctacacgaaactcacctttgtcttcaggactgtcgcacaattatccttcgcccccgtttgggcgagtttggtaataaattcagtcagctggtggacaccattgacttgcattaatcagcacggactggcgcatctgtaaaaagagagtgcacgcgggcaatacagcctgttattgctggggatggtttccctttgcgcactgattctgatcctctggcgcgtggtttatcgttcagtcacgtgtccacttgccgatcaaacgcaggcgctgcatcggctgctggacggtgatattgtctcccctttcccggaaaccgctggcgtacgggagctggataccatcgggcggctgatggatgcgtttcgcagcaatgttcatgctctgaatcgccaccgcgaacagctggcggcgcaggtcaaagcgcgtacagctgaattgcaggaactggtgatagaacaccgacaggcacgggcggaagcagaaaaagccagccaggcaaaatcggcgtttctggcggcgatgagccatgagatccgcacaccgctgtacgggattctcggcactgctcaactgctggcagataaccccgcacttaacgcccagcgtgatgatttgcgggcaattactgactctggtgaatcgttgctgaccatcctcaacgatattctcgattattccgctatcgaagcaggtggcaatgaatgtttcggttcagtcgtatgtagcccgtttagaaccggtcgccgcgtctgggtggcacaagtacccatggctgaattaatgagcggtcacgtggtgcaacaggtcgcccctggattccgtccctgggccaatcggcgatatatgcctgcattgcattatttggccccgggttgcccgacggattttaaagtcgtggggcggaaatttcctaacaggggcccgttttaa

SEQ ID NO: 118287 - DNA, 502 bp, Homo sapiens
atgaggaggaggcaaacgaggaaacaagaatacccaaaagccctggtatcaacatgcaggaaagtgttcacactacaattttcaattctggcaatcgatttaggttgcattccctgggccgtcatgcggataatttccatttcccgcctgcattttcatttcgtcagcaatgttcatgcactgaatcgccaccgcgaacagctggcggcgcaggtcaaagcgcgtacagctgaattgcaggaactggtgatagaacaccgacaggcacgggcggaagcagaaaaagccaatagtaacatgaacatgacaaaagggtggttaccgaacgagacgctggcgaagctggtcgggccgatgatcacttatctcctgccgctgctgatcggttataccggtggtaagctggtaggcggcgaacgtggcggcgtagtcggtgccatcaccaccatgggcgttatcgtcggcgcagacatgccgatgttcctcggttctatgattgcag

SEQ ID NO: 118288 - DNA, 653 bp, Homo sapiens
ggtgttaacgggatggcacgcgacgtggtgctctctgatgcgatgatgggctatctccatttcattgcaaatattccggtcaaaggcactcgctggctatatagcagtaaaccttatgcacttgcaacgccgccgctctcggtgattaaccaatggcagctggcgctggataaaggtcaattgcctacgtttgttgcaggactggcaccgcagcatccgcaatatgcggcgatgcatgaatcgttactggccttactctgtgacaccaaaccgtggccccaactgaccggcaaagcaacgttgcgcccagggcagtggagtaacgacgtaccggcgttgcgcgaaatattgcaacgcacaggcatgttggacggggggccgaaaattactctacctggcgatgacacgccaactggagcggtaatcagcccatccgctgttactgttgaaacagcagaaactaagccgatggataagcaaacgacgtctcgtagtaaacctgcgcctgccgttcgcgccgcctacgataatgaactggtggaagccgttaaacgttttcaggcatggcaaggattgggggcagaggggactatagcgccgggcagaccggacaggggaaacgagagcgaccgagcagaggggggagagcggga

SEQ ID NO: 118289 - DNA, 774 bp, Homo sapiens
  misc_feature (1)...(774): n = a,t,c or g
ttatgcacttgcaacgccgccgctctcggtgttaaccaatggcagctggcgctggataaaggtcaattgcctacgtttgtgcaggactggcaccgcagcatccgcaatatgcggcgatgcatgaatcgtactggccttactcggcgttgcgcgaatattgcaacgcacaggcatgttggacggggggccgaaaattactctactggcgatgacacgccaactgacgcggtagtcagcccatccgctgttangaactcgcatgggcggtaggtaccgactttgggaggggtctggggactctagaatattctgagactgtactggagatggagttgtgtccaaatctggggttgtgtcagattctgggacctgctcgaggtagtgggaaaggctggtcacctccgacggtgtagaagggtcagagtcagctctttgggcaaggtgggtaagggcgtgggtgagggctccggggtaacgcgggaaccacattggtgctttcgtttttctcctgctctttgtgtgtggttttccgtgctcctttgttggtcgtccggggtgtccgttgcgggcgctctttgtccgtctcttcttccctgtctcgttttgtcttcccgtttccggttttcctctctttttgtcggtgttgtctctgcttgttcctctttgttcctctctgggcgtttgtcgtttttttggcggtccgtgtgtattgtcctctttgggttctctgtctctctggcgtcttgtttttatggtgtttttgttgttgtccat

SEQ ID NO: 118290 - DNA, 194 bp, Homo sapiens
tgcgtttgactgaaatcggtcgtgaactgggcctggtggatgacgaacgttgggcgcgctttaacgagaaacttgagaatatcgagcgtgagcgtcagcgtctgaaatcgacctgggtaaccccgtcggcggaagctgcagccgaagtgaatgctcacctgactgcgccgctttcccgtgaagccagtggtgaa

SEQ ID NO: 118291 - DNA, 580 bp, Homo sapiens
cacctattacaattcagctcggcacccggggatcttcccgctgctgggattcttctgcccattgcttacggtgatggcgatttatcgtggggggccgggttggggatttttgatggcatcattgatgcaatttggcgtgattttcacggcaggcatcacgctgttcccctttgtcatgccgtcaagcgtgagtccgatctccagcctgacgttgtgggacagtacttccagtcagctgacgctgagcattatgttggtaatcgtgctgatatttttgcccattgtgttgctctacactctctggagctactacaaaatgtgggggcgcatgacaacagaaactctccgccgtaacgaaaacgagttgtactaaggagcagaaacaatgtggtatttactttgggtcgtcggcattttgttgatgtgttcgctctccacccttgtgttggtatggctggacccgcgtctgaaaagttaacgaacgtaggcctgatgcggcgcattaacatcgcatcaggcaatcaataatggccgaaatgaaaagcggaaacctattcgtgaaagcgatcctcttaaagcc

SEQ ID NO: 118292 - DNA, 949 bp, Homo sapiens
ggttgctgccgcggcgcaacgccccgctggccgccgttctctgtccgccccctcctcttccgcgcgggtctctcggcgccgtcgcgggccaccctctctcgccgggggtccgtagcgaccgggcacgggtcgttgttcagctgtgcagctccccgttcttctgctgcgcggcccccactcctctcacacggtcggtacccaccatggtggatctggattccggccagctgtgcgtttacccgggtaactccgatgagtccatgccggcggcgacccaggcgcgtgaacgtctgctggccgataccgccaagaagaaagcgcagattgctgagttgcaatctttcgttagccgctttagcgccaacgcctagaaatctcgccaggcaacttcgcgcgcgcgccagattgataaaatcaaactggaagaggtgaaagcctccagccgtcagaacccgttcatccgttttgaacaggataagaaactgttccgtaacgcgctggaagtggaaggtctgaccaaagggtttgataacggtccgctgtttaaaactctcaacctggtgctgcgaagtgggtgaaaacctgccggtcctgggtaccaacggcgtcggtaaatcaacgctggctgaaaacgttggtgggcgatctgcacccggacagcggcaccgtaaaatggtctgagaacgcgcgcattggttactatgctcaggaccacgaatatgagtttgaaaatgatctgcccgtgttcgaatggatgagccagtggaagcaggaaggcgatgacgagcaggcggtacgcagtattctcggtcgtttgctgttcagccagggcgacatcaaaaagccagctaaagtgctttccggtggggaaaaaggccggatgctgtttggtaagttaatgatgcagaagccgaacattctgatcatggacgaaccgcccacccacccg

SEQ ID NO: 118293 - DNA, 1203 bp, Homo sapiens
atggtgaagaaaatggctcgtgcgccaatgatcgctggacgctggcgaacccggaaccggaaattctggcctgccggcatgggcgcaaagaagtgcgtccggatgccatcatttgcaaccccgggtcgttctgactatccgaaccagagtgaaacaaacgtcctggtgcttcccggccaacgtccatcggataccgcaggctgcatcacacctgagggcacaccagagccgtatacctatatccctgatgagcatcagcgcgaaaatcctaacatatctgcttgcaaaccaaatccaatttctcgtcaaacagcactagtcattggagaacagatgattgatgtcttagggccggagaaacgcagacggcgtaccacacaggaaaagatcgcaattgttcagcagagctttgaaccggggatgacggtctccctcgttgcccggcaacatggtgtagcagccagccagttatttctctggcgtaagcaataccaggaaggaagtcttactgctgtcgccgccggagaacaggttgttcctgcctctgaacttgctgccgccatgaagcagattaaagaactccagcgcctgctcggcaagaaaacgatggaaaatgaactcctcaaagaagccgttgaatatggacgggcaaaaaagtggatagcgcacgcgcccttattgcccggggatggggaacgaaccgatgactggatggatggccgccgcagtcgtcacactgatgatacggatgtgcttctccgtatacaccatgttatcggagagctgccaacgtatggttatcgtcgggtatgggcgctgcttcgcagacaggcagaacttgatggtatgcctgcgatcaatgccaaacgtgtttaccggatcatgcgccagaatgcgctgttgcttgagcgaaaacctgctgtaccgccatcgaaacgggcacatacaggcagagtggccgtgaaagaaagcaatcagcgatggtgctctgacgggttcgagttctgctgtgataacggagagagactgcgtgtcacgttcgcgctggactgctgtgatcgtgaggcactgcactgggcggtcactaccggcggcttcaacagtgaaacagtacaggacgtcatgctgggagcggtggaacgccgcttcggcaacgatcttccgtcgtctccagtggagtggctgacggataatggttcataa

SEQ ID NO: 118294 - DNA, 1450 bp, Homo sapiens
gaacatgaagacctcgtcaagaccgtggtcgtgactgaacacggcttgtagccgaatttggacacctccacgtctaccccgtagctccacacttcctctaggtgcctggccgcagcgcgagtcgcggggggcgggcactcaagcgcgcgtcacgaccgaacaacaagatccgaggggtcgagtcgggagacccaaggcgtcgaagtcaacgaatccaagtgcacggtttggagtggcaccgcccgcgcagaacgcacccgacatggggggggaatcatcttacgaggcgcgtaacgagacagacatgttccatattggacagcacgtgcgccagaggatgaatagaccgcgtacttccggtcggatcagaagggcacggcaattataagcactgtcgccatcctcaacggcttgcgcgtggtggagaaaaacatctccgacgtgcggatggtggtttccggcgcgggtgccgcagcaatcgcctgtatgaacctgctggtagcgctgggtctgcaaaaacataacatcgtggtttgcgattcaaaaggcgttatctatcaggaccgtgagccaaacatggcggaaaccaaagccgcatatgcggtggtggatgacggcaaacgtaccctcgatgatgtgattgaaggcgcggatattttcgtgggctgttccggcccgaaagtgttgacccaggaaatgaaaaagaaaatggatcgtgcgccaatgatcctggcgctggcgaacccgttattcggaaattctgccgccgctggcgaaagaagtgcgtccggatgccatcatttgcaccggtcgttctgactatccgaaccaggtgaacaacgtcctgtgcttcccgttcatcttccgtggcgcgctggacgttggcgcaaccgccatcaacgaagagatgaaactggcggcggtacgtgcgattgcagaactcgcccatgcggaacaaagcgaagcggtggcttcagcgtatggcgatcaggatctgagctttggtccggaatacatcattccaaaaccgtttgatccgcgcttgatcgttaagatcgctcctgcggtcgctaaagccgcgatggagtcgggcgtggcgactcgtccgattgctgatttcgacgtctacatcgacaagctgactgagttcgtttacaaaaccaacctgtttatgaagccgattttatcccaggctcgcaaagcgccgaagcgcgttggtctgccggaaggggaagaagcgcgcgttctggctgccactcaggaactggtaacgcttggactggccaaacccaaccttatcggtcggccgaacgtgatcgaaaaggcgcaattcgaaactggggcttggcagatcaaaagcgggcggttgatttttgagaatccctcttgagagccgacctgccagggcatgccagcctttggccctgggcccggcggtttttacccaacc

SEQ ID NO: 118295 - DNA, 323 bp, Homo sapiens
atggtggtgctttgtaaatttcactccgtgtttctgtctcagaaagggcaggtttatacctgtggtcatggtcctggagggcgattaggacatggagatgaacagacatgcttggtaattgaaatgtcattacactatttaggttgtttgctagatcccaatggagaaaagtgtgtaactgctcctcgtcaggtctctgcccttcaccataaagacattgctctgtctttggttgctgcaagtgatggagctacagtctgtgttaccacaaggggagatatttacttacttgcagactatcagtgcaagaagatggcttctaa

SEQ ID NO: 118296 - DNA, 1856 bp, Homo sapiens
tattggaagttatgtccagggcaatcaggaaagagaaagaaataaagggtattcaattaggaaaagaggaagtcaaattgtccctgtttgcagatgacatgattgtatatttagaaaaccccatcgtctcagcccaaaatctccttaagctgataagcaacttcagcaaagtctcaggatacaaaatcaatgtgcaaaaatcacaagcattcttatacaccaataacagacaaacagagagccaaatcatgagtgaactcctattcacaattgcttcgaagagaataaaatacctaggaatccaacttacaagggatgtgaaggacctcttcaaggagaactataaaccactgctcaaggaaataaaagatgacacaaacaaatggaagaacattccatgctcatgggtaggaagaatcaatatcgtgaaaatggccatactgcccaagtgctgggattacagacgtgagccactgcgcctggcctactggtttattaaaaaggatattgcaaaggatacagatgaagagacgcgtagggcttccagttgtgcagctctggaaatgccaattcattctgatatattaaaagttattttggactacctctatactgatgaagctgtggtgataaaagaatctcaaaatgtagattttatttgtagtgttcttgtggtggctgatcaacttctcataacccggttgaaagagatttgtgaagtagcattaactgaaaaacttaccctgaagaatgctgctatgctactggaatttgcagcaatgtatagtgcaaaacagttgaaactgtcttgtttacagtttataggattgaatatggcagctttacttgaagcaaggtctcttgatgttttaagcgatggtgttttgaaggatctttctgagttttaccggaaaatgattccagcaatggatagaagagtcattacaccatatcaagatggaccagatattagctatttggaagtagaagatggagatatcttcttgaaagaagaaataaatatggaacaaaatcattcggaaactatgttcaagaaagcaaaaacaaaagctaaaaagaagccacgtaaacgttcagatagttctggaggttataacctttcagatattattcagagtccatcatctacaggattattaaagtctggtaagaccaattctgtggaatctcttccagaactgttgacatcagactctgaaggaagctatgcaggagtgggtagtcctagagatttacagtcccctgatttcacaacaggatttcattcagataagattgaggcgaaagtcaaaccgtatgttaatggtacatctcctgtgtattctagggaagatttaaaaccatgggaaaagtcaccaatacttaaaatatctgctccacagcctattcccagtaacagaattgatactaccagctctgccagttgggttgctggttctttcagtcctgtcagccctcctgttgtggatctcagaactatcatggaaatagaagaaagtagacaaaaatgtggagctacaccaaagtcacatttaggcaaaacagtttctcatggagttaaactttctcagaagcaacgaaaaatgattgcattgactaccaaggaaaacaattcaggaatgaatagcatggaaacagttttattcactccttcaaaagcccccaaaccagtgaatgcatgggcatcttctctgcattcagtttcatccaagtcattccgggatttcttactagaagaaaaaaagtctgttactagccatagttcaggcgatcatgtcaaaaaagtttcttttaaaggaattgaaaattctcaggcaccaaaaattgtcaggtaa

SEQ ID NO: 118297 - DNA, 965 bp, Homo sapiens
tctattgaagcatggtgttagtctgtatattcaagataaagaaggcttgtcagctttggatcttgtaatgaaggatagaccaactcatgtagtattcaagaatactgatcctacagatgtttatacttggggcgataatacaaattttaccctgggtcatggaagccagaatagcaaacatcatccagagttggtggatctgttctccaggagtgggatttatatcaagcaggtggtgctttgtaaatttcactccgtgtttctgtctcagaaagggcaggtttatacctgtggtcatggtcctgggagggcgattagggacatgggagatgaacagacatgcttgggtccctcggcttgtgggaagggactgaatggtcataattgtttccccaagttggccagctgctaaggatcatactgttgtattaactgaagatggatgtgtttatacatttggtctaaacatttttcatcaattaggaattattccaccgccttccagttgtaatgtacccagacagggccttcacaatcggcagaacaggcgataccctcccgtgcctggctcagctggtcccacatccatggagcccagcaagataagacccactggcttgaaattctcgctgacaacacagcagcagtctgagatagacctgggatgctccagcttgtgctgggattacagacgtgagccactgcgcctggcctactggtttattaaaaaggatattgcaaaggatacagatgaagagacgcgtaggcatggtgttagtctgtatattcaagataaagaaggcttgtcagctttggatcttgtaatgaaggatagaccaactcatgtagtattcaagaatactggttctcttcagttccaaagtattcccagctgccgagagtcacaaattctgtctgaaaagcagggtgaccttttcagagaggagccaatgtttggaagctga

SEQ ID NO: 118298 - DNA, 727 bp, Homo sapiens
ttccgggtcgacccacgcgtccgcaaacactttggtctcttctacgctatgggcattgtattgatgatggaaggggtgctcagtgcttgctagcatgtctgccctaattattccaacttccaattcgacacctccttcatgtacatgatcgctggcctgtgcatgctgaagctctatcagacccgccacccagacatcaatgccagcgcctactctgcctatgcctcctttgctgtggtcatcatggtcaccgtccttggagtggtgtttggaaaaaatgacgtatggttctgggtcatcttctctgcaatccacgttctggcctcgctagccctcagcacccagatatattatatgggtcgtttcaagatagatttgggaattttccggcgggctgccatggtgttctacacagactgtatccagcagtgtagccgacctctatatatggatagaatggtgttgctggttgtggggaatctggttaactggtccttcgccctctttggattgatataccgccccagggactttgcttcctacatgctgggcatcttcatctgtaaccttttgctgtacctggccttttacatcatcatgaagctccgcagctcttgaaaggtcctcccagtcccgctcttctgcatcgtggccaccgctgggatgtgggcttgccgccctatattttttcttccagaatctcagcagctgggagtgtctaaaatga

SEQ ID NO: 118299 - DNA, 870 bp, Homo sapiens
atgaagccagtgtgggtcgccacccttctgtggatgctactgctggtgcccaggctgggggccgcccggaaggggtccccagaagaggcctccttctactatggaaccttccctcttggcttctcctggggcgtgggcagttctgcctaccagacggagggcgcctgggaccaggacgggaaagggcctagcatctgggacgtcttcacacacagtgggaaggggaaagtgcttgggaatgagacggcagatgtagcctgtgacggctactacaaggtccaggaggacatcattctgctgagggaactgcacgtcaaccactaccgattctccctgtcttggccccggctcctgcccacaggcatccgagccgagcaggtgaacaagaagggaatcgaattctacagtgatcttatcgatgcccttctgagcagcaacatcactcccatcgtgaccttgcaccactgggatctgccacagctgctccaggtcaaatacggtgggtggcagaatgtgagcatggccaactacttcagagactacgccaacctgtgctttgaggcctttggggaccgtgtgaagcactggatcacgttcagtgatcctcgggcaatggcagaaaaaggctatgagacgggccaccatgcgccgggcctgaagctccgcggcaccggcctgtacaaggcagcacaccacatcattaagctcacactctatgagtctgttttcatgctgctgataaaggcatacccgagactgagaagaaaaggaggcttaattggacttacagttccacatggctggggaggtttcataatcatggcagagggtgaaacgcacttcttacatggcggcagcaagacagaatga

SEQ ID NO: 118300 - DNA, 672 bp, Homo sapiens
ggtactcagaatgcggttaatggggcattattttcctgagctggggggatgcggtgaagagcttttggatataccggggcggtcgtaaaagagaagggcctttattccatgcgtgacaagtttttaatctacaccataattatcagagctgtgggtagcattattaattatgttatagcaaactataaactcaaatttatcaccccaggcgttatcgattttatctgtacgtccctgattgcgggtattctgacgattaagctatttctgctgattaatcagtttgaaaaacagcagattaaaaaaggtcgcgatatcaccagtgcgcggattatgtcgcgtatcatcaaaatcaccattattgtggggcttgttctgctttatggcgaacatttcggcatgagcctttctggcttgctgacctttggtggtattggaggtctggctgtcgggatggccggtaaagatattctgagtaacttcttttccgggattatgctctatttcgaccgtcctttcagtattggcgactggatccgttcaccggacagaaatatcgaaggtacagtagcggaaattggctggcgaattaccaaaattacgacctttgataatcgtccattgtacgtaccgaactcgctgttttcgtcgatcagcgtagaaaacccaggc

SEQ ID NO: 118301 - DNA, 347 bp, Homo sapiens
ccgctcaggccagcgacagcctggcccaggcggagcaggtactcagctctgcgggccccacctcttccttcgtcttctgaactgtgctatggcccaggacagcctggcaggtggcctcgctgcccccagttcccctctctgcccccacactcgtcttagttgcttcacactggtcactggccctgcacactgggctattgctttatccctatcctgagagcagcccctcccctgccttgcaaatgtgcctctccagtactgctcctgcacttaccccctccctgcagcaccttctctgcccgttcttgtccacacatctattaaatgcttctgttttcatttgcaaa

SEQ ID NO: 118302 - DNA, 446 bp, Homo sapiens
gaaagtcatcgacggtgagcgtgtgattgggcgtggtagtgagttctaccagctgtgccgagacctggacagctccttgcgtcccagctccagtccaggccccagagccaccgaggcccagccctgggtggagccaggctactgggagtcctggcccagccggagcagctccatcctggaggaggcctgccggcagttccaggacacactgcaggagtgctgggacctggaccgccaggccagcgacagcctggcccaggcggagcaggtactcagctctgcgggccccacctcttccttcgtcttctgaacgtggcctatggcccaggacagcctgccttgcaaatgtgcctctccagactgctcctgcacttaccccctccccgcagcaccttctctgcccgttcttgtccacacatctattaaatgcttctgttttcatttgc

SEQ ID NO: 118303 - DNA, 1521 bp, Homo sapiens
cgcatcccggaatccagattgcccactacggcctttgttcaggccccctgggcgcgttccgggagctcaggcctgcggcgctgggagaagcacgctggccaacaagttgggtggtgggcacgcggcccaggggtcaggggccgccaggcggcgggcggcggggctgcggctcttacctgccgaggaggcgccggctctgcggtgcggagttgcgccggacttcccagcttggccagtggctccgcaggctgccggctccacccctcatattcatttggattcaaggttggctctcaacagtgccagctgcactgtcatcctaaagtacttctgtggaagagaacatggtggtgtcactgttgtaccagtgatgacacaaaatcccagatctacctgacgggcctgcgagggttgaagattgtgaagcaatagcctaagggactggctggcttcgagcagggcatcggaaccaggcctcctggcactggcctgggtagagccagggcgagcaccagctgtcccccagtggaaccctgtgacagtcctgccagggcccaggccatcccaaccgacttccatctcatggaccctccagcggagaagccgggagaggctgggcggactgcagatcacaccccagctgctgaagtcacgcacaggcgagttctccctggagaccatcctgctactgaagctgcgtggctttgggactggctgacctgggctgcctgggagagtgcctgggcctggagtgggtgggacctatcaagcaaaggcgcttacccccctgggccccgtgggcctccttgcgccagctagctgtgctcaatgtctccaacaatcggctgacgggcctggagccactggccacctgtgagaacttgcagagtctcaatgccgcaggcaacctactggccaccccgggccagcttgcagtgtctggctgggctaccgtgcctggagtacctgcggctccgagaccctttggcccggctcagcaacccgctttgtgccaaccccttcctactgggctgcagtccgggagctgctgcctggcctgaaagtcatcgacggtgagcgtgtgattgggcgtggtagtgagttctaccagctgtgccgagacctggacagctccttgcgtcccagctccagtccaggccccagagccaccgaggcccagcccatgatggagccaggctatactgaggtctgcctcaggcggagcagctccatcctggaggaggcctgccggcagttccaggacacactgcaggagtgctgggacctggaccgccaggccaacgacagcctggcccaggcggagcaggtactcagctttgcgggccccacctcttcctttgttttttgaacgtggcctatggcccaggacagcctggcaggtggcctcgctgcccccagttcccctttttgccccctattttgtcctggaatatttttggggttggaactcaaaaaaaaaaaaaaaaaaatcaatcttttctcaaaaaaaaaaaaaaaaaa

SEQ ID NO: 118304 - DNA, 582 bp, Homo sapiens
gcggccgcgcacgcgcggcggggggcgtggggctgggcccagccggacgcgacctcagcctgcggcggctaactgccggtaggcgtctgtgtgcgccgccaagtcggtggggcggggacgcgaggtgtggatggggggtcgccttgacctctgcctcagccagtagcgcagtctcggcctcgccgttacggagatggtgccctgggtgcggacgatggggcagaagctgaagcagcggctgcgactggacgtgggacgcgagatctgccgccagtacccgctgttctgcttcctgctgctctgtctcagcgccgcctccctgcttcttaacaggtaacgccgcagcgcggagcctgggcggcggcttttctccgaaggtgcagacgcccggcccgtgctgcttaaccgtgcggaggccgcgtagctgcgggactggggaccagtggggagagcgagctccgcagaggagcggcctcggggagcacggcggagcgtcgaggccggaagcacaggccggtggggtggggttgattgcctcctttcccgaggcttcgtctcctgagctacctttttctcatccat

SEQ ID NO: 118305 - DNA, 1465 bp, Homo sapiens
accggactggaattcccaacgtcgacgatttcgtggcccagccggacgcgacctcagcctgttgcgtttaactgccggtaggcgtctgtgtgcgccgccaagtcggtggggcggggacgcgaggtgtggatggggggtcgccttgacctctgcctcagccagtagcgcagtctcggcctcgccgttacggagatggtgccctgggtgcggacgatggggcagaagctgaagcagcggctgcgactggacgtgggacgcgagatctgccgccagtacccgctgttctgcttcctgctgctctgtctcagcgccgcctccctggcttcttaacaggtatattcatattttaatgatcttctggtcatttgttgctggagttgtcacattctactgctcactaggacctgattctctctcaccccacagcctggttcacaataaaatacaaacccaagcagttaggacttcaggaattatttcctcaaggtcatagctgtgctgtttgtggtaaagtgaaatgtaaacgacataggccttctttgctacttgaaaactaccagccatggctagacctgaaaatttcttccaaggttgaggcaatctctctcaaaggatcttgaattagtgttggaaaactttgtttatccgtggtacagggatgtgacagatgatgaatcctttgttgatgaactgagaataacattacgtttttttgcatctgtcttaataagaaggattcacaaggtggatattccatctatttataaccaagaaactattaaaagcagcaatgaaagcatatagaagtggatagttaaagccagacagaaagtaaaaaatacagagtttttacagcaagctgctttagaagaatatggtccagagcttcatgttgctttgagaagtcgaagagatgaattgcactatttaaggaaacttactgaactgctttttccttatattttgcctcctaaagcaacagactgcagatctctgaccttacttataagagagattctgtctggctctgtgttccttccttctttggatttcctagctgatccagatactgtgaatcatttgcttatcatcttcatagatgactcgccagctgaaaaagcaactgaaccggcttctactttggttccattcttgcagaaatttgcagaacctagaaataaaaagccatctgtgctgaagttagaattgaagcaaatcagagagcaacaagatcttttatttcgttttatgaactttctgaaacaagaaggcgcagtgcacgtgttgcacgttttgtttgactgtggaggaatttaatgatagaattttacgaccagaattatcaaatggatgaaatgctgtctcttcatgaagaattgcagaagatttataaaacatactgtttggatgaaagtattgaccaaattagatttgatcccttcattggtagaagagattccaagaa

SEQ ID NO: 118306 - DNA, 1234 bp, Homo sapiens
ttcccgggtcgacgatttcgtcttgtggtgaggctgcgcggggccgaggccgcctccgagcgccaggtttattcagtcaccatgaagctgctgctgctgcacccggccttccagagctgcctcctgctgaccctgcttggcttatggagaaccacccctgaggctcacgcttcatccccgggtgcaccagctatcagcgctgcctccttcctgtaggatctaatacatcggtatggcgagggtgacagcctcactctgcagcagctgaaggccctgctcaaccacctggatgtgggagtgggccggggtaatgtctcccagcacgtgcaaggtcacaggaaccccaccacgtgctttagttctggagacctcttcactgcccacaattttcagcgagcagttgcggattgggagcagcgagctccatgagttctgccccaccatcctccagcagctggattcccgggcctgcacctcggagaaccaggaaaacgaggagaatgagcagacggaggaggggcggccaagcgctgttgaagtgtggggctttggttttctcagtgtctcactgattaacctggcctctctcctgggagtcctcgtcctgccctgcacagagaaagcgtttttcagccgtgtgctcacttacttcatcgccctgtccattggaacgctgctgtctaacgcgctattccagctcatcccagagaggagctataaaaataaggcccaagttgacagtctgcccacttttttagctcaagcagggatgctgctgtggagggtgaggatacgcagacgtgtggttgaccccattagggagtcatggatgctgcccttcacaaagatcccattgtggggatacggtctcctctgtgtgaccgtcatctccctctgctccctcctgggggccagcgtggtgcccttcatgaagaagaccttttacaagaggctgctgctctacttcatagctctggcgattggaaccctctactccaacgccctcttccagctcatcccggagaacaggagaaaatggtggcaaccagtacataacacatttggtggttccacagcttggcacactgataaatccattgagcaatcaatagatactctttttgatgaagttaaaaaagaaagtgagaaagaaacaccttcattacaaataggagatctagggccacaagagtccttgaagacgtttaacaacacaaacagtccacaccattga

SEQ ID NO: 118307 - DNA, 924 bp, Homo sapiens
atgtgggagcctgcactgccgccgcgcggccacttccgattccacaactacaaccgattctgcaccatcggggcgagaaaagccagctctgggcccattcaggatcgtcctggggtttcctggctgtggcagctgtacctccctctcacctgtgcccaccactccagagccgtgggtggaagcggccaccacattggcatctgctggggtgctgcctgggtgctgctgctgcgcatgcctggtgtcaccgtccctggctcagcctgctggccctgggccctaagcctgcagctcctctgggtcctgggccatgggtgtctgtggccccctgcagcagacctgggccctgtcccggaactcggagcccagcacataggggcacccagcgatgggccgagagcgttcatgagccccgagtggggccagccccgcctgaaaaggccatcatcacggagacaggagcagggctggcagagagacgaggacaagggcttggaggtgggagcagcttcaggagtgccgagccacaaggctgcaggagcctgggtccccagtcgcctggaggagaccctgcccacaccatactcagaccaccctcccagaatggtgactgtgcagagatgcacgcatgtcggctgcaccccgccatcttggggacccatgggacaggtggcctggctgcccagagccacgctccccgggcccttctcccctcctgcccttcttcccagcaacctgcagatggttggtgttcccttcacctgtgcctgcctggccttctcctggccccacgcattcatggccctagtaccagggaaggaggcccaggccatgggacccctggaccaaccaacccagccagttctggagctacccggggcacccgaagagtacgtccctctgttcccaggagccccactttag

SEQ ID NO: 118308 - DNA, 328 bp, Homo sapiens
gtcgcagaccctgttggggccgctcgagctggtgggcagcctcttgctggacgagtgtggcctagagctgggggaggacactccccacgtgtgctgggagccgcaggcccagggccgcatgtgtgcactctacgcctccctggcactgctatcaggactgagccaggagccccactagcctgtgcccgggcatggcctggcagctctccagcagggcagagtgtttgcccaccagctgctagccctaggaaggccaggagcccagtagccatgtggccagtctaccatggggcccaggagttggggaaacacaataaaggtggcatac

SEQ ID NO: 118309 - DNA, 735 bp, Homo sapiens
tttttttttttttttttttccttcttatgccacctttattgggtttccccaactcctgggccccatggtaaactggccaacatggctaactgggctccctggccttcctaagggctaagcaagctggtgggcaaacactcttgccctgctggatagctgccaggccatgcccgggcacaggctagtggggctcctggctcagtcctgatagcagtgccagggaggcgtaagagtgcacacatgcggccctgggcctgcggctcccagcacacgtggggagtgtcctcccccaagctctaggccacactcgtccagcaagacccaggccggtgctccttcgccccagctgttccccaggacgccggggggcagggacattggtgctgcgctcctgccacggggcactctgctccaagaggctgcccaccagctcgagcggccccaacagggtctgcgactccagcgcctccgccagcagcttgtgctgcgtcatcactcagcatggtcagtgcccccagcaggtagacaacagggatagcgagttccggcaccagcattccggagaccaaacaccagggcactccagggacagcacctgctgggaccgtccagggggttccaccgggcccaaggctctggccctgctccagcacatcccacaaggctggcaggaacatctggtcacacagccccaccaacatgtcctccagcagtatgaggcagacctctggctct

SEQ ID NO: 118310 - DNA, 1137 bp, Homo sapiens
  misc_feature (1)...(1137): n = a,t,c or g
ttagttgactgtcagctgtccttgctccaggatgctgttttngacaacggatgttttattgcctttgatgttcattaagaagcttggcgcaaatgttgcctttgtatcctcgaagaagcctctgtttgtcatgtagcttgtgataaccacattgttgcctttggcttgcggcactgcgaagtgagagtaagtgaatgtcacatcgtttggatcaagacccatttgcagcacaagccctgttttgttcagcggcttgtaagggccggttaaagagtttgatacataaccaagcatgtaaatatcgtttgagttaataccatcgatcgtcatttttgaaccgcgtgaatcagtgaacaagtaccatttgccgttcattttgaaaacattcgcgcgctcgatttcatcagttaccgtgtttgaagtgatcagcggcttcattacttttttcaatgtgtaatcattatttaactcaagcatgtaaatttcgtttgagttaaaaccatcgatggtcatttctgaaccgcgtgaatcagtgaacaagtaccatttgccgttcattttgaaaacattcgcgcgctcgatttcatcagtaaccgtgtttgaagtgatcagcggcttcattacgtttttcaatgtgtaatcattatttaactctatgataccgagggcgccgttcgctaactcagcatcgcgttttttagcgctctggtcgaactcagcgagcagctggagtctcgggttcagctctgcaccaagtccagtcgtggccacgacctcaagatctctgctgaccagcgtgcagggctgttgttctgagaacatcctttccccccgtctgctagctcgggctgccttgacgtcagtatatccagttaccctgttgggagtgactagtttataaatggcatggccagagccaacgggagatggaagacattcactggacttcattcgggcaaacctttgggcttcagcgacgcgttctgtcagcatcataacctcatcatcctgtgttggaaaacctggtagtttcttcccaattaagtgttctatgcgctggaagagttccacatcatacaacgggttatttgtgatattagagatatagggcgtctcgtacggcgcgtatttacccat

SEQ ID NO: 118311 - DNA, 1310 bp, Homo sapiens
gatgaagcccatcgttaacgtcccctgggagagaagcagaagatagcattattcctatttccatatgcagagataaggtcctgagaacttgtgtggctccccccggattccagaacaggtctttgagaactcgtctcatgatccactggaaacagacccgttcccctagcgtggcagtggctgctccgctgaactcgtgccaagttcccgctggcgtccgggcagcagggcgggagcggcggctggcacggagactccaggctgaccgcgtgtctatgtccccgcagggaatggagaggccggcggcccgggagccgcatgggcccgacgcgctgcggcgcttccagggactgctgctggaccgccgaggccggctgcacggccaggtgctgcgcctgcgcgaggtggcccggcgcctggagcgcctgcgcaggcgctccctcgtagccaacgtggccggcagctcgctgagcgcaacgggcgccctcgccgccatcgtggggctctcgctcagcccggtcaccctggggacctcgctgctggtgtcggccgtggggctgggggtggccacagccggaggggccgtcaccatcacgtccgatctctcgctgatcttctgcaactcccgggagctgcggagggtgcaggagatcgcggccacctgccaggaccagatgcgagagatcctgagctgcctcgagtttttctgccgctggcagggctgcggggaccgccagctgctgcagtgcgggaggaacgcctccatcgccctgtacaattctgtctacttcatcgtcttctttggctcacgtggcttcctcatccccaggcgggcggagggggacaccaaggttagccaggccgtgctgaaggccaagattcagaaactggccgagagcctggagtcctgcaccggggctctggacgaactcagcgagcagctggagtctcgggttcagctctgcaccaagtccagtcgtggccacgacctcaagatctctgctgaccagcgtgcagggctgtttttctgagaacatcctttccccctaatgaccgaggccagcaaatcatcctcatgggatgctccagaatttgtagctcccttaggaaaacaccaagctgggttaggagccgaaggcaaaggatgagaaaaactgtttttgaagtgggcaggtccccaaagcccttcttttcccatcactgtgacatctgcctgggcttgagtgctacggacttttcagtcttcctagtggaaaaatgtgacccaaaaactctttttcctttatcaaaaactttctgtctaaacacag

SEQ ID NO: 118312 - DNA, 556 bp, Homo sapiens
ctgcatcacccggactagccaggtcctggtcatcctgatggatgtgttcacggatgtggagatcttctgtgacattctagaggcagccaacaagcgtggggtgttcgtttgtgtgctcctggaccagggaggtgtgaagctcttccaggagatgtgtgacaaagtccagatctctgacagtcacctcaagaacatttccatccggagtgtggaaggagagatatactgtgccaagtcaggcaggaaattcgctggccaaatccgggagaagttcatcatctcggactggagatttgtcctgtctggatcttacagcttcacctggctctgcggacacgtgcaccggaacatcctctccaagttcacaggccaggcggtggagctgtttgacgaggagttccgccacctctacgcctcctccaagcctgtgatgggcctgaagtccccgcggctggtcgcccccgtcccgcccggagcagccccggccaatggccgccttagcagcagcagtggctccgccagtgaccgaacgtcctccaaccccttcagcggccgc

SEQ ID NO: 118313 - DNA, 1044 bp, Homo sapiens
ctaaactgggagaattctggatggctggcattgggcaaaagaactcagacttgactgcccactgggcgactctagacgaccccccttctctcgggtcagcacagaaggcagccccgccttccttgcgctccgccttcctaatgtcactgctggatcgtgagaggtaagcatgctggcttctactgaaacgccccttgtcatcacacgcccatcccctggggcgacacgacccaggccccgcccctcggggggctgctgcgagtccggccgggagcccagcgccctgacagaagtcgccgcgccccttgtcagcggcagctccacctctcctcgcttcggaccccgctcctccgcgggccgcagctccacccgctgacaccgaaagttcagttcagcctccagctgctccacacgccgggccttggacgctcgagcgctcctgggccccttgacgttcactccccacccccatcccagtcgcggaccctttgtgcagagctccgctgagccacataatcgcccatcccctggggcgacacgacccaggccccgcccctcggggggctgctgcgagtccggccgggagcccagcgccctgacagaagtcgccgcgccccttgtcagcggcagctccacctctcctcgcttcggaccccgctcctccgcgggccgcagctccacccgctgacaccgaaagttcagttcagcctccagctgctccacacgccgggccttggacgctcgagcgctcctgggccccttgacgttcactccccacccccatcccagtcgcggaccctttgtgcagagctccgctgagccacaggtatccttgaggtgactgtcagagatctggactttgtcacacatctcctggaagagcttcacacctccctggtccaggagcacacaaacgaacaccccacgcttgttggctgcctctagaatgtcacagaagatctccacatccgtgaacacatccatcaggatgaccaggaccttctcctcagtctttctttcctgaatttcttgggagtggaccat

SEQ ID NO: 118314 - DNA, 579 bp, Homo sapiens
atgcctggtaaacagtacaaccagaaggtcattccagctgcgtctggttccagtacccaagtttcagccaccacacatgactgtcagatagcttttcaatttcggaaggcagctaactgcaaccactttctccccaggaaatcttatgctgtgagagaggcctatgaattacagaactgtccagatccacccccatttcagaatgggtacatgatcaactcggattacagcgtggggcaatcagtatctttcgagtgttatcctgggtacattctaataggccatcctgtcctcacttgtcagcatgggatcaacagaaactggaactacccttttccaagatgtgatgccccttgtgggtacaacgtaacttctcagaacggcaccatctactcccctggctttcctgatgagtatccgatcctgaaggactgcatttggctcatcacggtgcctccagggcacggagtttacatcaacttcaccctgttacacacggaagctgtcaacgatcacattgctgtttggtatgagaacctctcaagtcaaaatatctgtgattgtgatcaacaattctga

SEQ ID NO: 118315 - DNA, 837 bp, Homo sapiens
atgtgggctggaaacgcctggcgcgccgcgctttccggggtgccgtgcggccgcagcgcgcagtcagtactggcccagctgcgcggcattctggagggggagctggaagggatccgcggagctggcacctggaagagtgagcgggtcatcacgtcccgtcaggggccgcacatccacgtggacggcgtctccggaggaatcctcaacttaacctcggtccgcttcatccgtggaacccaaagcatccacaagaatctagaagcaaaaatagcccgcttccaccagcgggaggatgccatcctctatcccagctgttgtgacgccaacgccggcctctttgaggtcctgctgagacccgaggacgcagtcctgtcggacgagctgaactgtgcctccatcatccacggcatctgcctgtgcaaggcccacaagtaccactattgccacctggacgtggcctacctagaaaccaagcttcaggaggcccagaagcatcggctgttcctggtggccaccgatggggccttttccatggatggcgacatcgtgcccctgcagaagatctgccgcctcgcctctagatatggcgccctggtctttgtggatgaatgccatgccactggtttcctgggactcacaggacagggcacagatgagctgctgggtgtgatgggccaggtcaccatcatcaactccaccctggggaaggccctgggtggtgcatcagggggctacacgacagggcctgggcccctggtgtcactgctgctgcccagccctatctcttctccaacagtctgccacctgctgttgttggctgcacctctaaggccctag

SEQ ID NO: 118316 - DNA, 2142 bp, Homo sapiens
atgattatcttaatagatgcagaaaaggcctttgacaaaattcaacagcccttcatgctaaaaactctcaacaaattaggtattgatggaacatatctcaaaataacaagagctatttatgacaaacccacagccaatatcatactgaatgggcaaaaactggaagcattccctttgaaaactggcacaagacagggatgccctctctcaccactcctattcaacatagtgttggaagttctggcccaggcaatcaggcaggagaaagaaataaagggtattcaattaggaaaagaggaagtcaaattgtccctgtttgcagatgacatgattttgtatctagaaaaccccatcgtctcagcccaaaaactccttaagctgataagcaacgtcagcaaagtctcagggtacaaaatcaatgtacaaaaatcacaagcattcctatacaccaataacagacaaacagagagccaaatcatgagtgaattcccattcacaattgctacaaagagaataaaatacctaggaatccaacttacaagggacgtgaaggacctcttcaagaagtacaaaccactgctcaacaaaataaaagaggatacaaacaaatggaagaacattgcatgctcatggataggaagaatcaatatcatgaaaatggccttcccaaggtgggaactgaacaatgagaacacttggacacaggaaggggaacatcacacactggggcctgttgtggggtgggggaagcggggagggatagcattagtagatatacctaatgtaaatgacaagttaatggtgttggaagttctggccagagcaatcaggcaaaagaaagaaataaagggcattcaattaggaaaagaggaagtcaaattgtccctgtttgcagatgacatgattgtgtatctagaaaactccatcgtctcagcccaaaatcttaagctgataagcaacttcagcaaagtctcaggatacaaaatcaatgtgcaaaaatcacaagcattcctatacaccaataacagacaaacagagagccaaatcatgagtgaattcccattcacaattgctacaaagagaataaaatacctaggaatccaacttacaagggatgtgaaggacctcttcaaggagaactacaaaccactgctcaaggaaataagagaggacacaaacaaatggaagaacattccatgctcaaggataggaagaatcaatatcatgaaaatggccatactgcccaaggtaatttatagattcaatgacatccccatcaagctaccaatgactttcttcacagaattggaaaaaactactttaaagttcatatggaaccaaaaaagagcctgcattgccaaaacaatcttaagcaaaaagaacatagctggaggcatcacgctacctgacttcaaactatactacaaggctacagtaaccaaaacagcatggtactggtaccaaaacagagatatagaccaatggaacagaacagaggcctcagaagtaacatcacacatctacaaccatctgatcttttacaaacctgacaaaaacaagaaatggggaaacgattccctatttaataaatggtgctgggaaaactggctagccatatgtagaaagctgaaactggatcccttccttacaccttatacaaaaattcattcaagatggattaaagacttaaatgttagacctaaaaccataaaaaccctagaagaaaacctaggcaataccattcaggacataggcatgggcaaggacttcatgactaaaacaccaaaagcaatggcaacaaaagccaaagttgacaaatgggatgtaattaaattaaagagcttctgcacagcaaaagaaactaccatcagagtgagcaggcaacctacagaatgggagaaaatttttgcaatctacccatctgacaaagggctaatatccagaatctacaaagaacttaaacaaatttacaggaaaaaaatcaaacaaccccatcaaaaagtgggcaaaaaatatgaacagacacttttcaaaagaagacatttatgcagccaacagacaaatgaaaaaatgctcatcatcactggtcatcagagaaatgcaaatcaaaaccacaatgagataccatctcacaccagttag

SEQ ID NO: 118317 - DNA, 1992 bp, Homo sapiens
atgggagactttaacaccccactgtcaacattagacagatcaatgagacagaaagttaacaaggatatccaggaattgaactcagctgtgcaccaagtggacctaatagacatctacagaactctccaccccaaatcaacagaatatacattcttcttagcaccacatcgtacttattccaaaattgaccacatagttggaagtaaagcactcctcagcaaatgtaaaagaacagaaattataagaaattgtctctcagaccacagtgcaatcaaactagaactcaggattaacaaactcactcaaaactgctcaactacatggaaactgaacaacatgctcctgaatgactactgggtacataatgagatgaaggcagaaataaagatgttctttgaaaccaatgagaacaaagacacaacatacaagaatctctgggacacatttaaagcagtgtgtagagggaaatttatagcactaaatgcccacaagagaaagcaggaaagatctaaaattgacaccctaacatcacaattcaaagaactagagaagcaagagcaaacacattcaaaagctagcagaaggcaagaaataactaagatcagagcagaactgaaggagatagagacacaaaaaacccttcaaaaaatcaatgaatccaggagctggttttttgaaatgatcagcaaaattgatagaccgctagcaagactaataaagaagaaaagagagaagaatcaaatagacacaataaaaaatgataaaggggatatcatcaccgatcccacagaaatacaaactaccatcagagaatactataaacacctctatgcaattaaactagaaaatctagaagaaatggataaattcccatacacaaacaccctcccaagattaaatgaggaagaaattgaatccctgaatagaacaataacaggatctgaaattgaggcaataattaagagcctaccaaccaaaaaaagtccaggaccagatggattcacagccaaattctaccagaggtacaaagaggagctggtaccattccttctgaaactattccaatcaatagaaaaagagggaatcctccctaattcattttatgaggccagcatcatcctaataccaaagcctgtgttggaagttctagccagggcaatcaggcaggagaaagaaataaagggtattcatttaggaaaagaggaagtcaaattgtccctgtttgcagatgatatgattgtacatttagaaaatcccattttctcagcccaaaatctccttaagctgataagcaacttcagcaaagtctcaggatacaaaatcaatgtgcaaaaatcacaagcattcctatacaccaccaacaaacaaacagagagccaaatcatgagtgaactcccattcacaattgcttcaaagagaataaaatacctaggaatccaacttacaagggatgtgaaggacctcttcaaggagaactacaaaccactgctcaatgaaataaaaaaggacacaaacaaatggaagaacattccatgctcatggataggaagaatcaatatcgtgaaaatggccatactgcccaaggtaatttacagattcaatgccatccccatcaagctaccaatgactttcttcacagaattggaaaaaactactttaaagttcatatggaaccaaaaaagagcccacattgccaagacactcctaagcaaaaagaataaagctggaggcatcatgctacctgacttcaaactatactacaaggctacagtaaccaaaacagcatggtgttggtaccaaaacagagatatagaccaatggaacagaacagagccctcagaaataataccacacatctacaacaatctgatctttgacaaacctgacaaaaagaagaaatggggaaaggattcccaatttaataaatggtgctgggaaaactggctagccatatgtagaaagctgaaacgggatcccttctttacatcttaa

SEQ ID NO: 118318 - DNA, 1107 bp, Homo sapiens
atggacaaattcctggacacctacactctcccaagactaaaccaggaagaagttgaatccctgaatagaccaataacaggctctgaaattgaggcattaattaatagcctaccaaccaaaacaagtccagaactagatggattcacagctgaattctaccagtggtacaaagaggagctgataccattacttctgaaactattccaatcagcagaaaaagagggaatcctccctaattcattttacaaggccagcatcatcctgataccaaagcctggcagagtcacaataaaaaaagagaattttagaccaatatccctggtgaacattgatgcaggaatcctcaagaaaatactggcaaaccaaatccagcagcacatccaaaagcttatccatcatgatcaggtaatttatagattcaatgccatccccatgaagctaccaatggctttcttcacagaattggaaaaaactactttaaactccacatggaaccaaaaaagagcctgcattgccaagacaatcctaagcaagaagaacaaagctggaggcatcatgctgcctgacttcaaactatactacaaggctacaataaccaaaacagcatggtactggtaccaaaacagagagatagaccaatggaacagaacagaggcctcagaaataataccacacatctacaaccatctgatctttgagaaacctgagaaaaacaagaaatggggaaaggattccctatttaataaatggtgctgggaaacctggctagccatatgtagaaagctgaaactgcctcccttccttacaccttatacaaaaattaattcaagatggattaaagacttaaatgttagacctaaaaccataaaaactgtagaagaaaacaaaggcaataccactcaagacataggcatgggcaaagacttcatgagtaaaacacgaaaagcaatggcaacaaaagccaaaatagacaaatgggatctaattaaactaaagagcttctgcacagcaaaagaaactaccatcggagtgaacaagctagctacagaatgggagaaaatttttggaatctacccatctgacaaagggctaatatccagaatctga

SEQ ID NO: 118319 - DNA, 882 bp, Homo sapiens
atgactgtcttttcaacaaatggtgctcagaaattggatatccacaaacacctctacgcaaataaactagaaaatctagaagaaatggatacattcctcgacacatacactctcccaagactaaaccaggaagaagttgaatctctgaatagaccaataacaggagctgaaattgtggcaacaatcaatagtttaccaaccaaaaagagtccaggaccagatggattcacagccgaattctaccagaggtacaaggaggaactgctgataagcaacttcagcaaagtctcaggatacaaaatcaatgtacaaaaatcacaagcattcctatacaccaacaacagacaaacagagagccaaatcatgagtgaactcccattcacaattgcttcaaagagaataaaatacctaggaatccaacttacaagggatgtgaaggacctcttcaaggagaactacaaaccaccactcaacaaaataaaagaggacacaaacaaatggaagaacgttccatgctcatgggtaggaataatcaatattgtgaaaatggccatactgcccaaggtaatttatagattcaatgccttccccatcaagctaccaatgattttcttcacagaattggaaaaaactactttaaagttcatatggaaccaaagaagagactgcattgccaagacaatcctaagccaaaagaacaaagctggaggcatcatgctacctgacttcaaactacactacaaggctacagtaaccaaaacagcatgctactggtatcaaaacagacatatagaccaatggaacagtacagagccctcagaaataataccacacatctacaaccatctgatctttgacaaacctgacaaaaacaagaaatga

SEQ ID NO: 118320 - DNA, 1662 bp, Homo sapiens
atgattgtatatttggaaaaccccatcgtctcagccccaaatctccttaagctgataagcaacttcagcaaagtctcaggatacaaaatcaacgtgcaaaaatcacaagcattcctatacaccaataatagacaaacagagagccaaatcatgagtgggtgcccattcacaattactgcaaagagaataaaatacctaggaatacaacttacaagggatgtgaaggacctcttcaaggagaactacaaaccagtgctcaacaaaataaaagaggacacaaacaaatggaagagcatttcatgctcatggataggaagaatcaatatcatgaaaagggccatactgcccaaggtaacttatacattcaatgctatccccatcaagctaccactgacttccttcacagaattggaaaaaactactttaaagttcatatggaaccaaaaaagagcacgcatagccaagacaattctaagcaaaaagaacaaagctggaggcatcacactacctgacttcaaactatactacaagtgtacagtaaccaaaacagcatggtgccagtaccaaaacagatatatagaccaatggaacagaacagaggcctcagaaataacaccacacatctacaaccatctgatctttgacaaacctgacaaaaacaaacaatggcatttatcactatttaatacagaagttcccatagtgtggtccccagaactttctagcaagttcgcaggtgatgctgatgccggtcgtccagagacacctttgagaaccggtttgaggagaatctcttttctcagacttgcaatatttctgatttgggtagagctaaaccactcgaactttagggaccaccttaagtgtctcttaaaactcagaaggctgggacccatccctagagtttctgattgggtaggacaggttggagatctagaaggaaaaaatggttccatgagccagatacagggccagctgctctgtgtagccttgggacatggcaccccagctgctccagctccagccatagctaaaagggaccaaggtgtggcttgggccatggccacaccaaggtgtggtgttgggcctatgggtgcgcagaaggcaagaggtgaggtttgggaatctctgcctagatttcaaagaatgtatggaaatgcccagatgtctaggcagaagtgtgctgcactggtggagccctcatggaacacctctacaagagcagtgcagagaagatatggggggttggagcccccatgcagcatgcccactggggcactgcctagtggagctgtgagaagagggccaccatcctctagacctcagaatggtagacctactgacagcttacatcatgcacctggaaaagtcacaggcactcaacatcagcctgtgaaagcagccaagggggctgtaccctgcagagccacaggggtggagctgcccaaggccttgggagcccaccccttgcattggcatgacctggaagtgagacatggagtcaaaggagattattttggagctttacaattgaatgactttcctggtgggcttcagacttgcatggggcctgtagcccctttgttttggccaatttctcccattaagaatgggagcatttatccagtgcctgcaccctcactgtatctcagaagtaactaa

SEQ ID NO: 118321 - DNA, 1500 bp, Homo sapiens
atggggaaaaaacagagcagaaaaactgaaaattctaaaaatcagagtgcctctccccctccagaggaatgcagctcctctccagcaatggaacaaagctggatggagaatgactttcacgaattgagagaagaaggcttcagatcaaacttctccgagctaaaggaggatgttcgaacccatagcaaagaagctaaaaatcttgaaaaaagattagatgaatggctaactggaataaccagtgtagagaagtccttaaatgacctgatggagctgaaaaccatggcacgagaactatgtgacaaatgcacaagcttcagtagcaaattccatcaactggaagaaagggtatcagtgactgaagatcaaatgaatgaaatgaagagctggttttttgaaaagatcaacaaaattgatagactgctagcaagactaataaagaagaaaagagagaagaatcaaatagaggcaataaaaaatgataaaggggatatcaccaccgatcccacagaaatacaaactaccatcagagaatactataaacacctctacacaaataaactagaaaatctagaagaaatggatacattcacgggcacatacaccctcccaagactaaaccaggaagaaattgaatcactcaataaaccaataacaggctctgaaattgaggcaataattaatagcttaccaaccaaaaaaagtccaggaccagacggattcacagctgaattctaccagaggtacaaggaggagctgcttgttcaacatacgaaaattgataaaccttattcagcttataaaccgaacccaagacccgtgaccgccactagactaagtcgaattggacgcagagttcatcaatatctagaaaaccccattgtctcagcccaaaatctccttaagctgaaaagcaacttcagcaaagtctcagggtacaaaatcaatgtgcaaaaatcacaagcattcttatacatcaagaagagacaaacagagagccaaatcatgagtgaactcccattcacaattgcttcaaagagaataaaatacctaggaatccaacttataagggatgtgaaggacctcttcaaggagaactacaaaccactgctcaatgaaataaaagagggcacaaacaaatggaagaatattccatgctcatggataggaagaatcaatatcgtgaaaatggccatactgcccaaggtaatttatagattcaatgccatccccatcaagctaccaatgactttcttcacagaattggaaaaaattactttaaagttcatatggaaccaagaaagagcctgcattgccaagacaatcctaagcaaaaagaacaaagctggaggcatcatgctacctgacttcaaactatactacaaggcttacagtaatcaaaacagcatgggactggtaccaaaacagatatctagaccaatggaacagaacagagccctcagaaataaccccacacatctacaaccatctgatctttga

SEQ ID NO: 118322 - DNA, 1962 bp, Homo sapiens
atggggagaaaccagagcagaaaagctgaaaattctaaacatcagagcgcctcttctcctccaaaggaatgcagctcctcgccagcgatggaacaaagctggatggagaatgactctgaggagttgagagaagaaggcttcaaacgaataaacagcttagagaagaccttaaatgacctgatggagctgaaaaccttggcaagagaaccacgtgatgcatgcacaagcttcagtagccaattcgatcacgtggaagaaagggtatcagtgattgaagatcaaatgaatgaaatgaagagagaagagaagtttagagaaaaaatagtaaaaagaaatgaacaaagcctccaagaaatatgggactatgtgaaaagaccaaatctacttctgattggtgtacctgaaagtgatggggagaatggaaccaagttggaaaacactctgcaggatgttatccaggagaacgtccccaacctagcaaggcaggccaacattcaaattcaggaaatacagagaatgccacaaaaatactcctcgagaagagcaactccaagacacataattgtcagattcaccaaagttgaaatgagggaaaaaatgttaagggcagagagacagaaaggtcgggttacccacaaagggaagcccatcagactaacagctgatctctctgcagaaactctacaagccagaagagagtgggggccaatattcaacattcttaaagtaaagaatttgcaacccagaatttcatatccagccaaactaagcttcataagtgaaggagaaataaagtcctttacagacaatcaaatgctgagagattctgccaccaccaggcctgccttacaagagctcctgaaggaagcactaaacatggaaaggaataacagctcaaatctccttaagctgataagcaacttcagcaaagtctcaggatacaaaatcaatgtgcaaaaatcacaagcattcttatacaccaacaacagacaaacagagagccaaatcatgagtgaactcccattcacaattgcttcaaagagtataaaatacctaggaatccaacttacaagggatgtgaaggacctcttcaaggagaactacaaaccactgctcaacgaaacaaaaggacacaaaaaaaggaagaaccttccatgctcatgggtaggaagaatcaatattgtgaaaacggccatactgcccaaggtaatttatagattcaatgccatccccatcaagctaccaatgattttcttcacagaattggaaaaaactactttaaagttcatgtggaaccaaaaaagagcctgcattgccaagacaatcctaagccaaaagaacaaagctggagggatcacgctacctgacttcaaactatactacaagtctacagtaaccaaaacagcatggtactggtaccaaaacagagatatagacccatggaacagaacagagccctcagaaataataccacacatctacaaccatctgatctttgacaaacctgagaaaaacaagcaatggggaaaggattccctatttaataaatggtgctgggaaaactggctaggcatatatagaaagctgaaactggatctcttccttatgccttatacaaaaattaattcaagatggattaaagacttaaatgttagacctaaaaccataaaaaccctagaagaaaacctaggcaataccattcaggacataggcattggcaaggacttcatgactaaaacaccaaaagcaatggcaacaaaagccaaaattgacaaatgggatctaattaaactgaagagcttctgcacagcaaaagaaactaccatcagagtgaacagacaacctacagaatggcagaaaatttttacaatctacctatctgacaaagggctaatatccagaatctacaaagaacttaaacaaatttacaagaaaaaatcaaccccatcaaaaagtgggtga

SEQ ID NO: 118323 - DNA, 1716 bp, Homo sapiens
atgcgaccccagggccccgccgcctccccgcagcggctccgcggcctcctgctgctcctgctgctgcagctgcccgcgccgtcgagcgcctctgagatccccaaggggaagcaaaaggcgcagctccggcagagggaggtggtggacctggtgagtccgagggagccgagccgggaccgccgcgctggtggaggggacctggccgcgcgccccacgggcagggcgtcagtctggctgttgggggtgtctgtctgtacagctgtgtgtcgtgtgtcttgctgcgccggggtgtcatgctttttatttacaggtgaagaaggacctggttatgcgtgcagtgagtcttggaactcagaggggagaccaaaatgggaggccatcgtggagcggacatgcgatatgggcccggagcatcacagtcaagctacgggagaaaacagtttccaggaaactggaaatgaacggcccgagtgctttccaggggctcatctgtgggaagtattggaagttctggccagggcaatcaggcaagagaaggaaataaagggtattcaaataggaagagaggaagtcaacaaattgtctctatttgcagatgacatgattgtatatttagaaaaccccatcgtctcagccaaaaatttccttaagctaataagcaacttcaacaaagtctcaggatacaaaatcaatgtgccaaactcacaagcatttctatacaccagtaacagacaaacagagagccaagtcatgagtgaactcccattcacaactgctactaagagaataaaatacctaggaatccaacttagaagggacgtgaaggacctcttcaaggagaactataaatcactgctcaaggaaataagagaggacacaaacaaatggaaaaacattccatgctcatggataggaagaatcaacatcatgaaaatggccatattgcccaaagtaatttatagattcaatgatatccccatcaagttaccactgactttcttcacagaattggaaaaaactactttaaacttcatatggaaccaaaaaagaacccacatagccaagacaatcctgggcaagaagaacaaagctggaggcatcacgctacctgacttcaaactatactacaaggctacagtaaccaaaacagcatggtactggtaccaaaacagatatacagaccaatggaacagaacagaggcctcagaaataacaccacacatctataaccatctcatctttgacaaacctgacactaacaagcaatgggaaaaggattacctatttaataaatggtgttgggaaaactggctagccatatgcagaaaactgaaactggaccccttccttacaccttatacaaaactcaactcaagatggatcaaagacttaaacgtaagacttaggaccataaaaatcctagaagaaaacctgggaaataccattcaggacgtaggcatgggcaaagacttcatgtctaaaacaccaaaagcaatggcaacaaaaaccaaaattggcaaatgggatctaattaaactaaacagcttctgcacagcaaaggaaactatcatcagagtgaacaggcaacctacagaatgggagaaaatttttgcaatctatccatctgacaaagggctaatatccagaatctacaaagaacttaaacaaatttacaagaaaacaacaaccccatcaaaaagtgggcaaaggatatga

SEQ ID NO: 118324 - DNA, 1155 bp, Homo sapiens
atgttctggggcttcagattccagacctcaacagactacaaagcctcttctgctttcattcagagaggaacacagccgctgttaaagcagcccgggctgtccatcaccatttgtgatgtgcgaagttggagtgcaagaggctccccaactgagggtggcaggggtactgaaatccagcctgcagctcctcttgccttaaagatgccattctcccatgaagccattcaccttggaggctgcatccacctggagagggggccattttctaatctgcacaaaggcacaggagaggttaatgggggcctgaaagcaccacccctggaccatcagctaaccttcttggccccatcatgctcaagagcaaggttgagcccactcaggatgatagtgttggaagttctggccagggcaattaggcaagagagagaaataaagggtattcacataggaaaagaggaagtcaaattgtgcctgtttgcagatgatatgattgtatatttagaaaaccccatcatctcagcccaaagtttccttaagctgataagcaacttcagcaaattctcaggacacaaaatcaatgtgcaaaaatcacaagcattcctatacaccaataacaaacaaacagacagccaaataatgagtgacctcccattcacaattgcttcaaagagaataaaatacctaggaatccaacttacaagggatgtgaaggacctcttcaaggagaactacaaaccactgctcaacgaaataaaggaggacacaaacaaatggaaggacattccatgctcatggataggaagaatcaatatcgtgaaaatggccatattgcccaaggtaatttatagattcaatgccatccccatcaagctaccaatgactttcttcacagaattggaaaaaactactttaaagttcatatggaaccaaaaaagagcccacattaccaagacaatcctaagccaaaagaacaaagctggaggcatcatgctacctgacttcaaactatactacaaggctacagtaaccaaaacagcatggtacttgtaccaaaacagagatatagaccaatggaacagaacagagccctcagaaataacaccacacatctacaaccatctgatctttgacaaacctgacaaaaacaagaaatag

SEQ ID NO: 118325 - DNA, 4755 bp, Homo sapiens
atggcagcagatgaaagctcacagaacactttgcggctccagttcaaggcaatgcaggagatgcagcacaaacggttacagaagcagatggagaaaaagagggaaaaagaactgagcctcaaaagcagagctgacgaccaagaggagcccttggaggtttcagatggcctcagccttctccacgcaggggagccaaactcgaaaaatagctttgagaagagggtgcttgaagatgagattgaacaccttcgaaatgagctcagggaaacggtggacgagaacgggcgattgtataagctgctgaaggaaagggactttgaaatcaaacacctcaaaaagaaaatagaagaggacagatttgccttcacagggacagccggtgtagccggagacgtggtcgccaccaaaattgtggagctatcaaaaaagaaccggctgttgatggcagaatcagagggtgcaaaaaccagggtgaagcagctgaccaatcgcatccaggagctggagcgggaacatcctcactggggacacatccagactccaccttactccagggacagggagctcactactgcccagtggaatcctgttctttatggggcagttcatattatgaacactttccctttcgtggggctccaaatctacagagtaaaagtggctattggaaatggggacttattccccagagcccattttactaaaccagtgacagttcatgaaactcaagagctggagaccccagaggtgaaggccctgcaggacaggctggtggccaccaacttgaagatgagtgacctccgaaaccagatccagtctgtgaagcaggagctgcggatggcacagaaggttttggccagagaggttggggaagacatcaacgttcagcagctcctatcttcgccagggacctggaggggtcgggctcaacaaattcttgttttgcagagcaaggttcaagagcttgagaagcaattgggccaggcccggagccagtctgcgggaacagccagtgatgagttgtctgtctatccagacccaaggaagctgtcggcacaggagaaaaacctgctgaggatccgcagcctggaaagggaaaaacaggaaggcttggagaaacttgccagtgaacgggatgtcctccagagagagcttgaagagctaaaaaagaagttcgagggcatgaggtctcggaacaagctgctgtcaagtgagatgaagaccctcaagagtcagatgggaaccctggtggagaagggccggcatgatgacgagctcatcgacgccctcatgagaataaaatacctaggaatccaacttaaaagggatgtgaagaacctcttcaagaagaactacaaaccactgctcaatgaaataaaagaggacacaaacaaatggaagaatattccatgctcatgggtaggaagagtcaatatcatgaaaatggccatactgcccaaagtaatttatagattcagtgccatccccatcaagctaccaatgactttcttcacagaattggaaaaaactactttaaagttcatatggaatcaaaaaagagcccacattgccaagacaatcctaagcaaaaagaacaaagctggagggatcatagtacctgacttcaaactatactacaaggctacagtaaccaaaacagcatggtactggtaccaaaacagatatatagaccaatggaacagaacagaggcctcagaaataacaccacacatctacaaccatctgatctttgacaaacctgacaaaaacaagaaatgggggaaggattccctatttaataagtggtgctgggaaaactggctagccatatgtagaaagctgaaactggatcccttccttacaccttatacaaaaattaattcaagatggattaaagatttaaatgttagacctaagaccataaaaaccctagaagaaaagctaggaaataccattcaggacataggcatgggcaaggacttcatgactaaaacaccaaaagcaatggcagcaaaagccaaaatagacaaatgggatctaattaaactaaagagcttctgcatggcaaaagaaactaccatcagagaccagctgaagcagctacaggagatcctaggcagcctgagtctgcaggaggagaaaacgcgagtgtcccagcaccacctggaccagcaactgaacagcgaggctcagcggagcaacagcctagtcgcccagctgcaggccatggtagctgagcgggaggccaaagtgcgacagctggagatggagatcggacaactcaatgtgcactatcttcggaataaaggagtgggtgaggggtccagtggccgcgaggtcagccctgcctatacccagttcctggaggacccaggcctgaccaagtccccggcctcagcaggcgatcatgttggcaggcttggatcttctcggttctcggactccccagaacaaaaaggctggcaggcacaagtgtcagagatcaaggccctctggcaggctgccgaggtggagcgtgaccggctcaccgagtttgtcactgtcctgcagaaacgggtggaggagagcaacagcaagctcctggagtcagagaggaagctgcaggaggagcgacaccgcaccgtggtgctggagcaacatctggagaagatacgcctggagccagggaaggcatcagcctcccagagagcagctcccaggaccaaaacaggtctgcccacctctaacaacaggcacaacccaaccgggagcgagaagaaggacccatcctttgcccagctctccgatgtgcccgtggaatcccaaatggaagagctgacaaccaggctggccatccaggtggaggagaatgaaatgctaaaggctgccctgggcagtgccctgcggggaaaggaggaggacttccggatgtaccatgagatcctgggccaggccaggaaggcagaagagaagccctggtgggacactgcaggagaccctgggctggctgggttacagcagcagggaggcccagcagcccactggcagaggcgagagctctgggatggcaaggcggctgtgaatggacagatgcagtccctcgggcaggtgttcatcgccctcatcctaggtccctgcccctatctggcccatgacccctccatctgtacgaggagaccgtcggctgctggggggcccaggggagatggctacagggctggggatgaagatttaggggaggatcaaggccctgtccaggctatgggcatcaagacagcattgccggcggctgagctgggcctctactctctggtgctgagtggggccctggcctatgctggccggggcctccttgaggcttcacaagatggggcccacaggaaggccttccgggagtctgtgcgacctggctgggagtacattggccggaagatggatgtggctgacttcgagtgggtgatgtggttcacctcctttcgcaacgtcatcatctttgccctctccggacatgtgctgtttgctaaactctgcacgatggttgccccaaagctccgctcctggatgtatgctgtgtacggggccttggctgtgatgggcacaatgggcccttggtacctgctgctgctgcttggtcactgtgtgggcctctatgtggcctcgcttttgggccagccctggctctgtcttggccttggcttggccagcctggcctccttcaagatggaccccctaatctcttggcagagcgggtttgtaacaggcacttttgatcttcaagaggtgctgtttcatgggggcagcagcttcacagtgctgcgttgcaccagctttgcactggagagctgtgcccaccctgaccgccactactccttagctgacctgctcaagtacaacttctacctgcccttcttcttcttcgggcccatcatgacctttgatcgcttccatgctcaggtgagccaggtggagccagtgagacgcgagggtgagctgtggcacatccgagcccaggcaggcctaagcgtggtggccatcatggccgtcgacatcttctttcacttcttctacatcctcactatccccagcgacctcaagttcgccaaccgcctcccagacagtgccctcgctggcctagcctattcaaacctggtgtatgactgggtgaaggcggccgtcctctttggtgttgtcaacactgtggcatgcctcgaccacctggacccaccccagcctcccaagtgcatcaccgcactctacgtctttgcggaaacgcactttgaccgtggcatcaacgactggctttgcaaatatgtgtataaccacattggtggggagcattccgctgtgatcccagagctggcagccacagtggccacatttgccatcaccacactgtggcttgggccttgtgacattgtctacctgtggtcattccttaactgctttggcctcaactttgagctctggatgcaaaaactggcagagtgggggcccctagcacgaattgaggcctctctgtcagtgcagatgtcccgtagggtccgggccctgtttggagccatgaacttctgggccatcatcatgtacaaccttgtgagcctgaacagcctcaaattcacagagctggttgcccggcgcctgctactcacagggttcccccagaccacgctgtccatcctgtttgtcacctactgtggcgtccagctggtaaaggagcgtgagcgaaccttggcactggaggaggagcagaagcaggacaaagagaagccggagtag

SEQ ID NO: 118326 - DNA, 2793 bp, Homo sapiens
atggaaatcacaacaaactgtctctcagaacacagtgcaatcacattacaactcaggattaagaaactcactcaaaactgcacaactacatggaaattgaactacctgctcctgaatgactactgggtgaataacgaaatgaaggaagaaataaagatgttctttgaaaccaatgagaacaaagacacaacataccagaatctctgggacgtatttaaagcagtgtgtagagggaaatttatagcactaagtgcccacaagagaaagcaggaaagatctaaaactgacaccctaacatcacaattgaaagaactagagaagcaagagcaaacacattcaaaagctagcagaaggcaagaaataactaagatcagagcagaactgaaggagatagagacacaaaaaacccttcaagaaatcaatgattccaggagctcattttctgaaaagctcaacaaaattgatagaccgctagcaagactaataaagaagaaaagagagaagacacaaatagatgcaataaaaaacgataaaggggagatcaacaccaatcccacagaaatacaaactaccatcagagaatactataaatacctctatgcaaataaagtagaaaatctagaagaaatggatacattcctggacacatacaccctcccaagactaaaccaggaagaagttgaatctctgaatagaccaataacaggctctgaaattgaggcaataattaatagcctaccaaccaaagaaagtccaggaccagatggattcacagccgaattctaccagagggcaatcaggaaagggaaagaaataaagggtattcaattaggaaaagaggaagtcacattgtccctgtttgcagatgacatgattgtctatttaggaaaccccatcatctcagctcaaaatctcatgaagctgttaagcaacttcagcaaagtctcaggatacaaaatcaatgggcaaaaatcacaagcatgcccgtacaccaataacagacaaacagagagccaaatcatgagtgaactcccattcacaattgctacaaagagaataaaatacctaggaatccaacttacgagggatgtgaaggacctcttcaaggagaactacaaaccactgctcaacaaaataaaagaggacaaaaagaaatggaaaaacattcaatgctcatggataggaagaatcattatcatgaaaatggccatactgcccatggtaatttgtagattcaatgccatccccatcaagctaccaatgactttcttcacagaattggaaaaaactacgttaactttcatatggaaccaaaaaagagcctgcattgccaagaaaatcctaagcaaagagaacaaagctggaggcatcatgctacctgacttcaaactatactacaaggctacagtaaccaaaacagcatggtactggtaccaaaacagatacatagaacaatggaacagaacagaggcctcagaaataacaccacacatctacaaccatctgatctttgacaaatctgacaaaaacaagaaatggggaaacaattccctatttaataaatggtgctgggaaaactggctagctatatgtagaaagctgaaactgggtcccttccttacactttatacaaaaattaattcaagatggattaaagacttaaatgttagacctaaaaccataaaaaccctagaagaaaaccgaggcaataccattcaggacataggcatgggcaaggacttcatgactaaaacaccagaagcaatggcaacaaaaaccaaaatagacaaatgggatctaattaaactaaagagcttctgcatggcaaaagaaactaccatcagagtgcacagacaacctacagaatgggagaaaatttttgcaatctacccatctgacaaagggctaatatccagaatctacaaagaacttaaacaaatttacaagaaaaaaacaaacaaccccatcaaaaagtgggcaaaggacatgaacagacacttctcaaaagaagacatttatgcagccaacagacacatgaaaaaatgctcatcatcactggccatcagagaaatgcaaatcaaaaccacaatgaggctgagatattcaagatgcctaaatgtggacgcagtttctctgaaaagggtcgactcagaggttcaggagggaagtagaactccacttggcaggaagtgggaaaaggtcatggccagggttcagccacactggctcttcaattcctttgtggcttcagcagttcttctccagctgcgagctgaagcccacgctgctctcaggcttcccgcaacaggcacctgcgacttcgctcaccaaaatcttccagtggccacagtgagcgggcaggactggtgccagcaagccccaagcatcccaggccctctggacgcaggtgactcttctggcctctttggaaagccattggagctcgagaggcatagccagctgcctcctttccgtccatccccaaccgcgttctctaagccacgttctgtgcgccttactcccagcactcagccattccccagccccagaggccttggagtagtgacctctgcccaccagagaggagggggccggagggtggggcggagccttgtggcaaggcaggggtcacgtctccaggacgtgctacccggtggtttagacccgtcagggaggcacagcgtgaagggacagcgcagcgcagtagaggcacctgctggagacagcaccaggccagaccccaggatcacgggaactcctgctcccgccacagctctaaagagtgttgaataa

SEQ ID NO: 118327 - DNA, 3480 bp, Homo sapiens
atgggaacctctgaagtgcagaatggagaggagagagctggcaccagcggccagggcagcgtggagcagctcagcggcagctcagtccagctccctcctggcctcaaactctgctttgagccctacttttccagctgtgcttctgactgcattcttcatgccagccccctctccttaatggctgcatcaggctcccaaaaccccaatctgtgggcttcctggttgtgctgcaaatgggttcagtgcccagaacgtcagcttggctgccacctgacttcaagtgtcatctatggcctcaggtactacccccaggccaaacgcagtgaattagaactcagggactgtgagggcctctgcaatcagacatctcccctcagctcacttgatgggatgggctggaaagcagcagcagaagagagcaactctggaatcagaaacatctggattccaattccagcatttgctactcacaagcaatacaatgtcagacaggtgataagcccctctccaccttactggtctcatcgaggaaatggaaataacagcctctgtgtcacaaggttatcaggaggactgaagcaaccagtagcaggcacaggaagaggtttagaaggtgggagcggaacaagggacctgatgccattcttgtcagcagcacccaaggaacagcccccaatcctggcacctgcacgtaggagctggttttttgaaaagatcaacaaaattgatagactgctagcaagactaataaagaagaaaagagagaagaatcaaatagatgcaataaaaaatggtaaaggggatatcaccactgatcccacagaaatacaaactaccatcagagaatactataaacacctctatgcaaataaactagaaaatctagaagaaatggataaattcctcgacacatacaccctcccaagactaaaccaggaagaagctgaatctctgaatagaccaataacaggctctgaaattgaggcaataattaatagcttatcaaccaaaaaaagtccaggaccagatggattcacagccgaattctaccagaggtacaaggaggagctggtaccattccttctgaaactattccaatcaacagaaaaagagggaatcctccctaactcattttatgaggccagcatcatcctgataccaaagcctggcagagacacaacaaaaaaagagaattttagaccaatatccttgatgaacattgatgcaaaaatcctcaataaaatactggcaaaccgaatccagcagcacatcaaaaagcttatccaccatgatcaagtgggcttcatccctgggatgcaaggctggttcaacatacgaaaatcaataaacgtaatccagcatataaacagaaccaaacacaaaaaccacatgattatctcaatagatgcagaaaaggcctctgacaaaattcaacaacccttcatgctaaaaactctccgtaaattaggtattgatgagacacaaacagagagccaaatcatgagtgaactcccattcacaattgcttcaaagagaataaaatacctaggaatccaacttacaagggacgtgaaggacctcttcaaggagaactacaaaccactgctcaatgaaataaaagaggatacaaacaaatggaagaactttccatgctcatgggtaggaagaatcaatattgtgaaaatggccatagtgcccaaggtaatttatagattcaatgccagccccatcaagctaccaatgactttcttcacagaattggaaaaaactactttaaagttcatatggaaccaaaaaagagcctgcattgccaagtcaatcctaagccaaaagaacaaagctggaggcatcatgctacctgacttcaaactatactacaaggctacagtaaccaaaacagcatggtactggtaccaaaacagagatatagaccaatggaacagaacagagccctcagaaataacgccgcatatctacaactatctgttctttgacaaacctgacaaaaacaagcaatggggaaaggattccctatttaataaatggtgctgggaaaactggctagccatatgtagaaagctgaaattggatcctgtacttacaccttatacaaaaattaattcaagatggattaaagacttacatgttagacctaaaaccataaaaaccctagaagaaaacctaggcattaccattcaggacataggcatgggcaaggacttcatgtctaaaacaccaaaagcaatggcaacaaaagccaaaattgacaaatgggatctaattaaactaaagagcttctgcacagcaaaagaaactaccatcagagtgaacaggcaacctacagaatgggagaaaatttttgcaacctactcatctgacaaagggctaatatccagaatctacaatgaactcaaacaaatttacaagaaaaaaacaaacaaccccatcaaaaagtgggcgaaggacatgaacagacacttctcaaaagaagacatttatgcagacaaaaagcacatgaaaaaatgctcatcatcactgatcatcagagaaatgcaagtcaaaaccacaatgagataccatctcacaccagttagaatggcgatcattaaaaagtcaggaaacaacagcctctttagaggtcatggagccaaagaatcttatgttgacaaggacaagaggggccatctacattcaggagttccttttcaaaagtccccagcaggatttgcaaaagctgagagaggatccaggagaagtgtagtagctgcaggcctgctgccgtctctcaccagcaacatgagccggcagacaaatgacaacacatgcacggctgccacagtgccgagctaccgaatgcacagacaatatgatgctgtcctgtcctgtgcaagatgtctcttgtggcccaccctaactggaattatgcagaaaagggaattctgggaagcacagttcagccttgccatggtgacatgtaacaatgtggcaggccagaccccaccccatacaacagaaccaagaaagaaaaaaggtgtgatggcaaaactctctggggctttcactggcaaatctgtcttctcaggtgagagctcaatgggagaggaaagccctgcaggaatgcgaaatggaacaggtgctagggtggggcaggaggagagggtgggagttgggaaggaaaggcagctgaggaagaaagaactggaggtgggactccctgaattagaatctccagggagtgaggccagagtggtgtcgagctgcatgtccccctctgatgcgcaggcatatttgggacaccactccccgcccccagctgtgggccacctgggaacttgcttggctacctctagatatactgattcctgtaccttccagtggttctgtttgctgtctggatacatttggtctttgcctactcaatgtgaagatggcgaggatgaagacctttatgatggtccacttccatttaatgaatggtaa

SEQ ID NO: 118328 - DNA, 1009 bp, Homo sapiens
atgctggatgcttcctgccatcgaacatcggactccaagtttttcagctttggggttcagactggcttccttactcctgagcttgcacaccttgtgggaccttgtgatcgtgatcacaactcctcaccagcaagggaacaaaactggacagagaatgagtttgacgaattgacagaagtaggcttcagaaagtgggtaataacaaactcctccgagctaaaggagcatgttctaacccaaagcaaggaagctaagaaccttgaaaaaagggcaatcaagcaagagaaagaaataaagggtattcaattaggaaaagaggaagtcaaattgtccctgtttgcagatgacatgattgtatatttagaaaaccccattgtctcagcccaaaatctccttaagctgataagtaaattcagcaaagtttcaggatacaaaatcaatgtgcaaaaatcacaagcattgctttacaccaataacagagagccaaatcatgagtgaactcccattcacaattgctatgaagagaataaaatacctaggaatacaacttacaagagatgtgaaggacctcttcaaagacaactacaaaccactgctcaaggaaataagagaggacacaaataaatggaaaaacattccatgttcatggctaggaagaatcaatatcatgaaaatggccatactgcctaaagcaatttatagattcaatgctatccccatcaagctcctatagacttttttcacagaattggaaaaaactactttaaatttcatatggaaccaaaaaagagcccgcatagccaagacaatcctaagcaaaaagaacaaagctggaggcatcacgctacctgacttcaaactataccacaaggctacagtaacaaaaacagcatggtactggtaccaaaacagatatatagaccaatggaacagaacagaggcctcagaaataacgccacacatctacaaccatctgatctttgacaaacctgagaaaaacaagcaatag

SEQ ID NO: 118329 - DNA, 2463 bp, Homo sapiens
atgccacatgcaggacatgcacgcagtccagggcacacactgatcaagttggcagaatggtggatgtccagatggatggagtggaaccctggcttccccttgagcatcgatgccaaatgccacaaggatttaccccgtgatatccagtttgatagtgaaaaaggagtggactttgttctgaattactccaaagcactaaaccaggaagaagttgaatccctgaatagaccaataacaggctctgaaattgaggcaataattaacagcctaccaacccagaaaagttcaggaccagatggattcacagccgaattctaccagaggtacaaggaggagctggtaccattccttctgaaactattccaatcaatagaaaaagagggaatcctccctaactcattttatgaggccagcatcatcctgataccaaagcctggcagatacacacacaaaaaaaacaattttagaccaatatccctgatgaacatcgatgcaaaaatcctcaataaaatactggcaaaccgaatccagcagcacatcaaaaagcttatccaccaggatcaagtgggcatcatccctgggatgcaaagctggttcaacatacacaaatcaataaatgtaatccagcatataaacagaaccaaagacaaaaaccacatgattatctcaatagatgcagaaaaggcctttgacaaaattcaacaaccattcatgctaaaaactctcaataaattagagaataaaatacctaagaatccaacttacaagggatgtgaaggacctcttcaaggagaactacaaatcactgctcaacgaaataaaggaagacacaaacaaatggaagaacatcccatgctcatggataggaagaatgaatatcataaaaatggccatactcccaaggtaatttatagattcaatgtcatccccatcaaactaccaatgactttcttctcagaattggaaaaatctacgttaaagttcatatggaaccaaaaaagagcccgcattgccaagacaatcctaagccaaaagaacaaagctggaggcatcatgctacctgacttcaaactatactacaaggctacagtaaccaaaacagcatggtactggtaccaaaacagagatatagaccaatggaacagaacagagccctcagaaatgacaccacacatctacaaccatctgatctttgacaaacctgacaaaaacaagcaatggggaaaggattccctatttaataaatggtgctgggaaaactggctagccataggtagacagctgaagctggatcccttccttacaccttatacaaaaattaattcaaggtggattaaagacttaaatgttagacctaaaaccatcaaaaccctagaggaaaacctaggcaataccattcaggacataagcatgggcaaggacttcatgtctaaaacaccaaaagcaatggcaacaaaagccaaaatggacaaatgggatctaattaaactaaagagcttctgcacagcaaaagaaactaccatcagagtgaacaggcaacctacagaatgggaaaaaaattttgcaatctactcatctgacaaagggctaatatccagaatctacaaacaactcaaacaaatttacaagaaaaaaacaaacaaccccatcaaaaagtgggcgaaggatatgaacagacacttctcaaaagaagacgtttatgcagccaacagacacatgaaaaaatgctcatcatcactggccatcagagaaatgcaaatcaaaaccataatgatataccatctcacaccagttacaatggcaatcattaaaaagtcaggaaacaacaggtgctggagagggtgtggagaaatgggaacacttttatactgttggtgggactgtaaactagttcaacctttgtggaagacactgtggcaattcctcagggatctagaactaggaataccatttgacccagccatcccattactgggtatatacccaaaggattataaatcatgctgctataaagacacatgcacaccaaagttggcccgagatgaccaaattcacattctcaagcaacaccgacgtaaagaactggaaacacggcaaaaacaatatcgagcatggtatgaaataaaccctttccacagtgtatggcctgtcactgctggaaagtcaccaaggcaccagctcccagtgtgggtgcacaatccccaaacttcaccttacctacaactccagacaagagatggagaggagagtaatgaaaataactttggatcaaccatattggcatctgatttctttgcagaaattgacaagctgtcaattctgcaaattcatatggaaatggaagggacccagaatagccaaaacaatcttgataaaaagaaaacaaagatggaggacttgcacttctcaatatcaaaattactacacagctatagtattcaagacaatgtgatatcggcataa

SEQ ID NO: 118330 - DNA, 462 bp, Homo sapiens
caagacagccagtccatctggttcatgagctgcctcaacaaagctggggtatttgtctgaattccagtgaacaacatggagctctgcagcatagctcactccatctactatgtgctcggagccgtggtcatcagcggacccccagtgaaggtgaacctgccgtaacctgtagcttccagtgagaggaccaccccgcagaactgatttgttctctgtgtcatcaaagtcaacattgaaggaatggccgctgttgctgatgattttagctgagcttgggtcatacttgatactaagtggtcggagggaagagtcatatttcacttctttggttttaatctcaattggagattgctgatcaccatcagcaatagggaaaaattccttccagtgaataggaccgttgtgctcgcggtatccccagctgagcctcgacatggtccctcgggaattccaccacactga

SEQ ID NO: 118331 - DNA, 791 bp, Homo sapiens
atttatttatttatttatttatttatttatttatttttgagacagaatttcgctctcgttgcccaagttggagtgcaatggcgcgatcttggctcactgcaacctccgcctcccgggttcaagcgattctcctgcctcagcctcccagggttttcaacaaatacttcttgaaccacctgcaaggacaaggtactgtgaatagcaggcatgatcattccgtgctggttgctagacaagttcaaagaaggctaagacagatgaggatgaaatctaacagacatgtctctgccgtcttggaacttgagagaggccagcaacagacaggccacaatgctcagaacccagtgtccacatgtcctattcactggaaggaatttttccctattgctgatggtgatcagcaatctccaattgagattaaaaccaaagaagtgaaatatgactcttccctccgaccacttagtatcaagtatgacccaagctcagctaaaatcatcagcaacagcggccattccttcaatgttgactttgatgacacagagaacaaatcagaattggaaaaaactacttcaaacttcatagggaaccaaaaaagagcctgcatagccaagacaatcttaagcaaaaataacaaagctggaggcatcatgctacctgacttcaaactaaactacaaggctacagtaaccaaaacagcatggtattggtaccaaaacagatatatagaccaatggaacagaacagaggcctcggaaataaacaccacacatctacaaccatctgatctttga

SEQ ID NO: 118332 - DNA, 4451 bp, Homo sapiens
atgattatctcaatagacacagaaaatgcctttgaaaaaattcaacagcccttcatgctaaaaactctcaataaattaggtattgatgggacgtatctcaaaataataagagctatttatgacaaacccacagccaatatcatactgaatgggcaaaaactggaagcattccctttgaaaactggcacaagacagggatgccctctctcaccactccttttcaacatagtgttggaagttatggccagggtaatcaggcaggagaaagaaataaagggtattcaattaggaaaagaggaagtcaaattgtccctgtttgtagatgacatgattgtgtatttagaaaaccccattgtctcagcccaaaatctccttaagctgataagcaacctcagcaaagtctcaggatacaaaatcaatgtgcaaaaatcacaagcattctcatataccaataacagacaaacagagagccaaatcatgaatggactcccattcacaactgcttcaaagagaataaaatacctaggaatccaacttacaagggatgtgaaggaactcttcaaggagaactacaaaccactgctcaacgaaaaaaaagtggatacaaacaaatggaagaacattccatgctcatggataggaagaatcaattatcctgaaaatggccatactgcccaagaattggaaaaaactactttaaagttcatatggaaccaaaaaagagcctgcattgccaagtcaatcctaagcaaaaagaacaaagctggaggcatcacactacctgacttcaaactatactacaaggctacagtaaccaaaacagcatggtactggtaccaaaacagagatatagaccagtggaacagaacagagccctcagaaataataaccacacatctacaaccatctgatctttgacaaacctgacaaaaacaagaaatggggaatgggttccctatttaataaatggtgctgggaaaactggctagccatatgtagaaagctgaaactggatcccttccttacaccctatacaaaaattaattcaagatggattaaagacttaaatgttagacctaaaaccataaaaaccctagaagaaaacctaggcaataccattcaggacatagacatgggcaaggacttcatgtctaaaacaccaaaagcaatggcaacaaaagccaaaattgacaaatgggatctaactaaactaaggagcttctgcacagcaaaagaaactaccatcagagtgaacaggcaacctaaagaatgggagaaaatttttgcaatctactcatctgacaaagggctaatatccagaatctacaaagaactcaaacgaatttacaagaaaaaaacaaccccatcaaaaagtgggcgaaggatatgaacagatacttctaaaaagaagacatttatgcagccaacagacacatgaaaaagtgctcatcatcactggccatcagagaaatgcaaatcaaaaccacaatgagatacatctcacaccagttagaatggcaatcattaaaaagtcagggaacaacaggtgggaaatgaacaatgagaacacttggacacaggaaggggaacatcacacactggggcctgttgtggggtgggggaagcggggagggatagcattagtagatatacctaatgtaaatgacaagttaatggtgttggaagttctggccagagcaatcaggcaaaagaaagaaataaagggcattcaattaggaaaagaggaagtcaaattgtccctgtttgcagatgacatgattgtgtatctagaaaactccatcgtctcagcccaaaatcttaagctgataagcaacttcagcaaagtctcaggatacaaaatcaatgtgcaaaaatcacaagcattcctatacaccaataacagacaaacagagagccaaatcatgagtgaattcccattcacaattgctacaaagagaataaaatacctaggaatccaacttacaagggatgtgaaggacctcttcaaggagaactacaaaccactgctcaaggaaataagagaggacacaaacaaatggaagaacattccatgctcaaggataggaagaatcaatatcatgaaaatggccatactgcccaaggtaatttatagattcaatgacatccccatcaagctaccaatgactttcttcacagaattggaaaaaactactttaaagttcatatggaaccaaaaaagagcctgcattgccaaaacaatcttaagcaaaaagaacatagctggaggcatcacgctacctgacttcaaactatactacaaggctacagtaaccaaaacagcatggtactggtaccaaaacagagatatagaccaatggaacagaacagaggcctcagaagtaacatcacacatctacaaccatctgatcttttacaaacctgacaaaaacaagaaatggggaaacgattccctatttaataaatggtgctgggaaaactggctagccatatgtagaaagctgaaactggatcccttccttacaccttatacaaaaattcattcaagatggattaaagacttaaatgttagacctaaaaccataaaaaccctagaagaaaacctaggcaataccattcaggacataggcatgggcaaggacttcatgactaaaacaccaaaagcaatggcaacaaaagccaaagttgacaaatgggatgtaattaaattaaagagcttctgcacagcaaaagaaactaccatcagagaatttgagcagtttaacaggaggctaaatgaagtttctaagagagttcgcatacccttgcctgtgtctaatatactttgggaacattgtatacgattggctaatcgaactattgtagaaggatatgccaatgtcaagaaatgcagtaatgagggtcgtgccctgatgcaattggattttcaacagtttttaatgaaacttgaaaaactaacagatattagacccattcctgataaagaatttgtagaaacttatattaaagcttattacctaactgagaatgacatggaacggtggatcaaagagcacaggttgaggggaagaagagagtctgtagagaagagagacccagaacttcatctgtgtgttctgctgtgcatccttgacagcacctggcacagaatctcagctaagatggatgaaatgcaagtactcaggccctttgaactagaatttttgcctaaactgaaagagttgaaatacctgagactgggcgatttacaaacgaaagaggcttataatggacttaccattccacgtggctggggaagcttcacaatcatggtggaaggcaaggaggagcaggtcatgtcttacatggatggcagcaggcaaaaagagaatgaggaagacactgcagatgacatgattatatatctagaaaaccccattgtctcagcccaaaatctccttaagctgataagcaatttcagcaaagtctcaggatacaaaatcaatgtacaaaaatcacaagcattcttatacaccaataacagtcaaacagagagccaaatcatgagtgaactcccattcacaattgcttcaaagagaataaaatacctaggaatccaacttacaagggacgtgaaggacctcttcaaggagaactacaaaccactgctcaatgaaataaaagaggatacaaacaaatggaagaacattccatgctcatgggtaggaaaaatcaatatcgtgaaaatggccatacttcccaaggtaatttatagattcaatgccatccccatcaagctaccaatgactttcttcacagaattggaaaaaactactttaaagttcatatggaaccaaaaaagagcccgcatcgccaagtcaatcctaagccaaaagaacaaagctggaggcatcacgctacctgacttcaaactatactacaaggctacagtaaccaaaacagcatggtactggtaccaaaacagagatatagatcaatggaacagaacagagccctcagaaataacaccacatatctacaactatctgatctttgacaaacctgagaaaaacaagcaatggggaaaggattccctatttaataaatggtgctgggaaaactggctagccatatgtagaaagctgaaactggattccttccttacaccttatacaaaaatcaattcaagatggattaaagacttaaacgttagacctcaaaccataaaaaccctagaagaaaacctaggcattaccattcaggacataggcatgggcaaggacttcatgtctaaaacaccaaaagcaatggcaacaaaagccaaaattgacacatgggatctaattaaactaaagagcttctgcacagcaaaagaaactaccatcagagtgagcaggcaacctacaaaatgggagaatatttttgcaccctactcatctgacaaagggctaatatccagaatctacaattaa

SEQ ID NO: 118333 - DNA, 2702 bp, Homo sapiens
atgaaggcagaaataaagatgttctttgaaaccaacgagaacaaagacacaacataccagaatctctgggacacattcaaagcattgtgtagagggaaatttatagcactaaatgcccacaagagaaagcaggaaagatccaaaattgacaccctaacatcacaattaaaagaactagaaaagcaagagcaaacacattcaaaagctagcagaaggcaagaaataactaagatcagagcagaactgaaggaaatagagacacaaaaaacccttcaaaaaattaatgcatccaggagctggttttttgaaaggatcaacaaaattgatagaccactagcaagactaataaagaaaaaaagagagaagaatcaaatagatgcaataaaaaatgataaaggggatatcaccaccgatcccacagaaatacaaactaccatcagagaatactacaaacacctctatgcaaataaactagaaaatctagaagaaatggataaattcctcgacatatacaccctcccaagactaaaccaggaagaagttgaatctctgaatagaccaataacaggagctgaaactgtggcaataatcaatagcttaccaaccaaaaaaaagcccgggaccagacagattcacagccaaattctaccagaggtacaaggaggagctggtaccattccttctgaaactattccaatcaatagaaaaagagggaatcctccctaactcattttatgaggccagcatcatcctgataccaaagctgggcagacacacaaccataaaagagaattttagaccaatatccttgatgaacattgatgcaaaaatcctcaataaaatactggcaaaccgaatccagcagcacatcaaaaagcttatccaccatgatcaagtgggcttcatccctgggatgcaaggctggttcaatataaacaaatcaataaatgtaatccagcatataaacagaaccaaagacaaaaaccacatgattatctcaatagatgcagaaaaggcctttgacaaaattcaacaacgcttcatgctaaaaactctcaataaattcggtattgatgggacgtatctcaaaataataagagctatctatgacaaacccacagccaatatcatactgaatgggcaaaaactggaagcattccctttgaaaactggtacaagacagggatgccctctctcaccactcctattcaacacagtgttggaagttctggccagggcaattaggcaggagaaggaaataaacggtattcaattaggaaaagaggaagtcaaattgttcctgtttgcagacgacatgattgtatatctagaaaacccaattgtctcagcccaaaatctccttaagctgataagcaacttcagcaaagtctcaggatacaaaatcaatgtacaaaaatcacaagcattcttacgcaccaacaacagacaaacagagagcaaaatcatgagtgaactcccattcacaactgcttcaaagagaataaaatacctaggaatccaacttacaagggatgtgaaggacctcttcaaggaaaactacaaaccactgctcaaggaaataaaagaggatacaaacaaatggaagaacattccatgctcatggataggaagaatcaatatcgtgaaaatggccatactgcccaaggtaatttacagattcaatgccatctccatcaagctaccaatgactttcttcacagaattggaaaaaactactttaaagttcatatggaaccaaaaaagagcccgcattgccaaggcaatcctaagccaaaagaacaaagctggaggcatcatgctacctgacttcaaactatactacaaggctaacagtaaccaaaacagcatggtactgggtaccaaaacaggagatatagatcaatggaacagaacagagccctcagaaataataccacacatctacaaccatctgatctttgacaaacctgacaaaaacaagaaataaggaaaggattccctatttaataaatggtgctgggaaaactggctagccatatgtagaaagctgaaactggatccctttcttacaccttatacaaaaattaattcaagatggattaatgacttaaatgttaggacctaaaaccataaaaaaccctagaagaaaacctaggcaataccattcaggacataggcatgggccaagaacctcatgactaaaacaccaaaagccaatggcaacaaaagccaaaattgacagatgggacctaattaaactaaagagcttctgcacagcaaaagaaactacccatcagagtgaacaggcaacctacagaatgggagaaaatttttgcaacctactcatctgacaaagggctaatatccagaatctacaatgaacttaaaacaaatttacaagaaaaaaacaaacaaccccctcatcaaaaagtgggcaaaggatatgaacagacacttctcaaaggaagacatttattgcagccaacagacatgtgaaaaaatgctcatcatcactggtcaccagagaaatgcaaatcaaaaccacaaggagataccatctcacaccagttagaatggcgatcattaaaaagtcaggaaacaacagtaatagttccctatttgactacagagacctcattgtcctcatcaactttttttctcacatgacagctgctctttattgtcccttctttggaaggcag

SEQ ID NO: 118334 - DNA, 2664 bp, Homo sapiens
atgactatgaactttgtcgcagacagtcatactggccggaatcctctagcctcagcggctggcgccaaaaccggactccgcccacttcctcgcccctgcggtgcgagggtgtggaatcctccagacgctgggggagggggagttgggagcttaaaaactagtacccctttgggaccactttcagcagcgaactctcctgtacaccaggggtcagttccacagacgcgggccagggggggcgggaccctattccaagaggtagtaactagcaggactctagccttccgcaattcattgagcgcatttacggaagtaacgtcgggtactgtctctggccgcaagggtgggaggagtacgcatttggccggaagacgcgttagtgggggggaaggttctagaaaagcggcggcagcggctctagcggcagtagcagcagcgccgggtcccgtgcggaggtgctcctcgcagagttgtttctcgagcagcggcagttctcactacagcgccaggacgagtccggttcgtgttcgtccgcggagatctctctcatctcgctcggctgcgggaaatcgggctgaagcgactgagtccgcgatggagaaaactttagaaactgttcctttggagaggaaaaagagagaaaaggaacagttccgtaagctctttattggtggcttaagctttgaaaccacagaagaaagtttgaggaactactacgaacaatggggaaagcttacagactgtgtggtaatgagggatcctgcaagcaaaagatcaagaggatttggttttgtaactttttcatccatggctgaggttgatgctgccatggctgcaagacctcattcaattgatgggagagtagttgagccaaaacgtgctgtagcaagagaggaatctggaaaaccaggggctcatgtaactgtgaagaagctgtttgttggcggaattaaagaagatactgaggaacatcaccttagagattactttgaggaatatggaaaaattgataccattgagataattactgataggcagtctggaaagaaaagaggctttggctttgttacttttgatgaccatgatcctgtggataaaatcgtattgcagaaataccataccatcaatggtcataatgcagaagtaagaaaggctttgtctagacaagaaatgcaggaagttcagagttctaggagtggaagaggagatggatatggcagtggacgtggatttggggatggctataatgggtatggaggaggacctggaggtggcaattttggaggtagccccggttatggaggaggaagaggaggatatggtggtggaggacctggatatggcaaccagggtgggggctacggaggtggttatgacaactatggaggaggaaattatggaagtggaaattacaatgattttggaaattataaccagcaaccttctaactacggtccaatgaagagtggaaactttggtggtagcaggaacatggggggaccatatggtggaggaatatggaaaaacacaagcataactgagagaaaaaaatccagaaagctggatttaatacaaagtaaaaaaggcagccggacaaaggaagctcctcagcctccagtcgcctctctgtgcatgcacctcggtcactggtctcgactaatggtttctccgggagcccagttaacagggaaaaattcgcatggcctctcggtttcttcggtccgaaaatccaacgttggtccaagaaggctctgtgcggcaatgaaggccactggtccagacaatgcccaaagccaggtaagcccaccaggccatgccccctctgcggaggaccccactggaagtcggactgtgagcagcccctgcacggaccgcccccatcccttcctgagccggccaaaacctcctactcagatctcattggtcttgccgctgaagactgacggtgccctggaacggatgccccagcaactaccattgcttcatcagagccaaggtacccaatccatccacccagacccctccagtacttctagctttcttctaccctttcaacctcccaccctaaaacgtgcagcctttccttgtcctccatccatagttaaccctgctgtttgggatacttccacaccctcagtcgcagaacaccatacccccatccgcattacccttaaagagcccacccagttcctatcacagaagcagtatcccatcccccaagcagctctcgtaggcctacagcctatcatttctcacctcctcgccagtcacctactccgcccaacagactctccttttaacacaccaattctacctgttaaaaagccaaatggaacttatcgtttagtccaggacctcaggctcattaaccaagctgtactcccacgccacgcggggctgggtcgagacttgggctcccggagggcggcgcgtggtcccgcgtccgcgagcgtggcggcgcgcggccggctgtcccgaggctgcggcgaccgcccagttaacgtggccgccgcggggcaaaaaatgggaaaaaaacagaatggaaagagtaaaaaagttgaagaggcagagcctgaagaatttgtcgtggaaaaagtactagatcgacgtgtagtgaatgggaaagtggaatatttcctgaagtggaagggatttacagagtaa

SEQ ID NO: 118335 - DNA, 1344 bp, Homo sapiens
atgagaaaagtaaaaggcaaaaaccggcagagtttcaaatgcttgcctccgccatcaggagccctgcaggcccacggggcggcagctccgcacggaagcctcctaacactccacctccacctggtgcctgtttcaagtgcggcaatgaaggccactggtccagacaatgcccaaagccaggtaagcccaccaggccatgccccctctgcggaggaccccactggaagtcggactgtgagcagcccctgcgaggaccgcccccatcccttcctgagctggcctacttggatctcattggccttgctgctgaagactgacggtgccctggaacggatgccccagcaactaccatcgcttcatccaagccaaggtacccaatccatccacccagacccctccagtacttctagctttcttctaccctttcaacctcccaccctaaaacgtgcagcctttccttgtcctccatccatagttaaccctgctgtttgggatacttccacaccctcagtcgcagaacaccatacccccatccgcattacccttaaagagcccacccagttcctatcacagaagcagtatcccatcccccaagcagctctcgtaggcctacagcctatcatttctcacctcctcgccagtcacctactccgcccaacagactctccttttaacacaccaattctacctgttaaaaagccaaatggaacttatcgtttagtccaggacctcaggctcattaaccaagctgtactcccactggttcaagaaattactcagtcctgctctatctgccactcaacgtcaccccagggctccctccggccactgccttttcctacccaccaagcccagggccagttgcccgggcaagattggcaagtagacttcactcacatgccgcctaataaacggctctgctatattctagtctttgtactttctccggtccagacacggtctttcattcgtgaagcagcaaatgaggccatgcctctccctgttggcactaccttgtcctctcaacataactgtcttgcaggcacagatgtgtttatctgtcaatccgaccctcatcaaaagctacagccgaagaggagaggcccctacactgtgatactcagcacgccaactgcagcccagtcccaaggtgcaaggctacttgtgccagcagcgtgcgccagcaaggtagcagaagcaggaagaaagccggcaggaagacacgtacccctgaagatccagaaagaggccatctgtgtacaacgtagcagtaacgtgggcctggaatggtccctggaggatgatcagcgacaagctgtatctaatgggaaaattcatgcttga

SEQ ID NO: 118336 - DNA, 918 bp, Homo sapiens
atgccaaactatgtcacctttacggataccaaacaattgattagtgatactccaaataatcaagttccaatgaaccgtgccagcatggcttttgatgccaaatgtctgactggatgcagatttgatgatgccattgtccagtttgatatgacatattggcctttcacggtggtaaatgatgctggcaggcccaaggtccaagtagagtatgagagagacaaaaagctgctacccataggaggtgtcttctatggttctgacaaagatgaaggaaattgcaaaagtctaccttgggaagactgttaccaatgctgtgagacatctcaaaatgttcaagattttctgtttttggatgtcactcctctttcccttgatattaaaactgctgatggagtcatggctgtcctcatcaagtgtgatgctaccattcctaccaggcagacacagaccttcactacctactctgacaagcctagcatgtcattgccaaggataaaaacctacttcgcaagtttgagctcacaggcgtacctcctgcacaccatggtgctcatcagattgaagtcacctttgatattaatgccaagggcatcctcaatgtctactctcactgatgacaagggccatttgagcaaggaagacattgagcctatggtccaggaaactgagaagtacaaagctgaagatgagaagcagagggacaaggtgtcatccaagaattcacttgatccctatgtgttcaacatgaaagcaactgctgaagatgagaaacttcaagtcaagattaacaatgagcacaaacagaagattcttagcaagtgccatgaaattatcaactggctcgacaagaatcagactgcagagaaggaagaatttgaacatgcacagcaagagctggagaagtcttcaagtccatga

SEQ ID NO: 118337 - DNA, 995 bp, Homo sapiens
atgcatcagaccaagaaaggcaatcagtggcactttggcatgaaggcccacattggtgtcgatgccaagagtggcctgacccacagcctggtcaccacgcggcccaacgagcatgacctcaatcagctgggtaatctgctgcatggagaggagcaatttgtctcagccgatgccggctaccaaggggcgccacagcgcgaggagctggccgaggtggatgtggactggctgatcgccgagcgccccggcaaggtaagaaccttgaaacagcatccacgcaagaacaaaacggccatcaacatcgaatacatgaaagccagcatccgggccagggtggagcacccatttcgcatcatcaagcgacagttcggcttcgtgaaagccagatacaaggggttgctgaaaaacgataaccaactggcgatgttattcacgctggccaacctgtttcgggcggaccaaatgatacattgcaccagaggagagggactcatcaccaccaagatcccaaaagccccagacaacggtagctactgcctgccttcgaagaacgatgattcagaagaagaggatccagagatgtcccctatggttgtgacaaagatgaaggaaattgcagaagcctaccttgggaagactgttaccaatgctgtgctcacagtgccagcctactttaatgactctcagcgtcaggctaccaaaaagatgctagaactattgctggtctcaatggacttagaattagcaatgagccaactgctgctgctattgcttatggcttaaaccaaaaggttggaactgaaagaaatgtgttgatctttgacctgggaggcagcatcaccccgagaatccgcacgcctgagacaggctcagacgacgccatcaagagcattctagagcaggccaagaaggagatcgagtcgcagaagggcggtgagtgtgacccctgcaggcaaagcctgaggcccccggggccagctgcgaacaggagatga

SEQ ID NO: 118338 - DNA, 677 bp, Homo sapiens
  misc_feature (1)...(677): n = a,t,c or g
cggacgcgtgggtgactgtcctcatcaagcgtaataccaccattcctaccaagcagacacagaccttcactacctattctgacaaccagcctggtgtgcttattcaggtttatgaaggcgagcgtgccatgacaaaggataacaacctgcttggcaagtttgaactcacaggcatacctcctgcaccccgaggtgttcctcagattgaagtcacttttgacattgatgccaatggtatactcaatgtctctgctgtggacaagagtacgggaaaagagaacaagattactatcactaatgacaagggccgtttgagcaaggaagacattgaacgtatggtccaggaagctgagaagtacaaagctgaagatgagaagcagagggacaaggtgtcatccaagaattcacttgagtcctatgccttcaacatgaaagcaactgttgaagatgagaaacttcaaggcaagattaacgatgaggaccaacagaagattctggacaagtgtaatgaaattatcaactggcttgataagaatcaggtttgtgnnnnnnnnnnnnnnnnnncctccccccctcagggggggggagggggagggaaacccaagcttgggctgaatttcaggggagggcacaagagtggagggtccaaaaatattggggttccaccaaaaattagg

SEQ ID NO: 118339 - DNA, 365 bp, Homo sapiens
cccacgcgtccgccagagacaaagcatgagaagaagcagagactgtacttgtgggccagcttaagcagctgagtagctgtttggcggtccacaagtacagaccagagacaaagcaagagaagaagcagagactgttggcccgggccgagaagaaggctgctggcaaaggggacgtcccaacgaagagaccacctgtccttcgagcaggagttaacaccgtcaccaccttggtggagaacaagaaagctcagctggtggtgtcgtaaaatgggggtcccttactgcattatcaagggaaaggcaagactgggacgtctagtccacaggaagacctgcaccactgtcgccttcacacaggtgaacta

SEQ ID NO: 118340 - DNA, 432 bp, Homo sapiens
cgaattcccgggtcgacgatttcgtcgccgcccaagatgccaagggaaagaaggtggctccggccccagctgtcgtgaagaagcaggaggctaagaaagtggtgaatcccctgtttgagaaaaggcctaagaattttggcattggacaggcagagactgttggcccgggccgagaagaaggctgctggcaaaggggacgtcccaacgaagagaccacctgtccttcgagcaggagttaacaccgtcaccaccttggtggagaacaagaaagctcagctggtggtgattgcacacgacgtggatcccatcgagctggttgtcttcttgcctgccctgtgtcgtaaaatgggggtcccttactgcattatcaagggaaaggcaagactgggacgtctagtccacaggaagacctgcaccactgtcgccttcaca

SEQ ID NO: 118341 - DNA, 376 bp, Homo sapiens
  misc_feature (1)...(376): n = a,t,c or g
nattgcacacgacgtggatcccatcgagctggttgtcttcttgcctgccctgtgtcgtaaaatgggggtcccttactgcattatcaagggaaaggcaagactgggacgtctagtccacaggaagacctgcaccactgtcgccttcacacaggtgacaaaggtgctttggctaagctggtggaagctatcaggaccaattcaatgtcctgggtcctaagtctgtggctcgtaaatgtacactgttgagttttctgtacatacctcacccgctttgtgaaatggccccgctatatcaggttgcagcggcagagagccatcctctataagcggctgaaagtgcctcctgcgattaaccagttcacccaggccctgtatt

SEQ ID NO: 118342 - DNA, 882 bp, Homo sapiens
gccgaaaggaaagaaggccaagggaaagaaggtggctccggccccagctgtcgtgaagaagcaggaggctaagaaagtggtgaatcccctgtttgagaaaaggcctaagaattttggcattggacaggacatccagcccaaaagagacctcacccgctttgtgaaatggccccgctatatcaggttgcagcggcagagagccatcctctataagcggctgaaagtgcctcctgcgattaaccagttcacccaggccctggaccgccaaacagctactcagctgcttaagctggcccacaagtacagaccagagacaaagcaagagaagaagcagagactgttggcccgggccgagaagaaggctgctggcaaaggggacgtcccaacgaagagaccacctgtccttcgagcaggagttaacaccgtcaccaccttggtggagaacaagaaagctcagctggtggtgattgcacacgacgtggatcccatcgagctggttgtcttcttgcctgccctggtgtcgtaaaatgggggtcccttgactgcattatcaagggaaaggcaagactgggacgtctagtccacaggaagacctgcaccacttgttgccttcacacaggtgaactcggaagacaaaggcagctttggctaagctggtggaagctatcaggaccaattacaatgacagatacgatgagatccgccgtcactggggtggcaatgacctgcgtcctaaagtctgtggctcgtatcgccaagctcgaaaaggcaaaggctaaagaacttgccactaaactgggttaaatgtacactgttgagttttctgtacataaaaataattgaaataatacaaattttccttcagccagtgttaaaaaaaaa

SEQ ID NO: 118343 - DNA, 1150 bp, Homo sapiens
atggcctgtggtgaggcctattctaccgatttccacgctccatctgtggaatccatcagcagggcatttaccctcattcagggttctgacacctgcctggcaggcgcaggagacacaaagaaagctggagtggatgagaaaggggaggttggggtggaagaggccctggaagctgtcaaaaatgctacaaatgagcaagaccttgcaaaccgttttaaagagtttgggaaagagatggtgaaacttaactatgtagcagcaagaagacaacaggtgggaaagattttagaaatgctaggggagaaaatggcacttgatgcaaacacacacgcatgtatgtgtgcaaacaggtatacacagtatttccctgaatgcaaattaaaatcacagtggaataccactacatacctactagaatggctaaaacaaaaaaggcagacactatccagtgtggctgagaatatggattatctggaactttcatgtactgctgaaaatgaaggactatctgacgggttcgtttgggaggaagaacatgcacggcatggctcgctcgctctctccgttttcctactgatctgcagagacagtgcatttgaactactgctgcccaggagtcatgttctcagactggattttgaaacagtgataggtttgagcacacgcgctttagagggctacagtggttgtgagaaatttcctgaaatgagaagagttaacagcagggctcaggcccagagagatccattttctgtccctgagtctctggctggagttattagagttgctgcagggaagccccacccaatgaggatggatgggtcaggctcaggcctgaagaggcactctggcagcagtctgccacagccgggctggctgctgccctccgccaaggagcataaatggcttagacagcaggcagccacagctgtggtgctggtcactactccccctgggagcttggcaggcttaagcagaaagattatgttacttgcccaagaacacacacaaagtcaatggcaaaacctggctttgaacttctggggtctggctgcagacctcttttattccctgccaccaaatgatcccttatattctggcttgtctggagttgatccatcagtcataaatgagttggttctaagagaag

SEQ ID NO: 118344 - DNA, 450 bp, Homo sapiens
  misc_feature (1)...(450): n = a,t,c or g
cccacgcgtccgagcatcgttaaagtctctcttcaccctgccgtcatgtctaagtcagagtctcctaaagagcccgaacagctgaggaagctcttcattggagggttgagctttgaaacaactgatgagagcctgaggagccattttgagcaatggggaacgctcacggactgtgtggtaatgagagatccaaacaccaagcgctccaggggctttgggtttgtcacatatgccactgtggaggaggtggatgcagctatgaatgcaaggccacacaaggtggatggaagagttgtggaaccaaagagagctgtctccagagaagattctcaaagaccaggtgcccacttaactgtgaaaaagatatttgtcggtggtagtggaagcaattttggaggtggtggaagctacaatgattttgggaattacacaatcagtcttcanattttn

SEQ ID NO: 118345 - DNA, 501 bp, Homo sapiens
tcgccgccgaagaagcatcgttaaagtctctcttcaccctgccgtcatgtctaagtcagagtctcctaaagagcccgaacagctgaggaagctcttcattggagggttgagctttgaaacaactgatgagagcctgaggagccattttgagcaatggggaacgctcacggactgtgtggattctcaaagaccaggtgcccacttaactgtgaaaaagatatttgttggtggcattaaagaagacactgaagaacatcacctaagagattattttgaacagtatggaaaaattgaagtgattgaaatcatgactgaccgaggcagtggcaagaaaaggggctttgcctttgtaacctttgacgaccatgactccgtggataagattgtcattcagaaataccatactgtgaatggccacaactgtgaagttagaaaagccctgtcaaagcaagagatggctagtgcttcatccagccaaagaggtcgagtggtcttggaaac

SEQ ID NO: 118346 - DNA, 765 bp, Homo sapiens
atgtctaagtcagagtctcctaaagagcccgaacagctgaggaagctcttcattgaaggcttgagctttgaaacaaccaatgagagcctgaggggccattttgagcaacacggaatgctcacgggctgtgtggtaatgagagatccaaacaccaagcgctccaggggctgtggatttgtcacatgtgccactgtggaggaggtggatgcagccatgaatgcaaggccacacaaggtggatggaagagttgtggagacaaagacagctgtctcaggagattctcaaagaccaggtgcccacttaactatgaagaagatatttgttgggggctttaaagaagacactgaagaacatcacccaagagattatcctgaacaccacagaggtcgaagtggttctggaaactttggtggcggtcgcggaggtggtttcggtgggaatgacaactttggtcttggagggaactttagtcgtcgtggtggctttggtggcagccgtggtggtggtggatatggtggcagtggggatggctataatggatttggtaatgatggaagcaattttggaggtggtggaagctacaacaattttggcaattacaacaatcagtcttcaaattttggacccatgaagggaggaaactttgaagacagaagctctggcccctatggtggtagaggccaatactctgccaaaccacgaaaccaaggtggctatggcggttccagtagcagcagtaactgtggcagtggcagaatattttaa

SEQ ID NO: 118347 - DNA, 894 bp, Homo sapiens; identical to SEQ ID NO: 115010

SEQ ID NO: 118348 - DNA, 1677 bp, Homo sapiens
atgagagatccaaacaccaagcgctccaggggctttgggtttgtcacatatgccactgtggaggaggtggatgcagctatgaatacaacgccacacaaggtggatggaagagttgtggaaccaaagagagctgtctccagagaagattctcaaagaccaggtgcccacttaactgtgaaaaagatatttgttggtggcattaaagaagacactgaagaacatcacctaagagattattttgaacagtatggaaaaattgaagtaattgaaatcatgactgaccgaggcagtggcaagaaaaggggctttgcctttgtaacctttgacgaccatgactccgtggataagattgtcattcagaaataccatactgtgaagggccacaactgtgaagttagaaaagccctgccaaagcaagagatggctagtgcttcatccagccaaagaggtcgaaggggttctggaaactttggtggtggtcgtggagatggtttcggtgggaatgacaactttggtcgtggaggaaacttcagtggtcgtggtggctttggtggcagctgtggtggtggtggatatggtggcagtggggatggctataatggatttggtaatgatggaagcaattttggaggtggtggaagctacagtgattttggcaattacaacaatcagtcttcaaattttggacccatgaagggaggaaattttggaggcagaagctctggcccctatggcggtggaggccaatactttgcaaaaccacaaaaccaagcagcacgctgcgtggctgctcgctggctatttaggacggaagctcggttggtgtttctccagaagtttcccccttgggcggtggtggaggtggtaaccgtgatagtagcagctccggcggcagcaacagcgactacgagggatggcggcggctgcagcaggaactgcaacatcccagaggtttttccagagcttctcggatgccctaatcgacgaggacccccaggcggcgttagagagaagcagcagcaaacaaattcaaaatctaccagaagacaagaaataactaagaccatagcagaactgaaggagatagagacacgaaaaacgcttcaaaaaatcaatgaatccaggagctggttttatgaaaagatcaacaaagtagatagactgctagacagactcataaagaagaaaagagagaagagtcaaatagatgcaataaaaaatgatataggggatattgtcactgatcccgcagaaatacaaactaccatcaaagaatactataaacgtctctatgcaaatgaactagaaaatctagaagaaatggataaattcctggcaacatacagcctccacagtctaaaccaggaagaagtcgaatccctgaataaaccagtaaccagttctgaagttgaggcagtaactaatagcctaccaaccaaaaaaagtccaggaccagatggattcacagtattattggaagttctggccccggcaatcaggcaagagaaagaaataaagcatattccaataggaagagaggaagtaaaattgtctctgtttgcagatgacgtgattgtatatttagaaaaccccatcgtctcagcccaaaatctccttaagctgataagcaacttcagcaaactctcagggtacaaaatcaatgtgcaaaaatcataa

SEQ ID NO: 118349 - DNA, 1395 bp, Homo sapiens
aaataccacactgtgaatggccacaactgtgaagttaggaaagccctgtcaaagcaagagatagctagtgcttcatgcagccaaagaggtcgaagtggttctggaaactttggtggtgatcgtggtggtggttttggtgggaatgacaactttggtcgtggaggaaacttcagtggtcatggtggctttggtggcagctgttgtggtggtggatatggtggcagtggggatggctataatggatttgggaatgatgccagcaattttggaggtggggggagctcaatgagtttggcattacaacaatcaatcttcccattttggacccctgagcgaggaaactttggaggcagaagctcttgcctcttgggggtgccccagcctcaacttatgttaaaggacctaactcccagcgaactcaaaatgagggctggtttgaaggataagccccttggagaggggatggaggggcaagaggaaataaagggggaggggcaaaccaatagaacggtttgtttgtctgaaaaaaaaattctgaaatggccctacaaaggaaaggacgtgagagacaccggagggggcgcttttaatgctgggagacgggcaccagctgttgccctcatcccctgcccctccgagagttgcggaagcggccaccctggtttgtcccaccggcgaaaaactgttagtgttgggcctaagcttgcatgccctgcggtccttgttaagcttgcatgcctgcggttcgactctagagatccccctatgagctgtaagtaccaaggaccttctggcaaagatagtcatagaatgcacagcaccgcttacctctgcaagagaacaatgcaaaacaaggcacgactggagctcgcagactctgaggctgtgagtaccaaggaccttctggcaaagatagtcatagaatgcacagcacccggagcgaggaaaataacccggcgctggagaataggtgaagcagcggatttagttggggtttcttctcatgctatcatagatgccgagaaagcagggcgactaccgcacccggatatggaaattcgaggacgggttgagcaacgtgttggttatacaattgaacaaattaatcatatgcgtgatgtgtttggtacgcgattgcgacgtgctgaagacgtatttccaccggtgatcggggttgctgcccataaaggtggcgtttacaaaacctcagtttctgttcatcttgctcaggatctggctctgaaggggctacgtgttttgctcgtggaaggtaacgacccccagggaacagcctcaatgtatcacggatgggtaccagatcttcatattcatgcagaagacactctcctgcctttctatcttggggaaaaggacgatgtcacttatgcaatatag

SEQ ID NO: 118350 - DNA, 2160 bp, Homo sapiens
atgaagtgtttaaagtttataaatcacaaagaaatattggaggcttctgaaagaaaacaagcagagtcattagattttccctttaaaaaacttcgctggcatctctgtgaaggatggattgaagaggaaagagatgagtcaagaaaatcggaaaccatcttcaaagacctcttcaaagtccctgtgcttaaagaaaccatctattacaaattctatgggccccctgtctatcagattgaaactgtgtattttatggcactgagtccacctaagtcaaagcaatttgacaaaacaaaacaaaacaacaacaacaaaaaaacacatcagtttgtaattgttttctttaaaacagatgaacacctttctgcccgtggacgccgccgaagaagcatcgttaaagtctctcttctccctgccgtcattggtctaaagtcaaagtttcttaaaaagcccgaccagttgaggaagctcttcattckgagggttygagctttgaaacaactcgatgagagcctcgaggagccattttcgaggcaatgggggaaacgcthcacggactctgtggtaatgagagatccaaacaccaagcgctccagggggctttgggtttgtcacatatgccacttgtggaggaggtggatgcagcctatgaatgcaaggccacacaaggtggaatggaaggagttgttggaaccaaagagagcttgtctccagagaagattctcaaagaccagggtgcccacattaacttgtgaaaaagatatttgttggtggcattaaagaagacacctgaagaacatcacctaagagattattttgaacagtatggaaaaattgaagtgattgaaatcatgactgacccgaggcagtggcaagaaaaggggctttgccttttgtaacctttgaccgaccatgacctccgtggataagattgtcattccagaaataccatactgtgaatgggccacaacctgtgaagtttagaaaagccctgtcaaaagcaagaagatggctagtgcttcatccaagccaaaggagggtcgaagtgggttctgggaaacttttggtggtgggtcgtgggaggtgggtttcggtgggaatggacaacttcggtcgtgggaggaaacttcagttggtccgtggtggcctttggtggcagccgtggttggtggtggatatggttggcagtggggatggcctataatggatttggtaatgatggaaagcaattttgggaggtggtggaaagctacaatgattttggggaattacaacaatcaagtcttcaaattttggacccatgaagggagggaaattttggaaggcagaagctctggcccctatgggcggtggaggccaatacttttgctaaaccccgaaaaccaaggtggctatggcggttccagcagcagcaagtaactattggcagtggcagaagattttaatttaggaaaccaaagcttagcaggaagaggagagccagagaagttgacagggaagctacaggtttacaacagatttgtgaactcagcctaagcacagtggtggcagggcctagcctgctacaaagaagacatgttttagacaaatactccatggtgtaatgggcaaaaaactccgaggactgtatttgtgactaattgtataacaggttattttagtttcctgttcctgtggaaagtgtaaagcattcccaccaaagggttttaatgtagattttttttttttgcaccccatgctgttgattgctaaatgtaacagtctgatcgtgacgctgaataaatgtcttttttttaatgtgctgtgtaaagttagtctactcttaagccatcttggtaaatttccccaacagtgtgaagttagaattccttcagggtgatgccaggttctatttggaatttatatacaacctgcttgggtggagaagccattgtcttcggaaaccttggtgtagttgaactgatagttactgttgtgacctgaagttcaccattaaaagggattacccaagcaaaatcatggaatggttataaaagtgattgttggcacatcctatgcaatatatctaaattgaataatggtaccagataaaattatagatgggaatgaagcttgtgtatccattatcatgtgtaatcaataaacgatttaattctcttg

SEQ ID NO: 118351 - DNA, 922 bp, Homo sapiens
gacccaggagacaccccaaatactgcaagtgcccccaactgcagaagtgggaaagggagatcctcctctcctgaacacatacccccactggagaaactggaggactctatgcagacaaaccccagtaccaacccagagcctggtagacttgctgagtggctagacccagaagagagacaacaatcactgcagtttggcttacaagaagccacatccataggaaaaggaggacagtactacatcaagggaacaccccatgggacaaaagaatctgaacaacagccttcagccctagatcttccctctgacagagcctacccaaatgagaaggaaccagaaaaccaactctggaggttagttattaagcttatcaaggaggcaccagagaaaggggcatatctcaatgtaataaaagccgtctatgacaaacccacgaatggggaaaagttgagagcattccctctgagaactggaacaaaacacagatgcccactctcaccactcctcttcaacatattactggaagtcctagccagagcaatcagacaagagaaagaaataaagagcatccaaattggtaaagaggaagtcaaactctcactgtttgctgatgatataatcatttaccttgaaagccctaaatactcctccagaaagctccaagaactgataaaagaattcagcaaagtttccagatatgagattaatgtacacaaatcagtagcactgctgtacactcaacagtaaccaagctgagaatcaaatcaagaactcagcctcttttacaatagctgcaaaaaataaaataaaatacttaggaatatacctaaccaaggatgcaaaagacggctacaaggaaaactacaaaacactgatgaaagaaattatagatgacaaaaacaaacagaaatacatcccatga

SEQ ID NO: 118352 - DNA, 1197 bp, Homo sapiens
atgggagactttaacaccccactgtcaactttagacagatcaacaagacagaaagtcaacaagcatacccaggaacttaactcagctctgcaccaagcggacctaatagacatctacagaactctccaccccaaatcaacagaatatacatttttttcagcaccacaccacacctactccaaaattgaccacatagttggaagtaaagcactcctcagcaaatataaaagaacagaaattgtaacaaactgtctctcagaccacagtgcaatcaaactagaactcaggattaagaatctcactcaaaaccgctcaactacatggaaactgaacaacctgctcctgaatgactactgggtacataacgaaatgaaggcagaaataaagatgttctttgaaaccaacgagaacaaagacacaacataccagagtctctgggacacattcaaagcagtgtgtagagggaaatttatagcactaaatgcccacaagagaaagcaggaaagatccaaaattgacaccctaacatcacaattaaaagaactagaaaagcaagagcaaacacattcaaaagctagcagaaggcaagaaataactaaaatcagagtagaactgaaggaaatagagacacaaaaaacccttcaaaaaattaacgaatccaggagctggttttttgaaaggatccacaaaattgaaatacgaactgccatcagagaatactacaaacacctctatgcaaataaactagaaaatctagaagaaatggataaattcctggacacatacactctcccaagactaaaccaggaagaagttgaatctctgaatagaccaaaaacaggagctgaaattgtggcaataatcaatagcttaccaacgaaaaagagtgcaggaccagatggactcacaaccgaattctaccagaggtacaaggaggaatttgtaccattccttctgaaactattccaatcaatagaaaaagagggaatcctccctaactcattttatgaggccagcatcatcctgataccaaagcctggcagagacacaaccaaaaaagagaattttagaccaatatccttgatgaacattgatgtaaaaatcctcaataaaatactggcaaaccgaatccagcagcacatcaaaaagcttatccaccatgatcaagtgggcttcatccctgggatgcaaggctag

SEQ ID NO: 118353 - DNA, 1834 bp, Homo sapiens
aacgaaaactaacaaacaggaaggacatccacatcaaaaacccatctgtatgtcaccatcatcaaagaccaaaggtagataaaaccacaaagatggggaaaaaacagagcagaaaaactggaaactctaaaaatcagagcacatctcctactctaaaggaaagcagctcctcaccagcaacagaacaaagctggacagagaatgactttgacgagttgagagaagaaggcttcagaagatcagactactccgagctacaggaggaagttcaaaacaatggcaaagaagttaaaaactttggaaaaaaattagatgaatggataactagaataaccaatgcaaagaagtccttaaaggacctgatggagctgaaaaccaaggcacgagaactatgtgatgaacgcacaagcctcagtagccaatgcaatcaactggaagaaagggtatcagtgatggaagatgaaatgaatgaaataaagcaagaagagaagtttagagaaaaaagaataaaaagaaacgaacaaagcctccaagaaatatgggactatatgaaaagaccaaatctacgtctgattggtgtacctgaaagtgacggggagaatggaaccaagttggaaaacactctgcaggatattatccaggagaacttccccaatctagcaaggcaggccaacattcaaattcaggaaatacagagaacgccacaaagatactccttgagaagagcaaccccaagacacataattgtcagattcaccaaagttgaaatgaaggaaaaaatgttaagggtagccagagagaagggtcgggttacccacaaagggaagcctgtcagactaacagctgatctcttggcagaaactctacaagccagaagacaagacacacataggctcaaaataaagggatggaggaagatttaccaagcaaatggaaaacagaaaaaggcaggggttgcaatcctagtctcagataaaacagaatttaaaccaacaaagatcaaaagagacaaagaaggccattacataatggtaaagggatcaattcaacaagaagagctaactatcctaaatatatatgcacccaatacaggagcacccagattcacaaagcaagtccttagagacctacaaagagacttagactccaacacaataataacgggagactttaacaccccactgtcaacattagacagatcaatgagacagaaagttaacaaggatatccaggaattgaactcagctctgcaccaagcagacctaatagacatctacagaactctccaccccaaatcaacagaaaatacattcttttcggcaccacaccacacctattccaaaattgaccacatagtgggaagtaaagcactcctcagcaaatgtaaaagaaaagaaattataacaaactgtctctcagaccacagtgcaatcaaactagaactcaggattaagaaactccctcaaaactgctcaactatatggaaactgaacaacctgctcctgaatgactactgggtacataacgaaatgaaggcagaaataaagatgttgtttgaaaccaatgagaacaaagacacaacataccagaatctctgggacacattgaaagcagtgtgtagagggaaatttatagcactaaatgcccacgggagaaaacaggaaagatctaaaattgacaccctaacatcacaattaaaagaactagcaaagcaagagcaaacacattcaaaagctagcagaaggcaagaaataactaagatcagagcagaactgaaggaaatagagacacaaaaaacccttcaaaaaattaatgaatccaggagctggttttt

SEQ ID NO: 118354 - DNA, 502 bp, Homo sapiens
gctattctgtacctcatttccgatttttgtcagtttcctttttttttatctataaatttgttccgaccacgaggcatccctggtgtctctctaaatctgctgtgattctgggggctgccggattcggcaaattgtttgttgctcaatcaaaactcctttaaatttaattcaactgaagtttcttttaacaagtacaagatcatcattattttttgccaacccttataattgatccctctatctttagtccttttatttattttcttactcaattactgaaataaagaggagaaatgaactctagaggcagaaataatctcagcatcataaataaaaccgatttcccttttatagcactaaatgcccacaagagaaagcaggaaagatctaaaatcggcaacctaacatcacaattaaaagaactagagaagcaagagcaaacaaattcaaaagctagcagaaggcaagaaataactaagatcagagcagaactgaagacaca

SEQ ID NO: 118355 - DNA, 2433 bp, Homo sapiens
tagcccttttctgcatctattgagataatcatgtggttttgtctttggctctgttaatatgctggattacatttattgatttgcgtatattgaaccagccttgcatcccagggatgaagcccacttgatcatggtggataagcttttcgatgtgctgctggattcgttttgccagtattttattgaggatttttgcatcaatgttcatcaaggatattggtctaaaattctcttttttggttgtgtctctgcctggctttggtatccaggatgatacttgccctcataaaatgaattagggaggattccctctttttgtattgattggaatagtttcagaaggaatggtaccagctcctgcttgtacctctgggagaagttggctgtgaaatccgtctggtcctggactttttttggttggttaggctattagttattgcctcaatttcagagcctgttattggtctattcagagattcaacttcttcctggtttagtcttgggagggtgtatgtgtccaggaatttatccatttcttctagattttctagtttatttgcatagaggtgtttatagtattctctgatggtagtttgtatttctgtgggatcagtggtgatatcccaatttatcgttttttattgcgtctatttgattcttctctcttttcttctttattagtcttgctagcggtttatcaattttgttgatcttttcaaaaataaaaaataaaaaaccagctcctggattcattgattttttttgaagggtttttttttgtgtctctatctccttcagttctgctctgatcttagttatttcttgccttctgctagcttttgaatgtgtttgtttgctctttgcttctctagttcttttaattgtgatgttagggtgtcaattttagatactttcctgctttcctcttgtgggcatttagggcttataaatttccctctacacactggctttgaatgtgtccccagaagattctggttatgttggtgtctttttttctcattgggtttcaaagaacatctttctttatttctgccttcatttccgttatggtacccagtaggtcattccaggaggcaggttgctcagtttccatgtagctgagctggttttgagtgagtttcttaatcctgagttctagtttgattggcactgtgggtctgagagatagtttggttataatttctgttcttttacatttgctgaggagtgctttacttccaactatgaggttaattttggaataggtgtggtgtgggtgctgaaaagaatgtatattctgttgatttagggtggagagttctgtagaagtctattaggtctgcttggtgcagagctgagttcaatttcctggatatccttgttaactttctgtcttggtgatctgtctaatgttgacagtggggtgttaaagtctcccattattattgcgtaggagtctaagtctcttcgtaggtctctaaggacttgctttatgaatctgggtgctcctgtattgggtgcatatatatttaggacagttagctcttcttgttgaattgatccctttaccattatgtaatggccttctttgtcttttttgatctttgttggtttaaagtctgttttatctgagactaggattgcaacccctgcatttgtttgttttccatttgcttggtagatcttcctccatccctttattttgagcctatgtgtgtctcggtttttcctttccatgtttagtgcttccttcaggagctcttgtagggcaggcctggtggtgacaaaatctgtcagcatttgcttgtctgtaaaggattttatttctccttcacttatgaagcttagtttggctggatatgaaattctgggttgaaaattcttttctttaagaatgttgaatattggcccccactctcttctggcttgtagagtttctgccgagagatccactgttagtctgatgggcttccctttatgggtaacccaacctttctctctggctgcccttaacattttttccttcatttcaactttggtgaatctgacaattatgtgtcttggagttgctcttctcgaggagtatctttgtggcgttctctgtatttcctgaatctgaatgttggcctgccttgctagattggggaagttctcctggataatatcctgcagagtgttttccaacttggttccattctccccgtcactttcatgtacaccagtcagacgtagatttggtcttttcacatagtcccatatttcttggaggctttgttcatttctttttattcttttttctctaaacttcccttctcgcttcatttcattcatttcatcttccatcactgatacactttcttccagttgattgcatcggctcctgaggcttctgcattcttcacgtagttcttgagccttggctttcagctccat

SEQ ID NO: 118356 - DNA, 354 bp, Homo sapiens
gagaaggctctgcaacaggtccaggctgctgtgcaagctgttctgccacttgggccatatgatccagcagatccaatggtgcttgaggtgccagtagcagatagggatgctgtttggagcctttgccaggcccccatagccacccctgtcattgcccaatgggcccatgaacaaagtggccatggtggcagggatggaggttacacatgggctcagcaacatggacttccatcctccaaggctaaactggctacggccactgctgagtgcccaatttgccagcagcagagagcaacactgagccctcgatgtggcaccattcctcggggtgatcagccagctacctggtggcag

SEQ ID NO: 118357 - DNA, 1185 bp, Homo sapiens
atgggagaagagcgtagatggaggcccagcagcaacgggaagcatggtgcatttgcggaactggacaaaggctggttggtgtggctggaaggaaaaggtgtaattggggcaagaagaagctggagagcacacagtgccctgataaaaatatgtgttcaacagataaaggactcccttcctggtaaaatgagtaagggactcttacaacagcaacaaaaacctaagcacctgctccatgatctgtataaggcaatgagcaccagatggggagtgcagaaagccaggctcaactgcacagctttgccaccaactggctgtgtgactttggacccatcgttcctcactgagcctcagtttccccggcagctgtcagaagacctgcttctcacgcgtgaggccctggagaaggaggtgcagctgcggcgacagctccagcaggagaaggaggagctgttgtaccgggtccttggggccaatgcctcgcctgccttccctctggcccctgtcactcccactgaggtggagaaggaaagggagctagagcttcgagacagactggatgagcagcaaagggtcctggaaggaaagaatgaagaggccctgcaagaccctagattggtagatccactgacatcttgcactgtgcactttgaaaagccacagatgctcaacgccagactatggaagcatgcagggagggaggctgtagcctgcaaagtcagagggtcagagctgcccaagacaatgggaacctaccccttgcatcagcatgacctggatgtgagacatggagtcaaaggagatcattttggagctttaagatttgattgccctgctggattttggacttgcatggggcctttagccccttcattttggccaatttctcccatttggaatggaccaccacttgatatcagcggataccctgccacttctacacagaagtccactatgtgtctgaggatcattgatactcgactgcatccagagagtcgactcaagcagcagtcaaactttgcactgaacgctagggagaaggctctgcaacaggtccaggctgctgtgcaagctgctctgccacttgggccctatgacccagcagatccaatggtacttgaggtgtcactggcagatagggatgctgtttggagcctttggcaggcccccttaggtgaatcatag

SEQ ID NO: 118358 - DNA, 1995 bp, Homo sapiens
atggattgtgattcctgtgatggatctgggaaaagctggatgcttcctgtcctcaaacatcagactccaggttcttcagtttcgaaattcagactggctctccttgctcctcagtctgaagacagcctattgtgggaccttgtgatcatatctaacatgggaactgcagtcactgaacttcaaaatttaaatacaatgggaatgattggatcccaaagtggcagtggccaagttgcagcactcaactgtcaaaagcaaggtgggcgtagctaccataatagacagcagaggcaaagcagcaatcagaatagtctgactcaggagacctctggctttttacctgagcacatttgcattggaaagggaaatgatcagacatttcggggactactagacactggctctgagctgatgttgattccagtggatgcaaaatatcattgtggtcccccagttaaaatccaacttacaatgggtccagtgggtccccagtctcctcctgtggtcatttatccagtgccagaatgcataattggcatagacatacttagcagctggcagaacccaccccccgttggcttcctgactgggagagtgagggctattatgatgggaaaggccaaatggaggccattagaggtgtctctacctagaaagatagtaaatcaaaaacaatatcacatccatggagggaccgtggagattagtgtcaccttcaaggagttgaaagatgcaggagtagtgattcccaccatattcctgtttaactctcccatttggcctgtgcagaagacagatggaacttgtggatcttggagaatgacagtggattattgtaagcttaaccaagtggtgactccgacagtagctgccgtattagatgtggtttcattgcttgagcaaatttacacatctcctggtacctggtatgtagccaatgacttgacaaatgcctttttctccattactgttcataaggcccaccagaagcaatctgccttcagctggcaaggccagcaatatacctttaccgtcctacctcaggggatgagtttggtgcatttggcgcctcctacgaccaagaaagaggcacaatgcctagtgggcctgtttggattttggggcaacacatttctcatttggaagaaggctctgcaactggtccaggctgctatgcaagctgctctgccacttgggccatatgacccagcagatccaatggtgtttgaagtatcagtggcagattgggatgctgtttggagcctttggcagggtcccatagccacaaagtgggtcatgcacagcaccattccttcatcacatggaagtggtatacacgtgattggtctcgagcaggtcctgaaggcacaaggagttccctatgatcagttgacagaggaagagaagactagggcctggttcacagatggttctgcacgatatgcaggcaccatccgaaggtggacagctgcagcactacagcccctttctaggacatccctgaaggagagcggtgaagggaaatcttcccagtgggcagaagttcgagcagtgcaccttgttgtgcattttacatggaaggagaaatggccagatctgatggtttggctggatgatcaaggacttggaagaagcatgattggaaaattggtgacaaataaatttggggaagagatgtgtggatggacctctctgagtgagtggccaaaaactgtgaaaatattggtatcccgtgtgagtgctcaccaacgggtgacctcagcagaggagaattttaataatcaggtggatgagataagccattctgtggacaccactcagcctctttccccagccacccctgtcattgcccaatgggcccatgaacaaagtggccatggtggcagagatagaggttacgaatgggctcagcaacatgtacttccactcaccaaggctgacctggctacagccactgctgatgcccaatttgccagcagcagagaccaacaatga

SEQ ID NO: 118359 - DNA, 1518 bp, Homo sapiens
atggttaatactgagcgtcaacttgattggattgaaagatgccaagtattgatcttagctttatctgaggagataaaccctgagctgcctgaggcaattgtgatggcctcctctgaggtagttaccaggcaagataatattgattctcctcaggagccacccccaacacccctgtttgcttctagacctgtaactagactaaagtcctggcgagcccctagagtgcgtccagtgggtccccggactcatcctgtggtcatttccccagtgccagaatgcataattagcatagacatacttcgaagctggcagaacccccacattggcaccctgactggtagggtgagggctgttatggtgagaaaggccaaatggaagccattagagctgtctctacctagaaaaatagtaaaccaaaaacaatattgtgtccctggagggattgtggagattagtgccaccaccaaggacttgaaagatgcaaaggtggtgattcccaccatatccctgttcaactatcctatttggcttgtgcagaagaatgatggatcttggagaatggcagtggattatcataagcttacccaaggggtgactccaattgcagctgctgtaccaaatgtgatttcattgcttgagcaaattaacacatcttctggtacctggtatgcagccatttacttggtaaatgtctttttctccattcctgtccataaggccctcaagaaacaatttgccttcagctggcaaggtcaaccatatacctttaccattctaccttgggggcatatcaactctccgactttgtgttataatctcatttggagagaacttgatcacttttcgcttccacaagatatcacactggttcattacattgatgacattatgctaattggatccagtgagcaagaagtagcaaacacactggacttattggagaaggctctgcaacaggtccaggctgctgtgcaagctgctctaccacttgggccatatgacccagcagatccagtggtgcttgaggtgtcagtggcagatagggatactgtttggagcctatgctcctgctgctacactccctggtttgggacactttctcatgtcagcaatttgcaaacctggagcccatgtccccctccagtgtccccagtggggtcccagagacctcagctgtcacgtgagaaaaacaaaaatactaaacgtattcattccatccccgaagtattaattatgaaaccatatttcacagctgttgctaaaccatctctgctttcccataagtggctccctttagaaaaaccagaaaatccttgctgttattcctcagatcacagaacagcagtccccaacctgctcctttatcgacggagcaccaggagaaaaacagagctcactaacaaggaactcacttcggcacacttcactggagacttacccaggcgagctgtgtgggttttaggagacagaacagcagtccgtccttcactggagcaaggcatggcattgtggatttga

SEQ ID NO: 118360 - DNA, 918 bp, Homo sapiens
atgtgtccagtgggtccctggactcatcctgtggtcatttccccagtgtcagaatgcatagttggcatagacatacttggcagctggcagaacctccatattggctccctgactgatatcacaatggtccattacattgatgacatgatgctgattggatccagtgagcaagaagtagcaaactcactggacttattggtgagacatttgcatgctagaggatgcaaaataaatccgactaaaattcagggaacttctacctcagtaaaatttttagagttccagtggtgtggggtctgtcaagatattccttctaagtgggttctagaacagaaggctctgcaacaggtccaggctgctgtgcaagctgctctgccacttgagccatatgacccagcagatccaatggtgcttgaggtgtcagtggcagatggggttgctgtttggagcctttggcaggccccgatagccaggattcacgggtccaggaatcaaggggtggaagtggaagtgtcaccactcaccaatatccctagtgatccactagcaaaatttttgtttcctgctccctcaacattatgttctgctggcctagagttattagttccagagggaggaaccctgctaccaggaaacacaacaatgattccattaaattggaagttaagattggtacctggatactttgggctcctcctagctttaagtccacaggctaagaatggagtcacagtgttggctgaggtgattgacccagactatcaagatgaaatcactctactattccacaacggaggtggggaagagtatgcacggaatacaggagatccattaaggcatctcttagtattaccaagccctatgattaaggtcaatgggaaaactacaacaccccaatccaggcaggactacaaatga

SEQ ID NO: 118361 - DNA, 1599 bp, Homo sapiens
atgaaggcagaaataaagatgttctttgaaaccaatgagaacaaagagacaacataccagaatctctgggacacatttaaagcagtgtgtagagggaaatttatagcactaaatgctcacaggagaaagcaggaaagatctaaagttggcaccctaacatcacaattgaaagaactagagaagcaagagcaaacaaattcaaaagctagcagaaggcaagaaataactaagatcagagcagaactggaggagacagagacacaaaaaacccttccaaaaatcaatgaatccaggagctggttttttgaaaagatcaacaaaattgatagaccgctagcaagaccaataaagaaaagagagaagaatcaaatggaagcaataaaaaatgataaaggggatatcaccacagatcccacagaaatacgaactaccatcagagaatactataaacacctctacacaaataaactagaaagtctagaagaaatggataaattcctcgacacctacaccctcccaagactaaaacaggaagaagttgaatctctgattagaccagtaacaggctctgaaattgaggcaataattaatagcttaccaaccaaaaaaagtccaggaccagacggattcacagccgaattcttccagaggtacaaggaggagctgaggataaaatacctaggaatccaacttacaagggatatgaaggacctcttcaaggagcactataaaccactgctcaatgaaataaaagaggacacaaacaaatggaagaacattccatgctcatggataggaagaatcaatatcatgaaaatggccatactgcccaaggtaatttatagattcaatgccatccccttcgagctaccaatgactttcttcacagacttggaaaaaactactttaaagttcatatggaaccaaaaaagagcccacattgccaagtcaatcctaagccaaaagaacaaagctggaggcatcacgctacctgacttcaaactatgctacaaggctacagtaaccaaaacagcatggtactggtaccaaaacagagatatagaccaatggaacagaacagagccctcagaaataataccacacatctacaactatctgaactttgacaaacctgacaaaaacaagaaatggggaaaggattccctattcaacaaatggtgctgggaaaactggctagccatatgtagaaagctgaaactggatcccttccttacaccttatacaaaaattaattcaagatggagtaaagacttacatgttagacctaaaaccataaaaaccctagaagaaaacctaggcaataccattcaggacataggcatgggcaaggacttcatgactaaaacaccaaaagcaatggcaacaaaagccaaagttgacgaatgggatctaattaaactaaagagcttctgcacagcaaaagaaactaccatcagagtgaacaggcaacctacagaatgggagaaaatttttccaatctactcatctgacaaagggcttatatccagaatctacaaagaactcaaacaaatttgcaagaaaaaaacaaccccatcaacaagtgggcaaaggatatga

SEQ ID NO: 118362 - DNA, 1569 bp, Homo sapiens
atggataaattcctggacacatacactctcccaagactaaaccaggaagaagttgaatctctgaatagaccaataacaggctctgaaattgtggcaataatcaatagcttaccaaccaaaaagagtccaggaccagatggattcacagccgaattctaccagacgtacaaggaggaactggtaccattccttctgaaactattccaatcaacagagaaagagggaatcctccctagctcattttatgaggccagcatcatcctgataccaaagccgggcagagacacaaccgaaaaagagaattttagaccaatatccttgatgagcattgacgcaaaaatcttcaataaaatactggcaaaccgaatccagcagcacatcaaaaagctttccaccatgatcaagtgggcttcaaccctgggatgcaaggctgtgttggaagttctggccaggacaatcaggcaggagaaagaaataaagggtattcaattaggaaaagaggaagtcaaattgtccctgtttgtagatgacatgattgtatatctagaaaaccccatcgtctcagcccaaaatctcctcaagctgataagcaacttcagcaaagtctcaggatacaaaatcaatgtacaaaaatcacaagcattcttatacaccaacaacagacaaacagagagccaaatcatgagtgaactcccattcacaattgcttcaaagagaataaaatacctaggaatccaacttacaagggatgtgaaggacttcttcaaggagaactacaaaccactgctcaacgaaataaaagaggatacaaagaaatggaagaacattccatgctcatggataggaagaatcaatatcataaaaatggccatactgcccaaggtaatttatagattcaatgccatccccatcaagctaccaatgactttcttcacagaactggaaaaaactactttaaagttcatatggaaccaaaaaagagcccacatcgccaagtcaatcctaagccaaaagaacaaagctggaggcatcacgctacctgacttcaaactatactacaaggctacaataaccaaaacagcatggtactggtaccaaaacagagatatagatcaatggaacagaacagagccctcagaaataatgccgcatagctacaactatctgatctttgacaaacctgagaaaaacaagcaatggggaaaggattccctatttaataaatggtgctgggaaaactggctagccatatgtagacagctgaaactggatcccttccttacaccttatacaaaaattaattcaagatggattaaagacttaaatgttagacctaaaagcataaaaaccctagaagaaaacctaggcattaccattcaggacataggcatgggcaaggacttcatgtctaaaacaccaaaagcaatggcaacaaaagccaaaactgacaaatgggatctaattaaactaaagagcttctgcacagcaaaagaaactaccatcagagtgaacaggcaacctacaaaatgcagaaaattttcgcaacctactcatctgacaaatggctaa

SEQ ID NO: 118363 - DNA, 422 bp, Homo sapiens
cgatgcagagacctatggagaagagaatgatgaacagggaaattatttctaaaagaaagattgtctgtaactgggagcgatatctagatattgaaaaagaggccaataatgaaagtggagagtcacagaggggaacagatttcagtgtcctccttagctctgcaggggactcattctcacagttccggtttgctgaggagaaagaatgggatagtgaagcttcttgtccaaaacagaattcaccattttatgtggatagtgagttattggttcgagcccttcaagagctgcctctctgcctccgactcaacgttgctgccgaactggtccagggtacagttcctttagaggttcctcaggtgaaaccaaagagaactgatgatggcaagggattatggatgcagttaaaggggcccttgggg

SEQ ID NO: 118364 - DNA, 1092 bp, Homo sapiens
atgctgaagctatctaagggtccccagctaccagtcatctcactggcatacaaaagacactcctgtcactggagattccaggtatttcaaggagctgtgttccaaggaccagggatgaagaccaaatacttattattaccacacctgtgttatagatcctgtattgtaattggctgcatgcctcccatcaaccgctccactgtaccagcatggtcacaggaaggtagaacaccaagcaggctcctggggtccccgactccaggacttgacttctggatggcatttctggacctgccctgggtcagaggggagcccactgccctgaaggtgctggaagttctgaccagggcaatcaggcaggagaaggaaataaagggtattcaattaggaaaacaggaagtcaaattgtccctgtttgcagatgacatgattgtatatctagaaaactccatcgtctcaacccaaaatctccttaagctgataggcaacttcagcgaagtctcaggatacaaaatcaatgtgcaaaaatcacaagcattcttatacaccaataacagacaaacagagagccaaatcatgagtgaactcccattcacaattgcttcaaagagaataaaatacctaggaatccaacttacaagggacatgaaggacctcttcaaggagaactacaaaccactgctcaacgaaataaaagaggatacaaacaaatggaagaacattccatgctcatgggtaggaagaatcaatatcttgaaaatggccatactgcccaaggtaattcatagattcaatgccatccccatcaagctaccaatgactttcttcacagaactggaaaaaacaactttaaagttcatatggaaccaaaaaagagcccacattgccaagtcaatcctaagccaaaagaacaaagctggaggcatcacgctacctgacttcaaactatactacaaggctgtaaccaaaacagcatggtactggtaccaaaacagagatatagaccaagggaacagaacagagccctcagaaataatgccgcatatctacaactatctgatctttgacaaacttgacaaaaacaagaaatag

SEQ ID NO: 118365 - DNA, 549 bp, Homo sapiens
gttgaagatgacagcgatgcagagacctatggagaagagaatgatgaacagggaaattattctaaaagaaagattgtctctaactgggatcgatatcaagatattgaaaaagaggtcaataatgaaagtggagagtcacagaggggaacagatttcagtgtcctccttagctctgcagagaataaaatacctaggaatccaaattacaagggatgtgaaggacctcttcaaggagaactacaaaccactgctcaacaaactaaaagaggacacaaacaaatggaggaacgttccatgcccacgggtaggaagaatcagtattgtgaaaatggccatactgcccaagaattaaaaaaaaaaactactttaaagttcatatggaaccaaaaaagagcccacattgccaagacaattctaagtaaaaagaacaaagctggaggcatcacgctacctgacttcaaactatactacaaggctaccaaacagcatggtgctggtaccaaaacagagatacagaccaatggaacagaacaaagccctcagaaataa

SEQ ID NO: 118366 - DNA, 3039 bp, Homo sapiens
atgggagactttaacaccccactgtcaacattagacagatcaacgcgacagaaagttaacaaggatatccagaaatggaactcagctctgcaccaagtggacctaatagacatctacagaactctccaccccaaatcaacagaatatacattcttctcaacactacatcacacttattccaaaattgaccacatagttggaaaaatacaaattcccatcagggaatactataaacacctctacgcaagtaaactagaaaatctagaagaaacggataaattcctggacacatacaccctcccaagactaaaccaggaagaagttgaatccctgaatagaccaatagcaggttctgaaattgaggcaataattaatagcctaccaaccaaaaaaagtccaggaccagatggattcacagccgaattctaccagagtgttggaagttctggccagggcaatcaggcaggagaaagaaataaagggtattcaattaggaaaaaggaagtcaaattgtccatgtttgcagatgacattactgcatatttagaaaaccccatcgtctcagccccaaatctccttaagctgataagcaacttcagcaaatctcaggatacaaaatcaatgtgcaaaaatcacaagcattcctctacaccaataagagacaaacagagccaaatcatgagtgaactcccattcacagttgcttcaaagagaataaaatacctaggaatcaaacttagaagggatgtgaaggacctcttcaaggagaactacaaaccactgctcaatgaaataaaagaggacacaaacaaatggaagaacattccatgctcatggataggaagaatcaatattgtgaaaatgaccatactgcccaaggtaatttatagattcaatgccatccccatcaagctaccaatgactttctttgcagaattggaaaaaactactttaaagttcatatggaatcaaaaaagagcccacattgccaagacaatcctaagccaaaagaacaaagctggaggcatcatgctacctgacttcaaactatactacaaggctacagtcaccaaaacagcatggtactggtaccaaaacagagatatagaccaatggaacagaatagagccctcagaaataataccacacatctgtaagcatctaatctttgacaaacctgacaaaaacaagaaatggggaaaggattccctatttaataaatggtgctgggaaaactggctagccatatgtagaaagctgcatctggaccccttccttacaccttatacgaagattaattcaagatggattaaagacttaaatgttagacataaaaccataaaaaccctagaagaaaacctaggcaataccattcaggacataggcatgggcaaggacttcatgactaaaacaccaaaagcaatggcaacaaaagccaaaattgacaaatgggatctaattaaactaaagagcttctgcacagcaaaagaaactaccatcagagtgaacaggcaacctacagaatgggagaaaattttcgcaacctactcatctgacaaagggctaatatccagaatctacaatgaactcaaacaaatttacaagaaaaaaacaaacaaccccatcaaaaagtgggcgaaggacatgaacagacacttctcaaaagaagacatttatgcagccaaaaaacacatgaaaaaatgctcatcatcactggccatcagagaaacactgtataatgacagaaggataggaaagttgacacagacttgtgacgagactgccttccagccacatgtctgcacaatttcaaggcccatgctctctagcccttaccgctcctcgcttacagagaagtggtcccaagatttctccaaacctccttatcctttcctttttcataagggttacctaaaccccagagagcaagataaggaagttctgaccagggcaatcaggcaggagaaagaaagaaagggtattcaattaggaaaagaggaagtcaaattgtcgctgtttgcagatgacatgattgtatatttagaaaaccccatcgtctcagcccaaaacccccttaaggtggtaagcaacttcagcaaagtctcaggatacaaaatcagtgtgcaaaaatcacaagcattcttatacaccaataacagacaaacagagagccaaatcatgagtgaactcccattcacaattgcttcaaagagaataaaatacctaagaatccaacttacaagggatgtgaaggacctcttcaaggagaactgcaaaccactgctcaatgaaatagaagaggacacaaacaaatggaagaacattccatgctcatggataggaagaatcaatatcgtgaaaatggccatactgcccaaggtaatttatagattcaatgccatccccatcaagctaccaatgactttcttcacagtattggaaaaaacgactttaaagttcatatggaaccaaaaaagagcccacattgccaagacaatcctaagccaaaagaacaaagctggaggcatcacactacctgacttcaaactatactacaaggctacagtaaccaaaacagcatggtactggtaccaaaacagagatatagaccaatggaacagaacagagccctcagaaataataccacacatctacaaccatgtgatctttgacaaatctgacaaaaacaagaagtggggaaaagattccctatttaataaatggaagaggaaaagagacacaaagacagatacacaaggagaccatgatgaggcagaagcaagagatcacagtgatgcttctatgagccaagaaaatctaagaactgccagccatcaccagaagctaaaagagaagcctgaaacaaattctgcctcagagcctccaggaggaatcatcccgggagacatcttgatatcagatttccagcctccaaaacttcatcccggtgcttatgcaatgggctcagatgaagcagccatcgtggcagagatgcatgggtccaacggcaagagattcttttggcaaagggtgaattag

SEQ ID NO: 118367 - DNA, 1995 bp, Homo sapiens
atgaatattgatgcaaaaatcctcaataaaatactggcaaaccgaatccagcagcacatcaagaagcttatccaccatgatcaagtgggcttcatccctgagatgcaaggctgggtcaacatatgcaaatcaataaacataatccagcatataaacagaaccaaagacaaaaaccacatgattatctcaatagatgcagaaaaggcctttgacaaaattcaacaacgcttcatgctaaaaactctcaataaattaggtattgatgggacatatctcaaaataataagagctatctatgacaaacccacagccaatatcatactgaatgggcaaaaactggaagcattccctttgaaaactggcacaagacagggatgccctctctcaccactcctattcaacatagtgttggaagttctggccagggcaatcatgcaggagaaggaaataaagggtattcaattaggaaaagaggaagtcaaattgtccctgtttgcagatgacatgattgtatatttagaaaaccccatcgtctcagcccgaaatctccttaagctgataagcaacttcagcaaagtctcaggatacaaaatcaatgtgcaaaaatcacaaacattcctacacaccaataacaggcaaagagagagccaaatcatgagtgaactcccattcacaattgcttcaaagagaataaaatacctagaaatccaacttacaagggatgtgaaggacctcttcaaggagaactacaaaccactgctcaatgaaataaaagaggacacaagcaaatggaagaacattccatgcttatggataggaagaatcaatatcatgaaaatgtccatactgcccaaggtaattcataaattcaatgccatccccatcaagcgaccaattactttcttcacagaattggaagaaactactttaaagttcatatggaaccaaaaaagagcccgcattgccaagacaatcctaagcaaaaagaacaaagctggaggcatcacgctacctgacttcaaactatactacaaggctacagtagccaaaacagcatggtactggtaccaaaacagagatatagaccaatggaacagaacagagccctcagaaataataccacacatctgcaaccatctgatctttgacaaacctgacaaaaacaagaaatggggaaaggattccctgtttaataaatggtgctgggaaaactggctagccatatgtagaaagctaaaactggatcccttccttacacctcatacaaaaactaattcaagatggattaaaggcttaaatgttagacctaaaaccataaaaaccctacaagaaaacctaagctataccattcaggacataggcacgggcaaggacttcatgtctaaaacaccaaaagcaatggcaacaaaagccaacattgacaaatgggatctaattaaactaaagagcttctgcacagcaaaagaaactaccatcagagtgaacaggcaacctacagaatgggagaaaatttttgcaatctacccatctgacaaagggctaatatccagaatctacaatgaactcaaacaaatttacaagaaaaaaacaaacaaccccatcaaaaagtgggtgaaggatacgaacagacacttctcaaaagaagacatttatgcagccaaaagacacatgacaaaatgctcatcatcactggctgttagagaaatgcaaatcaaaaccacaatgagataccatctcacaccagttgaagaggtgagggcgggtgagatggccaagacaagaagatgccaaaatgtcaaaggtgccagtgaggaaggcatcagagctcttgctttgtttctcattaacctcactgtccatatggagggcaaccacattgatggagacattgaaattcaaaccaatagaagtcccttgcaagcccctggagaaatctgtgagtcttttactgctttgatggcaatgcaactgctcagtaaattgttttggagttga

SEQ ID NO: 118368 - DNA, 549 bp, Homo sapiens
ccgcggtgcctcgactccttaacaggatctacgataaggtacaaaatgaggccaagacacccttgaagaagttcttgttgaagctggctgtttccagtaaattcaaagagcttcaaaagggtatcatcaggcatgatagtttctgggacaagctcatctttgcaaagatccaggacagcctgggcggaagggttcgtgtaattgtcactggagctgcccccatgtccacttcagtcatgacattcttccgggcagcaatgggatgtcaggtgtatgaagcttatggtcaaacagaatgcacaggtggctgtacatttacattacctggggactggacatcaggtcacgttggggtgcccctggcttgcaattacgtgaagctggaagatgtggctgacatgaactactttacagtgaataatgaaggagaggtctgcatcaagggtacaaacgtgttcaaaggatacctgaaggaccctgagaagacacaggaagccctggacagtgatggctggcttcacacaggagacattggtcgctggctcccgg

SEQ ID NO: 118369 - DNA, 616 bp, Homo sapiens
atgaagcttatggtcaaacagaatgcacaggtggctgtacatttacattacctggggactggacatcagagtcaattcataaatatcttagaaatgtgcctggaattatcaccatgcaagagtttctcagctgattcagcacggtatgttctaggtcacgttggggtgcccctggcttgcaattacgtgaagctggaagatgtggctgacatgaactactttacagtgaataatgaaggagaggtctgcatcaagggtacaaacgtgttcaaaggatacctgaaggaccctgagaagacacaggaagccctgggacagtgatggctggcttcacacaggagacattggtcgctggctcccggatatagaaaatcacaatagacttattgtttgcaccttaacaaatacaagctggagaagccacaaaatcatagttttgaaaacctatcagaaagctgatgacacaaagacacctaaagaaactacattccagaacatcatgaacctttttcttaaagagaagagagccacagctgttctcattcgtggtggagtgggggaaacctccacagatctaagtaagaagaaaccagccaaacttctggcaaacttttaa

SEQ ID NO: 118370 - DNA, 498 bp, Homo sapiens
atgaaactggatcttcatctctcaccttatacaaaaatcaactcaagatggatcaaagacttaaatctaagacctgaaaccataaaaattctagaagatatcatcagaaaaactcttttagatattggcttaggcaaggattttatgatcaagaacccaaaagtaaatgcaacaaaaacgaaaataaataaatgggacctaattaaactgaaaaaacttctgcacagcaaaagaaataagcagcagagaaatcagagaacctacagagtgggagaaaatatttgcaaattctgcatccgacaaaggactaatatccagaatctacaaggaactcaaacaaatcagaagcactttacagcttctctttggcatatccgaattgccagcatcactattcttgggctttggggccattatgaaatcaaaaaaggcttctttgaatacaagtactgcaatactgagacagttgatctggtgattgacgtggccaccaagtga

SEQ ID NO: 118371 - DNA, 1125 bp, Homo sapiens
atgtgccatgggattggtgcacagatcatcccatcacaccagaccgttcagctggatattacggcctttttaaagaccgtaaagaaaaataagcacaagttttatccggcctttattcacattcttgcccgcctgatgaatgctcatccggagttccgtatggcaatgaaagacgggtttattgagaatatgtttttcgtctcagccaatccctgggtgagtttcaccagttttgatttaaacgtggccaatatggacaacttcttcgcccctgttttcaccatgggcaaatattatacgcaaggcgacaaggtgctgatgccgctggcgattgggggtcctttagagtccccagacagggatgggggtcctctagagtcgactaacagggatgcaagcccagagtcttggagttgccggaagtccactccaagactggttgcctgggtatcagcagcaaaggtatttattcgcgataagctcatggagcggcgtaaccgtcgcacaggaaggacagagaaagcgcggatctgggaagtgacggacagaacggtcaggacctggattggggaggcggttgccgccgctgctgctgacggggggggctttagagtcgacctagcaaggcgttcaattcggaaggatcgaaacgccagatcgcaaaacccagtacatacagaaggagacatgaacatgaacatcaaaaaaattgtaaaacaagccacagttctgacttttacgactgcatttctggcaggaggagcgactcaagccttcgcgaaagaaaataaccaaaaagcatacaaagaaacgtacggcgtctctcatattacacgccatgatatgctgcagatccctaaacagcagcaaaacgaaaaataccaagtgcctcaattcgatcaatcaacgattaaaaatattgagtctgcaaaaggacttgatgtgtgggacagctggccgctgcaaaacgctgacggaacagtagctgaatacaacggctatcacgttgtgtttgctcttgcgggaagcccgaaagacgctgatgacacatcaatctacatgttttatcaaaaggtcggcgacaactcaatcgacaagctggaaaaacgcgggccgtgtctttaa

SEQ ID NO: 118372 - DNA, 1374 bp, Homo sapiens
atgaaactcatggaaacacttaaccagtgcataaacgctggtcatgaaatgacgaaggctatcgccattgcacagtttaatgatgacagcccggaagcgaggaaaatgggggggggctggagaataggtgaagcagcggatttagttggggtttcttctcaggctatcagagatgccgagaaagcagggcgactaccgcacccggatatggaaattcgaggacgggttgagcaacgtgttggttatacaattgaacaaattaatcatatgcgtgatgtgtttggtacgcgattgcgacgtgctgaagacgtatttccaccggtgatcggggttgctgcccataaaggtggcgtttacaaaacctcagtttctgttcatcttgctcaggatctggctctgaaggggctacgtgttttgctcgtggaaggtaacgacccccagggaacagcctcaatgtatcacggatgggtaccagatcttcatattcatgcagaagacactctcctgcctttctatcttggggaaaaggacgatgtcacttatgcaataaagcccacttgctggccggggcttgacattattccttcctgtctggctctgcaccgtattgaaactgagttaatgggcaaatttgatgaaagtaaactgcccaccgatccacacctgggactaccgtttttcgatatgcttcttgatctgctcaagaacgttgatcttaaagggggggagcctgatgtacgtattttgcttaccaaatacagcaatagtaatggctctcagtccccgtggatggaggagcaaattcgggatgcctggggaagcatggttctaaaaaatgttgtacgtgaaacggatgaagttggtaaagttctgacttttacgaggggagggctggcaggaggagcgactcaagccttcgcgaaagaaaaggaccaaaaagcatacaaagaaacgtacggcgtctctcatattacacgccatgatatgctgcagatccctaaacagcagcaaaacgaaaaataccaagtgcctcaattcgatcaatcaacgattaaaaatattgagtctgcaaaaggacttgatgtgtgggacagctggccgctgcaaaacgctgacggaacagtagctgaatacaacggctatcacgttgtgtttgctcttgcgggaagcccgaaagacgctgatgacacatcaatctacatgttttatcaaaaggtcggcgacaactcaatcgacagctggaaaaacgcgggccgtgtttttaaagacagcgataagttcgaagccaacgatccgatcctgaaagacaaaaccaagaatgggcccggtttgcaaccttttaatctgaaggaaaaatccgttattctacactga

SEQ ID NO: 118373 - DNA, 1296 bp, Homo sapiens
atgctgcagatccctaaacagcagcaaaacgaaaaataccaagtgcctcaattcgatcaatcaacgattaaaaatattgagtctgcaaaaggacttgatgtgtgggacagctggccgctgcaaaacgctgacggaacagtagctgaatacaacggctatcacgttgtgtttgctcttgcgggaagcccgaaagacgctgatgacacatcaatctacatgttttatcaaaaggtcggcgacaactcaatcgacagctggaaaaacgcgggccgtgtctttaaagacagcgataagttcgacgccaacgatccgatcctgaaagatcagacgcaagaatggtccggttctgcaacctttacatctgacggaaaaatccgtttattctacactgactattccggtaaacattacggcaaacaaagcctgacaacagcgcaggtaaatgtgtcaaaatctgatgacacactcaaaatcaacggagtggaagatcacaaaacgatttttgacggagacggaaaaacatatcagaacgttcagcagtttatcgatgaaggcaattatacatccggcgagaaccatacgctgagagaccctcactacgttgaagacaaaagccataaataccttgatgaacgagaatgtcagcaaacaatttctggaggcaaacgggcagtctgggaccacggtcccactcgtatcgtcggtctgattattagtctgggaccacgatcccactcgtgttgtcggtctgattatcggtctgggaccacggtcccacttgtattgtcgatcagactatcagccgataagttcgacgccaacgatccgatcctgaaagatcagacgcaagaatggtccggttctgcaacctttacatctgacggaaaaatccgtttattctacactgactattccggtaaacattacggcaaacaaagcctgacaacagcgcaggtaaatgtgtcaaaatctgatgacacactcaaaatcaacggagtggaagatcacaaaacgatttttgacggagacggaaaaacatatcagaacgttcagcagtttatcgatgaaggcaattatacatccggcgacaaccatacgctgagagaccctcactacgttgaagacaaaggccataaataccttgtattcgaagccaacacgggaacagaaaacggataccaaggcgaagaatctttatttaacaaagcgtactacggcggcggcacgaacttcttccgtaaagaaagccagaagcttcagcagagcgctaaaaaacgcgatgctgaagttaaataa

SEQ ID NO: 118374 - DNA, 1281 bp, Homo sapiens
atgaacatgaacatcaaaaaaattgtaaaacaagccacagttctgacttttacgactgcacttctggcaggaggagcgactcaagccttcgcgaaagagaataaccaaaaagcatacaaagaaacgtacggcgtctctcatattacacgccatgatatgctgcagatccctaaacagcagcaaaacgaaaaataccaagtgcctcaattcgatcaatcaacgattaaaaatattgagtctgcaaaaggacttgatgtgtgggacagctggccgctgcaaaacgctgacggaacagtagctgaatacaacggctatcacgttgtgtttgctcttgcgggaagcccgaaagacgctgatgacacatcaatctacatgttttatcaaaaggtcggcgacaactcaatcgacagctggaaaaacgcgggccgtgtctttaaagacagcgataagttcgacgccaacgatccgatcctgaaagatcagacgcaagaatggtccggttctgcaacctttacatctgacggaaaaatccgtttattctacactgactattccggtaaacattacggcaaacaaagcctgacaacagcgcaggtaaatgtgtcaaaatctgatgacacactcaaaatcaacggagtggaagatcacaaaacgatttttgacggagacggaaaaacatatcagaacgttcagcagtttatcgatgaaggcaattatacatccggcgacaaccatacgctgagagaccctcactacgttgaagacaaaggccataaataccttgtattcgaagccaacacgggaacagaaaacggataccaaggcgaagaatctttatttaacaaagcgtactacggcggcggcacgaacttcttccgtaaagaaagccagaagcttcagcagagcgctaaaaaacgcgatgctgagttagcgaacggcgccctcggtatcatagagttaaataatgattacacattgaaaaaagtaatgaagccgctgatcacttcaaacacggtaactgatgaaatcgagcgcgcgaatgttttcaaaatgaacggcaaatggtacttgttcactgattcacgcggttcaaaaatgacgatcgatgtgccgcaagccaaaggcaacaatgtggttatcacaagctacatgacaaacagaggcttcttcgaggataaaaaggcaacatttgcgccaagcttcttaatgaacatcaaaggcaataaaacatccgttgtcaaaaacagcatcctggagcaaggacagctgacagtcaactaa

SEQ ID NO: 118375 - DNA, 1257 bp, Homo sapiens
atgaacatgaacatcaaaaaaattgtaaaacaagccacagttctgacttttacgactgcacttctggcaggaggagcgactcaagccttcgcgaaagaaaataaccaaaaagcatacaaagaaacgtacggcgtctctcatattacacgccatgatatgctgcagatccctaaacagcagcaaaacgaaaaataccaagtgcctcaattcgatcaatcaacgattaaaaatattgagtctgcaaaaggacttgatgtgtgggacagctggccgctgcaaaacgctgacggaacagtagctgaatacaacggctatcacgttgtgtttgctcttgcgggaagcccgaaagacgctgatgacacatcaatctacatgttttatcaaaaggtcggcgacaactcaatcgacagctggaaaaacgcgggccgtgtctttaaagacagcgataagttcgacgccaacgatccgatcctgaaagatcagacgcaagaatggtccggttctgcaacctttacatctgacggaaaaatccgtttattctacactgactattccggtaaacattacggcaaacaaagcctgacaacagcgcaggtaaatgtgtcaaaatctgatgacacactcaaaatcaacggagtgaaacggatactattgcgaagaatcttttatttaacaaagcagtactacggcggcggcacgaacttcttccgtaaagaaagccagaagcttcagcagagcgctaaaaaacgcgatgctgagttagcgaacggcgccctcggtatcatagagttaaataatgattacacattgaaaaaagtaatgaagccgctgatcacttcaaacacggtaactgatgaaatcgagcgcgcgaatgttttcaaaatgaacggcaaatggtacttgttcactgattcacgcggttcaaaaatgacgatcgatggtattaactcaaacgatatttacatgcttggttatgtatcaaactctttaaccggcccttacaagccgctgaacaaaacagggcttgtgctgcaaatgggtcttgatccaaacgatgtgacattcacttactctcacttcgcagtgccgcaagccaaaggcaacaatgtggttatcacaagctacatgacaaacagaggcttcttcgaggataaaaaggcaacatttgcgccaagcttcttaatgaacatcaaaggcaataaaacatccgttgtcaaaaacagcatcctggagcaaggacagctgacagtcaactaa

SEQ ID NO: 118376 - DNA, 729 bp, Homo sapiens
atgaacatgaacatcaaaaaaattgtaaaacaagccacagttctgacttttacgactgcacttctggcaggaggagcgactcaagccttcgcgaaagaaaataaccaaaaagcatacaaagaaacgtacggcgtctctcatattacacgccatgatatgctgcagatccctaaacagcagcaaaacgaaaaataccaagtgcctcaattcgatcaatcaacgattaaaaatattgagtctgcaaaaggacttgatgtgtgggacagctggccgctgcaaaacgctgacggaacagtagctgaatacaacggctatcacgttgtgtttgctcttgcgggaagcccgaaagacgctgatgacacatcaatctacatgttttatcaaaagagcatgctgatgcaagagttgggctcctacagctttgggcagctccgcccctgtggctgtgcaggatacagcccctgtgactgctttcacaggctggcattgagtgcctgcagattttccaggtgcacagtgcaagctgttggtggatctaccattcttgggtcggaaggatgttggccctcttctcacagctccactaggcagtgtcccagtgaagaccctgtgtggggactcaaccgcatatttcctctctgtgttgcccttgtagagagtctccataaaagctccactcctgcagcagacttctgcctagacactgaggcattttcatacatcctctga

SEQ ID NO: 118377 - DNA, 1053 bp, Homo sapiens
atgaacatgaacatcaaaaaaattgtaaaacaagccacagttctgacttttacgactgcacttctggcaggaggagcgactcaagccttcgcgaaagaaaataaccaaaaagcatacaaagaaacgtacggcgtctctcatattacacgccatgatatgctgcagatccctaaacagcagcaaaacgaaaaataccaagtgcctcaattcgatcaatcaacgattaaaaatattgagtctgcaaaaggacttgatgtgtgggacagctggccgctgcaaaacgctgacggaacagtagctgaatacaacggctatcacgttgtgtttgctcttgcgggaagcccgaaagacgctgatgacacatcaatctacatgttttatcaaaaggtcggcgacaactcaatcgacagctggaaaaacgcgggccgtgtctttaaagacagcgataagttcgacgccaacgatccgatcctgaaagaacagacgcaagaatggatccccttgcctgtatgtggtcgggatgtgaagtttactcttgaagtgctccggggtgatagtgttgagaagacctctcgggtatggtcaggtaatgaacgtgaccaggagctgcttactgaggacgcactggatgatctcatcccttcttttctactgactggtcaacagacaccggcgttcggtcgaagagtatctggtgtcatagaaattgccgatgggagtcgccgtcgtaaagctgctgcacttaccgaaagtgattatcgtgttctggttggcgagctggatgatgagcagatggctgcattatccagattgggtaacgattatcgcccaacaagtgcttatgaacgtggtcagcgttatgcaagccgattgcagaatgaatttgctggaaatatttctgcgctggctgatgcggaaaatatttcacgtaagattattacccgctgtatcaacaccgccaaattgcctaaatcagttgttgctcttttttctcaccccggtgaactatctgcccggtcaggtgatgcacttcaaaaagcctttacagattaa

SEQ ID NO: 118378 - DNA, 1188 bp, Homo sapiens
atgaacatgaacatcaaaaaaattgtaaaacaagccacagttctgacttttacgactgcacttctggcaggaggagcgactcaagccttcgcgaaagaaaataaccaaaaagcatacaaagaaacgtacggcgtctctcatattacacgccatgatatgctgcagatccctaaacagcagcaaaacgaaaaataccaagtgcctcaattcgatcaatcaacgattaaaaatattgagtctgcaaaaggacttgatgtgtgggacagctggccgctgcaaaacgctgacggaacagtagctgaatacaacggctatcacgttgtgtttgctcttgcgggaagcccgaaagacgctgatgacacatcaatctacatgttttatcaaaaggtcggcgacaactcaatcgacagctggaaaaacgcgggccgtgtctttaaagacagcgataagttcgacgccaacgatccgatcctgaaagatcagacgcaagaatggtccggttctgcaacctttacatctgacggaaaaatccgtttattctacactgactattccggtaaacattacggcaaacaaagcctgacaacagcgcaggtaaatgtgtcaaaatctgatgacacactcaaaatcaacggagtggaagatcacaaaacgatttttgacggagacggaaaaacatatcagaacgttcagcagtttatcgatgaaggcaattatacatccggcgacaaccatacgctgagagaccctcactacgttgaagacaaaggccataaataccttgtattcgaagccaacacgggaacagaaaacggataccaaggcgaagaatctttatttaacaaagcgtactacggcggcggcacgaacttcttccgtaaagaaagccagaagcttcagcagagcgctaaaaaacgcgatgctgagttagcgaacggcgccctcggtatcatagagttaaataatgattacacatctgaaaaaagtaatgaagccgctgatcacttcaaacacgtgccgcaagccaaaggcaacaatgtggttatcacaagctacatgacaaacagaggcttcttcgaggataaaaaggcaacatttgcgccaagcttcttaatgaacatcaaaggcaataaaacatccgttgtcaaaaacagcatcctggagcaaggacagctgacagtcaactaa

SEQ ID NO: 118379 - DNA, 867 bp, Homo sapiens
atgaacatgaacatcaaaaaaattgtaaaacaagccacagttctgacttttacgactgcacttctggcaggaggagcgactcaagccttcgcgaaagaaaataaccaaaaagcatacaaagaaacgtacggcgtctctcatattacacgccatgatatgctgcagatccctaaacagcagcaaaacgaaaaataccaagtgcctcaattcgatcaatcaacgattaaaaatattgagtctgcaaaaggacttgatgtgtgggacagctggccgctgcaaaacgctgacggaacagtagctgaatacaacggctatcacgttgtgtttgctcttgcgggaagcccgaaagacgctgatgacacatcaatctacatgttttatcaaaaggtcggcgacaactcaatcgacagctggaaaaacgcgggccgtgtctttaaagacagcgataagttcgacgccaacgatccgatcctgaaagatcagacgcaagaatggtccggttctgcaacctttacatctgacggaaaaatccgtttattctacactgactattcccgtaaacattacggggatcctctagagtcgacctgcatggcattcataggaggagcgactcaagccttcgcgaaagaaaataaccaaaaagcatacaaagaaacgtacggcgtctctcatattacacgccatgatatgctgcagatccctaaacagcagcaaaacgaaaaataccaagtgcctcaattcgatcaatcaacgattaaaaatattgagtctgcaaaaggacttgatgtgtgggacactggccgctgcaggggatcctctagagtcgacctgcaggcatgcaagctaccaaattggaaagtgtaa

SEQ ID NO: 118380 - DNA, 975 bp, Homo sapiens
  misc_feature (1)...(975): n = a,t,c or g
atgaacatgaacatcaaaaaaattgtaaaacaagccacagttctgacttttacgactgcacttctggcaggaggagcgactcaagccttcgcgaaagaaaataaccaaaaagcatacaaagaaacgtacggcgtctctcatattacacgccatgatatgctgcagatccctaaacagcagcaaaacgaaaaataccaagtgcctcaattcgatcaatcaacgattaaaaatattgagtctgcaaaaggacttgatgtgtgggacagctggccgctgcaaaacgctgacggaacagtagctgaatacaacggctatcacgttgtgtttgctcttgcgggaagcccgaaagacgctgatgacacatcaatctacatgttttatcaaaaggtcggcgacaactcaatcgacagctggaaaaacgcgggccgtgtctttaaagacagcgataagttcgacgccaacgatccgatcctgaaagatagacgcaagatggtcncgacaccggcgttcggtcgaagagtatctggtgtcatagaaattgccgatgggagtcgccgtcgtaaagctgctgcacttaccgaaagtgattatcgtgttctggttggcgagctggatgatgagcagatggctgcattatccagattgggtaacgattatcgcccagcaagtgcttatgaacgtggtcagcgttatgcaagccgattgcagaatgaatttgctggaaatatttctgcgctggctgatgcggaaaatatttcacgtaagattattacccgctgtatcaacaccgccaaattgcctaaatcagttgttgctcttttttctcaccccggtgaactatctgcccggtcaggtgatgcacttcaaaaagcctttacagataaagaggaattacttaagcagcaggcatctaaccttcatgagcagaaaaaagctggggtgatatttgaagctgaagaaatatcactcttttaa

SEQ ID NO: 118381 - DNA, 1394 bp, Homo sapiens
aaggagacatgaacatgaacatcaaaaaaattgtaaaacaagccacagttctgacttttacgactgcattctggcaggaggagcgactcaagccttcgcgaaagaaaataaccaaaaagcatacaaagaaacgtacggcgtctctcatattacacgccatgatatgctgcagatccctaaacagcagcaaaacgaaaaataccaagtgcctcaattcgatcaatcaacgattaaaaatattgagtctgcaaaaggacttgatgtgtgggacagctggccgctgcaaaacgctgacggaacagtagctgaatacaacggctatcacgttgtgtttgctcttgcgggaagcccgaaagacgctgatgacacatcaatctacatgttttatcaaaaggtcggcgacaactcaatcgacagctggaaaaacgcgggccgtgtctttaaagacagcgataagttcgacgccaacgatccgatcctgaaagatcagacgcaagaatggtccggttctgcaaccttcacatctgacggaaaaatccgtttattctacactgactattccggtaaacattacggcaaacaaagcctgacaacagcgcaggtaaatgtgtcaaaatctgatgacacactcaaaatcaacggagtggaagatcacaaaactatttttgacggagacggaaaaacatatcagaacgttcagcagtttatcgatgaaggcaattatacgggggatcctctagaggcggaaacagcggttatcaatcacaagaaacgtaaaaatagcccgcgaatcgtccagtcaaacgacctcactgaggcggcatatagtctctcccgggatcaaaaacgtatgctgtatctgttcgttgaccagatcagaaaatctgatggcaccctacaggaacatgacggtatctgcgagatccatgttgctaaatatgctgaaatattcggattgacctctgcggaagccagtaaggatatacggcaggcattgaagagtttcgcggggaaggaagtggttttttatcgccctgaagaggatgccggcgatgaaaaaggctatgaatcttttccttggtttatcaaacgtgcgcacagtccatccagagggctttacagtgtacatatcaacccatatctcattcccttctttatcgggttacagaaccggtttacgcagtttcggcttagtgaaacaaaagaaatcaccaatccgtatgccatgcgtttatacgaatccctgtgtcagtatcgtaagccggatggctcaggcatcgtctctctgaaaatcgactggatcatagagcgttaccagctgcctcaaagttaccagcgtacgcctgacttccgccgccgcttcctgcaggtctgtgttaatgagatcaacgggg

SEQ ID NO: 118382 - DNA, 1004 bp, Homo sapiens
ctgccccgatggtggattcgttaattgcgcgcgtaggagtaatggctcgcggtaatgccattactttgcctgtatgtggtcgggatgtgaagtttactcttgaagtgctccggggtgatagtgttgagaagacctctcgggtatggtcaggtaatgaacgtgaccaggagctgcttactgaggacgcactggatgatctcatcccttcttttctactgactggtcaacagacaccggcgttcggtcggagagtatctggtgtcatagaaattgccgatgggagtcgccgtcaaaataaccaaaaagcatacaaagaaacgtacggcgtctctcatattacacgccatgatatgctgcagatccctaaacagcagcaaaacgaaaaataccaagtgcctcaattcgatcaatcaacgattaaaaatattgagtctgcaaaaggacttgatgtgtgggacagctggccgctgcaaaacgctgacggaacagtagctgaatacaacggctatcacgttgtgtttgctcttgcgggaagcccgaaagacgctgatgacacatcaatctacatgttttatcaaaaggtcggcgacaactcaatcgacagctggaaaaacgcgggccgtgtctttaaagacagcgataagttcgacgccaacgatccgatcctgaaagatcagacgcaagaatggtccggttctgcaacctttacatctgacggaaaaatccgtttattctacactgactattccggtaaacattacggcaaacaaagcctgacaacagcgcaggtaaatgtgtcaaaatctgatgacacactcaaaatcaacggagtggaagatcacaaaacgatttttgacggagacggaaaaacatatcagaacgttcagcagtttatcgatgaaggcaattatacatccggcgacaaccatacgctgagagaccctcactacgttgaagacaaaagccataaataccttgtattcgaagccacacgggaagactga

SEQ ID NO: 118383 - DNA, 771 bp, Homo sapiens
atgaacatgaacatcaaaaaaattgtaaaacaagccacagttctgacttttacgactgcacttctggcaggaggagcgactcaagccttcgcgaaagaaaataaccaaaaagcatacaaagaaacgtacggcgtctctcatattacacgccatgatatgctgcagatccctaaacagcagcaaaacgaaaaataccaagtgcctcaattcgatcaatcaacgattaaaaatattgagtctgcaaaaggacttgatgtgtgggacagctggccgctgcaaaacgctgacggaacagtagctgaatacaacggctatcacgttgtgtttgctcttgcgggaagcccgaaagacgctgatgacacatcaatctacatgttttatcaaaaggtcggcgacaactcaatcgacagctggaaaaacgcgggccgtgtctttaaagacagcgataagttcgacgccaacgatccgatcctgaaagatcagacgcaagaatggtccggttctgcaacctttacatctgacggaaaaatccgtttattctacactgactattccggtaaacattacggcaaacaaagcctgacaacagcgcaggtaaatgtgtcaaaatctgatgacacactcaaaatcaacggagtggaagatcacaaaacgatttttgacggagacggagggtaccgagctcgaattcgtaatcatggtcatagctgtttcctgtgtgaaattgttatccgctcacaattccacacaacatacgagccggaagcataa

SEQ ID NO: 118384 - DNA, 1311 bp, Homo sapiens
atgaacatgaacatcaaaaaaattgtaaaacaagccacagttctgacttttacgactgcacttctggcaggaggagcgactcaagccttcgcgaaagaaaataaccaaaaagcatacaaagaaacgtacggcgtctctcatattacacgccatgatatgctgcagatccctaaacagcagcaaaacgaaaaataccaagtgcctcaattcgatcaatcaacgattaaaaatattgagtctgcaaaaggacttgatgtgtgggacagctggccgctgcaaaacgctgacggaacagtagctgaatacaacggctatcacgttgtgtttgctcttgcgggaagcccgaaagacgctgatgacacatcaatctacatgttttatcaaaaggtcggcgacaactcaatcgacagctggaaaaacgcgggccgtgtctttaaagacagcgataagttcgacgccaacgatccgatcctgaaagatcagacgcaagaatggtccggggtctgcacctttacatctgacggaaaaatccgtttattctacactgactattccggtaaacattacggcaaacaaagcctgacaacagcgcagggcaattatacatccggcgacaaccatacgctgagagaccctcgctacgttgaagacaaaggccataaataccttgtattcgaagccaacacgggaacagaaaacggataccaaggcgaagaatctttatttaacaaagcgtactacggcggcggcacgaacttcttccgtaaagaaagccagaagcttcagcagagcgctaaaaaacgcgatgctgagttagcgaacggcgccctcggtatcatagagttaaataatgattacacattgaaaaaagtaatgaagccgctgatcacttcaaacacggtaactgatgaaatcgagcgcgcgaatgttttcaaaatgaacggcaaatggtacttgttcactgattcacgcggttcaaaaatgacgatcgatggtattaactcaaacgatatttacatgcttggttatgtatcaaactctttaaccggcccttacaagccgctgaacaaaacagggcttgtgctgcaaatgggtcttgatccaaacgatgtgacattcacttactctcacttcgcagtgccgcaagccaaaggcaacaatgtggttatcacaagctacatgacaaacagaggcttcttcgaggataaaaaggcaacatttgcgccaagcttcttaatgaacatcaaaggcaataaaacatccgttgtcaaaaacagcatcctggagcaaggacagctgacagtcaactaa

SEQ ID NO: 118385 - DNA, 753 bp, Homo sapiens
tcaattcgggaggatcgaaacggcagatcgcaaaaaacagtacatacagaaggagacatgaacatgaacatcaaaaaaattgtaaaacaagccacagttctgacttttacgactgcacttctggcaggaggagcgactcaagccttcgcgaaagaaaataaccaaaaagcatacaaagaaacgtacggcgtctctcatattacacgccatgatatgctgcagatccctaaacagcagcaaaacgaaaaataccaagtgcctcaattcgatcaatcaacgattaaaaatattgagtctgcaaaaggacttgatgtgtgggacagctggccgctgcaaaacgctgacggaacagtagctgaatacaacggctatcacgttgtgtttgctcttgcgggaagcccgaaagacgctgatgacacatcaatctacatgttttatcaaaaggtcggcgacaactcaatcgacagctggaaaaacgcgggccggtctttaaagacagcgataaggggggattttgccgatttcggaaccaccatcaaacaggattttcgcctgctggggcaaaccagcgtggaccgcttgctgcaactctctcagggccaggcggtgaagggcaatcagctgttgcccgtctcactggtgaaaagaaaaaccaccctggcgcccaatacgcaaaccgcctctccccgcgcgttggccgattcattaatgcagctggcacgacaggtttcccgactggaaagcgggcagtga

SEQ ID NO: 118386 - DNA, 621 bp, Homo sapiens
atgaacatgaacatcaaaaaaattgtaaaacaagccacagttctgacttttacgactgcacttctggcaggaggagcgactcaagccttcgcgaaagaaaataaccaaaaagcatacaaagaaacgtacggcgtctctcatattacacgccatgatatgctgcagatccctaaacagcagcaaaacgaaaaataccaagtgcctcaattcgatcaatcaacgattaaaaatattgagtctgcaaaaggacttgatgtgtgggacagctggccgctgcaaaacgctgacggaacagtagctgaatacaacggctatcacgttgtgtttgctcttgcgggaagcccgaaagacgctcatgacacatcaatctacatgttttatcaaaagatccgtatggcaatgaaagacggtgagctggtgatatcggatagtgttcacccttgttacacggttttccatgagcgaactgaaacgttttcatcgctctggagtgcatccctcgacgatttgcggcagtttctacacatatattcgcaagatgtggcgtgttgcggtgaaaacctggcgtatttccataaagggtttattgagaatatgttcgtggtctcagccaatccctgg

SEQ ID NO: 118387 - DNA, 921 bp, Homo sapiens
atgaaactcatggaaacacttaaccagtgcataaacgctggtcatgaaatgacgaaggctatcgccattgcacagtttaatgatgacagcccggaagcgaggaaaataacccggcgctggagaataggtgaagcagcggatttagttggggtttcttctcaggctatcagagatgccgagaaagcagggcgactaccgcacccggatatggaaattcgaggacgggttgagcaacgtgttggttatacaattgaacacattaatcatatgcgtgatgtgtttggtacgcgattgcgacgtgctgaagacgtatatccaccggtgatcggggttgctgcccataaagtgggcgtttacaaaacctcagtttctgttcatcttgctcaggatctggctctgaggggctacctgttttgctcgtggaagtcaattcgggaggatcgaaacggcagatcgcaaaaaacagtacatacagaaggagacatgaacatgaacatcaaaaaaattgtgaaacaagccacagttctgacttttacgactgcacttctggcaggaggagcgactcaagccttcgcgaaagaaaataaccaaaaagcatacaaagaaacgtacggcgtctctcatattacacgccatgatatgctgcagatccctaaacagcagcaaaacgaaaaataccaagtgcctcaattcgatcaatcaacgattaaaaatattgagtctgcaaaaggacttgatgtgtgggacagctggccgctgcaaaacgctgacggaacagtagctgaatacaacggctatcacgttgtgtttgctcttgcgggaagcccgaaagacgctgatgacacatcaatctacatgttttatcaaaaggtcggcgacaactcaatctacagctggaaaaacgcggcgccgtgtctttaa

SEQ ID NO: 118388 - DNA, 1029 bp, Homo sapiens
atgaacatgaacatcaaaaaaattgtaaaacaagccacagttctgacttttacgactgcacttctggcaggaggagcgactcaagccttcgcgaaagaaaataaccaaaaagcatacaaagaaacgtacggcgtctctcatattacacgccatgatatgctgcagatccctaaacagcagcaaaacgaaaaataccaagtgcctcaattcgatcaatcaacgattaaaaatattgagtctgcaaaaggacttgatgtgtgggacagctggccgctgcaaaacgctgacggaacagtagctgaatacaacggctatcacgttgtgtttgctcttgcgggaagcccgaaagacgctgatgacacatcaatctacatgttttatcaaaaggtcggcgacaactcaatcgacagctggaaaaacgcgggccgtgtctttaaagacagcgataagttcagcgccaacgatccgatcctgaaagatcaaacccaagaatggtccggatacccttgggtaacgattatcgcccaacaagtgcttatgaacgtggtcagcgtggtgcagagccgattgcaaaatgaatttgctggaaatatttctgcgctggctgatgcggaaaatatttcacgtaagattattacccgctgtatcaacaccgccaaattgcctaaatcagttgttgctcttttttctcaccccggtgaactatctgcccggtcaggtgatgcacttcaaaaagcctttacagataaagaggaattacttaagcagcaggcatctaaccttcatgagcagaaaaaagctggggtgatatttgaagctgaagaagttatcactcttttaacttctgtgcttaaaacgtcatctgcatcaagaactagtttaagctcacgacatcagtttgctcctggagcgacagtattgtataagggcgataaaatggtgcttaacctggacaggtctcgtgttccaactgagtgtatagagaaaattgaggccattcttaaggaacttgaaaagccagcaccctga

SEQ ID NO: 118389 - DNA, 945 bp, Homo sapiens
atgaacatgaacatcaaaaaaattgtaaaacaagccacagttctgacttttacgactgcacttctggcaggaggagcgactcaagccttcgcgaaagaaaataaccaaaaagcatacaaagaaacgtacggcgtctctcatattacacgccatgatatgctgcagatccctaaacagcagcaaaacgaaaaataccaagtgcctcaattcgatcaatcaacgattaaaaatattgagtctgcaaaaggacttgatgtgtgggacagctggccgctgcaaaacgctgacggaacagtagctgaatacaacggctatcacgttgtgtttgctcttgcgggaagcccgaaagacgctgatgacacatcaatctacatgttttatcaaaaggtcggcgacaactcaatcgacagctggaaaaacgcgggccgtgtctttaaagacagcgataagttcgacgccaacgatccgatcctgaaagatcagacgcaagaatggtccggttctgcaacctttacatctgacggaaaaatccggttattctacactgactattccggtaaacattacggcaaacaaagcctgacaacagcgcagctcatggagcggcgtaaccgtcgcacaggaaggacagagaaagcgcggatctgggaagagacggacagaacggtcaggacctggattggggaggcggttgccgccgctgctgctgacggtgtgacgttctctgttccggtcacaccacatacgttccgccattcctatgcgatgcacatgctgtatgccggtataccgctgagagttctgcaaagcctgatgggacataagtccatcagttcaacggaagtctacacgaaggtttttgcgctggatgtggctgcccggcaccgggtgcagtttgcgatgccggagtctgatgcggttgcgatgctgaaacaattatcctga

SEQ ID NO: 118390 - DNA, 528 bp, Homo sapiens
atgaacatgaacatcaaaaaaattgtaaaacaagccacagttctgacttttacgactgcacttctggcaggaggagcgactcaagccttcgcgaaagaaaataaccaaaaagcatacaaagaaacgtacggcgtctctcatattacacgccatgatatgctgcagatccctaaacagcagcaaaacgaaaaataccaagtgcctcaattcgatcaatcaacgattaaaaatattgagtctgcaaaaggacttgatgtgtgggacagctggccgctgcaaaacgctgacggaacagtagctgaatacaacggctatcacgttgtgtttgctcttgcgggaagcccgaaagacgctgatgacacatcaatctacatgttttatcaaaagatcagacgcaagaatggtcccggttctgcaacctttacatctgacggaaaaatccgtttattctacactgactattccgggaaacattacggcaaacaaagcctggacacagcgccagtaaaatgtggtcaaatctggtga

SEQ ID NO: 118391 - DNA, 1704 bp, Homo sapiens
atgctgcagatccctaaacagcagcaaaacgaaaaataccaagtgcctcaattcgatcaatcaacgattaaaaatattgagtctgcaaaaggacttgatgtgtgggacagctggccgctgcaaaacgctgacggaacagtagctgaatacaacggctatcacgttgtgtttgctcttgcgggaagcccgaaagacgctgatgacacatcaatctacatgttttatcaaaaggtcggcgacaactcaatcgacagctggaaaaacgcgggccgtgtctttaaagacagcgataagttcgacgccaacgatccgatcctgaaagatcagacgcaagaatggtccggttctgcaacctttacatctgacggaaaaatccgtttattctacactgactattccggtaaacattacggcaaacaaagcctgacaacagcgcaggtaaatgtgtcaaaatctgatgacacactcaaaatcaacggagtggaagatcacaaaacgatttttgacggagaacggaaaacatatcagaacgttcagcagtttatcgatgaaggcaattatacatccggcgacaaccatacgctgagagaccctcactaccaaaatacgtacatcaggctcgaaccctttaagatcaacgttcttgagcagatcacgaagcatatcgaaaaactgcagtgcggaggtgtagtcaaacaactcagcaggcgtgggaacaatcagcacatcagcagcacatacgacattaatcgtgccgatacccaggttaggcgcgctgtcaataactatgacatcatagtcatgagcaacagtttcaatggccagtcggagcatcaggtgtggatcgatagaaaggcaggagagtgtcttctgcatgaatatgaagatctggtacccatccgtgatacattgaggctgttccctgggggtcgttaccttccacgagcaaaacacgtagccccttcagagccagatcctgagcaagatgaacagaaactgagctgctgcacttaccgaaagcgatatcgtgttctggttggcgagctgggtgatgagcagatggctgcattatccagattgggtaacgattatcgcccaacaagtgcttatgaacgtggtcagcgttatgcaagcctattgcagaatgaatttgctggaaatatttctgcgctggctgatgcggaaaatatttcacgtaagattattacccgctgtatcaacaccgccaaattgcctaaatcagttgttgctcttttttctcaccccggtgaactatctgcccggtcaggtgatgcacttcaaaaagcctttacagataaagaggaattacttaagcagcaggcatctaaccttcatgagcagaaaaaagctggggtgatatttgaagctgaagaagttatcactcttttaacttctgtgcttaaaacgtcatctgcatcaagaactagtttaagctcacgacatcagtttgctcctggagcgacagtattgtataagggcgataaaatggtgcttaacctggacagactaataatcagaccgacgatacgagtgggaccgtggtcccagactaataatcagaccgacgatacgagtgggaccatggtcccagtactaataatcagaccgacgatacgagtgggaccgtggtcccagtctgattatcagaccgacgatacgagtgggaccgtggtcccagactaa

SEQ ID NO: 118392 - DNA, 1449 bp, Homo sapiens
  misc_feature (1)...(1449): n = a,t,c or g
ttcgttggcagaaggagcgactcaagcttcgcgaaagaaaatacccaaaaagcatccaaagaaacgtacggcgtctctcatattacacgccatgatatgctgcagatccttaaacagcagcaaaacgaaaaataccaagtgcctcaattcgatcaatcaacgattaaaaatattgagtctgcaaaaggacttgatgtgtgggacagctggccgctgcaaaacgctgacggaacagtagctgaatacaacggctatcacgttgtgtttgctcttgcgggaagcccgaaagacgctgatgacacatcaatctacatgttttatcaaaaggtcggcgacaactcaatcgacagctggaaaaacgcgggccgtgtctttaaagacagcgataagttcgacgccaacgatccgatcctgaaagatcagacgcaagaatggtccggttctgcaacctttacatctgacggaaaaatccgtttattctacactgactattccggtaaacattacggcaaacaaagcctgacaacagcgcaggtaaatgtgtcaaaatctgatgacacactcaaaatcaacggagtggaagatcacaaaacgatttttgacggagacggaaaaacatatcagaacgttcagcagtttatcgatgaaggcaattatacatccggcgacaaccatacgctgagagaccctcactacgttgaagacaaaggccataaataccttgtattcgaagccaagtgtgacaatctaaaaacttgtcacacttcacatggatctgtcatggcggaaacagcggttatcaatcacaagaaacgtaaaaatagcccgcgaatcgtccagtcaaacgacctcactgaggcggcatatagtctctcccgggatcaaaaacgtatgctgtatctgttcgttgaccagatcagaaaatctgatggcaccctacaggaacatgacggtatctgcgagatccatgttgctaaatatgctgaaatattcggattgacctctgcggaagccagtaaggatatacggcaggcattgaagagtttcgcggggaaggaagtggttttttatcgccctgaagaggatgccggcgatgaaaaaggctatgaatcttttccttggtttatcaaacgtgcgcacagtccatccagagggctttacagtgtacatatcaacccatatctcattcccttctttatcgggttacagaaccggtttacgcagtttcggcttagtgaaacaaaagaaatcaccaatccgtatgccatgcgtttatacgaatccctgtgtcagtatcgtaagccggatggctcaggcatcgtctctctgaaaatcgactggatcatagagcgttaccagctgcctcaaagttacgagtgtatcctntaccaggaaattgcggtgatcctctacagtagtcgcagagtcatgcacgaaggtcgattttga

SEQ ID NO: 118393 - DNA, 1584 bp, Homo sapiens
tcaggaccctcagctgcaggtttgttggtgtttgctggaggtccactccaggccctgtgtgcctgggtatcagcagtggaggctgcagaacagtggatattgtcaattcgggaggatcgaaacggcagatcgcaaaaaacagtacatacagaaggagacatgaacatgaacatcaaaaaaattgtaaaacaagccacagttctgacttttacgactgcacttctggcaggaggagcgactcaagccttcgcgaaagaaaataaccaaaaagcatacaaagaaacgtacggcgtctctcatattacacgccatgatatgctgcagatccctaaacagcagcaaaacgaaaaataccaagtgcctcaattcgatcaatcaacgattaaaaatattgagtctgcaaaaggacttgatgtgtgggacagctggccgctgcaaaacgctgacggaacagtagctgaatacaacggctatcacgttgtgtttgctcttgcgggaagcccgaaagacgctgatgacacatcaatctacatgttttatcaaaaggtcggcgacaactcaatcgacagctggaaaaacgcgggccgtgtctttaaagacagcgataagttcgacgccaacgatccgatcctgaaagatcagacgcaagaatggtccggttctgcaacctttacatctgacggaaaaatccgtttattctacactgactattccggtaaacattacggcaaacaaagcctgacaacagcgcaggtaaatgtgtcaaaatctgatgacacactcaaaatcaacggagtggaagatcacaaaacgatttttgacggagacggaaaaacatatcagaacgttcagcagtttatcgatgaaggcaattatacatccggcgacaaccatacgctgagagaccctcactacgttgaagacaaaggccataaataccttgtattcgaagccaacacgggaacagaaaacggataccaaggcgaagaatctttatttaacaaagcgtactacggcggcggcacgaacttcttccgtaaagaaagccagaagcttcagcagagcgctaaaaaacgcgatgctgagttagcgaacggcgccctcggtatcatagagttaaataatgattacacattgaaaaaagtaatgaagccgctgatcacttcaaacacggtaactgatgaaatcgagcgcgcgaatgttttcaaaatgaacggcaaatggtacttgttcactgattcacgcggttcaaaaatgacgatcgatggtattaactcaaacgatatttacatgcttggttatgtatcaaactctttaaccggcccttacaagccgctgaacaaaacagggcttgtgctgcaaatgggtcttgatccaaacgatgtgacattcacttactctcacttcgcagtgccgcaagccaaaggcaacaatgtggttatcacaagctacatgacaaacagaggcttcttcgaggataaaaaggcaacatttgcgccaagcttcttaatgaacatcaaaggcaataaaacatccgttgtcaaaaacagcatcctggagcaaggacagctgacagtcaactaa

SEQ ID NO: 118394 - DNA, 1539 bp, Homo sapiens
  misc_feature (1)...(1539): n = a,t,c or g
atgcagttttctttattgtggcctttcgtgcatgcctcgcagttgactctagaggatccccgcataaacgctggtcatgaaatgacgaaggctatcgccattgcacagtttaatgatgacagcccggaagcgaggaaaataacccggcgctggagaataggtgaagcagcggatttagttggggtttcttctcaggctatcagagatgccgagaaagcagggcgactaccgcacccggatatggaaattcgaggacgggttgagcaacgtgttggttatacaattgaacaaattaatcatatgcgtgatgtgtttggtacgcgattgcgacgtgctgaagacgtatttccaccggtgatcggggttgctgcccataaaggtggcgtttacaaaacctcagtttctgttcatcttgctcaggatctggctctgaaggggctacgtgttttgctcgtggaaggtaacgacccccagggaacagcctcaatgtatcacggatgggtaccagatcttcatattcatgcagaagacactctcctgcctttctatcttggggaaaaggacgatgtcacttatgcaataaagcccacttgctggccggggcttgacattattccttcctgtctggctctgcaccgtattgaaactgagttaatgggcaaatttgatgaaggtaaactgcccaccgatccacacctgatgctccgactgggcattgaaactgttgctcatgactatgatgtcctagttattgacagcccgcctaacctgggtatcggcacgattaatgtccgatgggctgctgatgtgcagcctttancgatccctaaacagcagcaaaacgaaaaataccaagtgcctcaattcgatcaatcaacgattaaaaatattgagtctgcaaaaggacttgatgtgtgggacagctggccgctgcaaaacgctgacggaacagtagctgaatacaacggctatcacgttgtgtttgctcttgcgggaagcccgaaagacgctgatgacacatcaatctacatgttttatcaaaaggtcggcgacaactcaatcgacagctggaaaaacgcgggccgtgtctttaaagacagcgataagttcgacgccaacgatccgatcctgaaagatcagacgcaagaatggtccggttctgcaacctttacatctgacggaaaaatccgtttattctacactgactattccggtaaacattacggcaaacaaagcctgacaacagcgcaggtaaatgtgtcaaaatctgatgacacactcaaaatcaacggagtggaagatcacaaaacgatttttgacggagacggaaaaacatatcagaacgttcagcagtttatcgatgaaggcaattatacatccggcgacaaccatacgctgagagaccctcactacgttgaagacaaaggccataaataccttgtattcgaagcccacacgggaacagaaaacggataccaaggcgaagaatctttatttaacaaagcgtactacgggaatacgtgcatgactcgcagatga

SEQ ID NO: 118395 - DNA, 1078 bp, Homo sapiens
  misc_feature (1)...(1078): n = a,t,c or g
ccagcgcagaaatatttccagcaaattcattctgcaatcggcttgcataacgctgaccacgttcataagcacttgttgggcgataatcgttacccaatctggataatgcagccatctgctcatcatccagctcgccaaccagaacacgataatcactttcggaaggagcgactcaaggccttcgcgaaagaaaaatacccacataagcatacaaagaaacggtcgggcgtttttcatattacacgccatgatatgctgcagatccctaaacagcagcaaaacgaaaaataccaagtgcctcaattcgatcaatcaacgattaaaaatattgagtctgcaaaagnacttgatgtgtgggacagctggccgctgcaaaacgctgacggaacagtagctgaatacaacggctatcacgttgtgtttgctcttgcgggaagcccgaaagacgctgatgacacatcaatctacatgttttatcaaaaggtcggcgacaactcaatcgacagctggaaaaacgcgggccgtgtctttaaagacagcgataagttcgacgccaacgatccgatcctgaaagatcagacgcaagaatggtccggttctgcaacctttacatctgacggaaaaatccgtttattctacactgactattccggtaaacattacggcaaacaaagcctgacaacagcgcaggtaaatgtgtcaaaatctgatgacacactcaaaatcaacggagtggaagatcacaaaacgatttttgacggagacggaaaaacatatcagaacgttcagcagtttatcgatgaaggcaattatacatccggcgacaaccatacgctgagagaccctcactacgttgaagacaaaggccataaataccggggtcctttagagtccccatcgacgcatcaagccgagtttaaccctacttcttgtgtttcgtccttgggcacccttcaaggctttcccgcccccgcttggctcgctctcgcgcaccctgtgcaccctttgaaacacaagagcgggggaagcaaccggttaagcgctgctatttggggcataaaaaggaagccggccagag

SEQ ID NO: 118396 - DNA, 1347 bp, Homo sapiens
atgaaactcatggaaacacttaaccagtgcataaacgctggtcatgaaatgacgaaggctatcgccattgcacagtttaatgatgacagcccggaagcgaggaaaataacccggcgctggagaataggtgaagcagcggatttagttggggtttcttctcaggctatcagagatgccgagaaagcagggcgactaccgcacccggatatggaaattcgaggacgggttgagcaacgtgttggttatacaattgaacaaattaatcatatgcgtgatgtgtttggtacgcgattgcgacgtgctgaagacgtatttccaccggtgatcggggttgctgcccataaaggtggcgtttacaaaacctcagtttctgttcatcttgctcaggatctggctctgaaggggctacgtgttttgctcgtggaaggaggagcgactcaagctttcgggaaagaaaataaccaaaaagcatacaaagaaacgtccggcgtctctcatataacacgccatgatatgctgcagatccctaaacagcagcaaaacgaaaaataccaagtgcctcaattcgatcaatcaacgattaaaaatattgagtctgcaaaaggacttgatgtgtgggacagctggccgctgcaaaacgctgacggaacagtagctgaatacaacggctatcacgttgtgtttgctcttgcgggaagcccgaaagacgctgatgacacatcaatctacatgttttatcaaaaggtcggcgacaactcaatcgacagctggaaaaacgcgggccgtgtctttaaagacagcgataagttcgacgccaacgatccgatcctgaaagatcagacgcaagaatggtccggttctgcaacctttacatctgacggaaaaatccgtttattctacactgactattccggtaaacattacggcaaacaaagcctgacaacagcgcaggtaaatgtgtcaaaatctgatgacacactcaaaatcaacggagtggaagatcacaaaacgatttttgacggagacggaaaaacatatcagaacgttcagcaggtgaagcatagccgtcagcggatgtatctggtgccaccggttttttcacaactgaccgaacaacatcaggctgtcattgacgccatttttgccggtgatgctgacggggcgcgtaaagcaatgatggcgcaccttagttttgttcacaccaccatgaaacgattcgatgaagatcaggctcgccacgcacggattacccgcctgcccgggtttgctaggcccatcggggtcctggtgcaccaggtgactgtgaaggccactcacccttctcgggcttttttcaggattgtttga

SEQ ID NO: 118397 - DNA, 1716 bp, Homo sapiens
atggtgtattgtcgaaacacgggtggccgatatggaaaggcaactatagaaggttactaccagaaactctctaaggcttttgtggaactcaccaaacaggcttcttgcagtggagatgaatacagatcacttaaggttgactgtgcaaatggcataggggccctgaagctaagggaaatggaacactacttctcacagggcctgtcagttcagctgtttaatgatgggtccaagggcaaactcaatcatttatgtggagctgactttgtgaaaagtcatcagaaacctccacagggaggagcgactcaagccttcgcgaaagaaaataaccaaaaagcatacaaagaaacgtacggcgtctctcatattacacgccatgatatgctgcagatccctaaacagcagcaaaacgaaaaataccaagtgcctcaattcgatcaatcaacgattaaaaatattgagtctgcaaaaggacttgatgtgtgggacagctggccgctgcaaaacgctgacggaacagtagctgaatacaacggctatcacgttgtgtttgctcttgcgggaagcccgaaagacgctgatgacacatcaatctacatgttttatcaaaaggtcggcgacaactcaatcgacagctggaaaaacgcgggccgtgtctttaaagacagcgataagttcgacgccaacgatccgatcctgaaagatcatacgcaagaatggtccggttctgcaacctttacttctgacggaaaaatccgtttattctacactgactattccggtaaacattacggccaacatagcctgacaacagggcatgtatatgcgtctgaatctgacgacccacttgaattcgacggattggaagacgacacatcgattttcgacgggacacggagtaccatatcaggtgccctagggattgcacacctgattgtgatggccttggaaaaagaaggtttaccaaaagagaaagccatcaaaaagatatggctggttgattcaaaaggattaatagttaagggacgtgcttccttaacacaagagaaagagaagtttgcccatgaacatgaagaaatgaagaacctagaagccattgttcaagaaataaaaccaactgccctcataggagttgctgcaattggtggtgcattctcagaacaaattctcaaagatatggctgccttcaatgaacggcctattatttttgctttgagtaatccaactagcaaagcagaatgttctgcagagcagtgctacaaaataaccaagggacgtgcaatttttgccagtggcagtccttttgatccagtcactcttccaaatggacagaccctatatcctggccaaggcaacaattcctatgtgttccctggagttgctcttggtgttgtggcgtgtggattgaggcagatcacagataatattttcctcactactgctgaggttatagctcagcaagtgtcagataaacacttggaagagggtcggctttatcctcctttgaataccattagagatgtttctctgaaaattgcagaaaagattgtgaaagatgcataccaagaaaagacagccacagtttatcctgaaccgcaaaacaaagaagcatttgtccgctcccagatgtatagtactgattatgaccagattctacctgattgttattcttggcctgaagaggtgcagaaaatacagaccaaagttgaccagtag

SEQ ID NO: 118398 - DNA, 1919 bp, Homo sapiens
atctttcttcatccctttgttttgagcctatggttgtcattacatgtgatatggatcgcctgaagatagcagttggatcttgcttctttatccaacttgccactctatgcctattaagtggatcatttagcccatttacattcaaggtgattattgatataaaaagtgatgtaactgaacgtagcagcaccagctgtggtagattgcatgggtcagaggcacactgtcaggagagccttgatcagaccacatctggtggtgcagaaccagcatttaaacagggcagaaagagaagaaaaagaacatgtaattttgtgggaatgacaggaccctcagatgcagatctgtttgagtttgctggaggtctgctccagatgctgtttgcctgggtatcagcagtgggtagctgcagaacagtggattttggtgaaccgcaaatcctgccgcctgatcgttcctctggaagttttgtctcagaggagtacccggcctgttcaattcgggaggatcgaaacggcagatcgcaaaaaacagtacatacagaaggagacatgaacatgaacatcaaaaaaattgtaaaacaagccacagttctgacttttacgactgcacttctggcaggaggagcgactcaagccttcgcgaaagaaaataaccaaaaagcatacaaagaaacgtacggcgtctctcatattacacgccatgatatgctgcagatccctaaacagcagcaaaacgaaaaataccaagtgcctcaattcgatcaatcaacgattaaaaatattgagtctgcaaaaggacttgatgtgtgggacagctggccgctgcaaaacgctgacggaacagtagctgaatacaacggctatcacgttgtgtttgctcttgcgggaagcccgaaagacgctgatgacacatcaatctacatgttttatcaaaaggtcggggacaactcaatcgacagctggaaaaacgcgggccgtgtctttaaagacagcgataagttcgacgccaacgatccgatcctgaaagatcagacgcaagaatggtccggttctgcaacctttacatctgacggaaaaatccgtttattttaccctgactattccggtaaacattctgacaaccagagcgtgacaacagcgcaggtaaatgtgtcaaaatctgatgacacactcaaaatcaacggagtggaagatcacaaaacgatttttgacggagacggaaaaacatatcagaacgttcagcagtttatcgatgaaggcaattatacatccggcgacaaccatacgctgagagaccctcactacgttgaagacaaaggccataaataccttgtattcgaagccaacacgggaacagaaaacggataccaaggcgaagaatctttatttaacaaagcgtactacggcggcggcacgaacttcttccgtaaagaaagccagaagcttcagcagagcgctaaaaaacgcgatgctgagttagcgaacggcgccctcgtgccgcaagccaaaggcaacaatgtggttatcacaagctacatgacaaacagaggcttcttcgaggataaaaaggcaacatttgcgccaagcttcttaatgaacatcaaaggcaataaaacatccgttgtcaaaaacagcatcctggagcaaggacagctgacatggcttcaagtagcgaagcgagcacgaatgtgcggcggccaagcggtcggaagtgcttcgagaacggtgcgcataaaaatgcataacgcctatgcgctagcagacgccctagtgactgccgatgctgtcgaaatggaacaaattcccggagaagcccggcaagtaccggcattaaacaaagccctattgcctaacagcaattccaggggtgaccgggttgcccgaggaattgaccgaattaagccggccattgtttaa

SEQ ID NO: 118399 - DNA, 1239 bp, Homo sapiens
atggagccagttcctggagtcctttgtgctgtggtttcagatttccaggaattggaagtctatttaattatctttggacctgatggcatagttctgtccttcaggatccctgtaattctgaggagacggccacaattgattgcccttaaccgcctggccctgagaaaattgcgcaagccgtccaccttgtttgccccacaggccaaaaatcctgttggagaactggggactaaaaccgcttttggggatctaaagacccccagccttcgcgaagaaataaccaaaagcatacaaagaaacgtcggcgtctctcatattacacgccatgatatgctgcagatccctaaacagcagcaaaacgaaaaataccaagtgcctcaattcgatcaatcaacgattaaaaatattgagtctgcaaaaggacttgatgtgtgggacagctggccgctgcaaaacgctgacggaacagtagctgaatacaacggctatcacgttgtgtttgctcttgcgggaagcccgaaagacgctgatgacacatcaatctacatgttttatcaaaaggtcggcgacaactcaatcgacagctggaaaaacgcgggccgtgtctttaaagacagcgataagttcgacgccaacgatccgatcctgaaagatcagacgcaagaatggtccggttctgcaacctttacatctgacggaaaaatccgtttattctacactgactattccggtaaacattacggcaaacaaagcctgacaacagcgcaggtaaatgtgtcaaaatctgatgacacactcaaaatcaacggagtggaagatcacaaaacgatttttgacggagacggaaaaacatatcagaacgttcagcagtttatcgatgaaggcaattatacatccggcgacaaccatacgctgagagaccctcactacgttggaggaacaagttgggaaccaggggttttctcggtgtcttgtgtgtttttcggccaacaagaaggggtgatggttgagatgaattcctggacttttcctactggtttcaaggtggctgaatttgcctgtaccaaaaggcatcatgacagaacactacttcctataaacgctacacaggctcctgagattaataatgcggatctctacgataatgggagattttcccgactgttcgtcgcttctcagtggataacagccagcttctcttttaacagacaaaaacaggatgtttatcctctaccgtag

SEQ ID NO: 118400 - DNA, 1954 bp, Homo sapiens
atgaacatgaacatcaaaaaaattgtaaaacaagccacagttctgacttttacgactgcacttctggcaggaggagcgactcaagccttcgcgaaagaaaataaccaaaaagcatacaaagaaacgtacggcgtctctcatattacacgccatgatatgctgcagatccctaaacagcagcaaaacgaaaaataccaagtgcctcaattcgatcaatcaacgattaaaaatattgagtctgcaaaaggacttgatgtgtgggacagctggccgctgcaaaacgctgacggaacagtagctgaatacaacggctatcacgttgtgtttgctcttgcgggaagcccgaaagacgctgatgacacatcaatctacatgttttatcaaaaggtcggcgacaactcaatcgacagctggaaaaacgcgggccgtgtctttaaagacagcgataagttcgacgccaacgatccgatcctgaaagatcagacgcaagaatggtccggttctgcaacctttacatctgacggaaaaatccgtttattctacacgggatccctaaacagcagcaaaacggaaaaataccaagtgcctcatatcgatcaatcaacgattaaaaatattgagtctgcaaaaggacttgatgtgtgggacagctggccgctgcaaaacgctgacggaacagtagctgaatacaacggctatcacgttgtgtttgctcttgcgggaagcccgaaagacgctgatgacacatcaatctacatgttttatcaaaaggtcggcgacaactcaatcgacagctggaaaaacgcgggccgtgtctttaaagacagcgataagttcgacgccaacgatccgatcctgaaagatcagacgcaagaatggtccggttctgcaacctttacatctgacggaaaaatccgtttattctacactgactattccggtaaacattacggcaaacaaagcctgacaacagcgcaggtaaatgtgtcaaaatctgatgacacactcaaaatcaacggagtggaagatcacaaaacgatttttgacggagacggaaaaacatatcagaacgttcagcagtttatcgatgaaggcaattatacatccggcgacaaccatacgctgagagaccctcactacgttgaagacaaaggccataaataccttgtattccaagaccacacgggaacagaagagcacccccaaccgcaaggagcggcccaggactcagagcttcaccagcgccttcgccgaacggcgcgagtgcatccccaacgtacccgccgacaccaaactctccaaaatcaagaccctgcgcctggccaccagctacatcgcctacctcatggacctgctggccaaggacgaccagaatggcgaggcggaggccttcaaggcagagatcaagaagaccgacgtgaaagaggagaagaggaagaaggagctggcaagtaaatgcctggatttggagcaattaggagcctcagtggaacccacgggaaacctgagaactaagataaccaaggagaagcctaggcacacagggccacctgaagtcgtagtccctggctgctgccctcacagatcgagagcctacaaatccgacaaatatgcccacactttgacagtaaccgcctcccagcacgccccaccaccgccaacacacatggaggggtttgaacttttccaccttccggacctctgcagtccgtcgcaggacgcccaaaccacaggccggacacagatgaagccagaccacagcccccgccccagccaccgcgtgccgcaagccaaaggcaacaatgtggttatcacaagctacatgacaaacagaggcttcttcgaggataaaaaggcaacatttgcgccaagcttcttaatgaacatcaaaggcaataaaacatccgttgtcaaaaacagcatcctggagcaaggacagctgacagtcaactaa

SEQ ID NO: 118401 - DNA, 1032 bp, Homo sapiens
atgctggctctccctggggccttgtggcttgcatgcttcgatgaagaacactgccacactgaagaggcacatttcaaggaactgagagtgggcaacaactcaggagcccagctggcttcacctagtggatcccgcaccggggctgcaggtggagctgcctgccagtcccgtgccgtgcgcttgcactcctcagcccttgggtggtcgatgggactgggcgccgtggagcagggggtggtgctcgtcagggaggctggggcagcacaggagcccatggagtgggtaggaggctcaggcatggcgggctgcaggtcccgagccctgccccgcgggaaagcagctaaggtccggcgagaaatcgatcacagcgccggaggagcgactcaagccttcgcgaaagaaaataaccaaaaagcatacaaagaaacgtacggcgtctctcatattacacgccatgatatgctgcagatccctaaacagcagcaaaacgaaaaataccaagtgcctcaattcgatcaatcaacgattaaaaatattgagtctgcaaaaggacttgatgtgtgggacagctggccgctgcaaaacgctgacggaacagtagctgaatacaacggctatcacgttgtgtttgctcttgcgggaagcccgaaagacgctgatgacacatcaatctacatgttttatcaaaaggtcggcgacaactcaatcgacagctggaaaaacgcgggccgtgtctttaaagacagcgataaaaaaggaaggacccccgcggcgggcgtcggcatcatgagcgatcgtttagccctaacgtgttttgcctcgaaggtgaaagaggttcccccaagagctgatgtgtgtaaaggtgcgccagttcctgtgtcgcacgatgctacccctctctcagcccgccctgcgaagaaggacgcccgcttccacctgcgccaagactgtaaatggctttgcgacaagtgtgaaataagagaaagagttaatgtgcaggcaactaaaagccagaaaagagtttttagctga

SEQ ID NO: 118402 - DNA, 1251 bp, Homo sapiens
atgaaactcatggaaacacttaaccagtgcataaacgctggtcatgaaatgacgaaggctatcgccattgcacagtttaatgatgacagcccggaagcgaggaaaataacccggcgctggagaataggtgaagcagcggatttagttggggtttcttctcaggctatcagagatgccgagaaagcagggcgactaccgcacccggatatggaaattcgaggacgggttgagcaacgtgttggttatacaattgaacaaattaatcatatgcgtgatgtgtttggcttggctgtagaggatactacccaaaagcatacaaagaaacgtaccggcgtctctcatattacacgccatgatatgctgcagatccctaaacagcagcaaaacgaaaaataccaagtgcctcaattcgatcaatcaacgattaaaaatattgagtctgcaaaaggacttgatgtgtgggacagctggccgctgcaaaacgctgacggaacagtagctgaatacaacggctatcacgttgtgtttgctcttgcgggaagcccgaaagacgctgatgacacatcaatctacatgttttatcaaaaggtcggcgacaactcaatcgacagctggaaaaacgcgggccgtgtctttaaagacagcgataagttcgacgccaacgatccgatcctgaaagatcagacgcaagaatggtccggttctgcaacctttacatctgacggaaaaatccgtttattctacactgactattccggtaaacattacggcaaacaaagcctgacaacagcgcagcagctgctgcagctggtgcagtttcaagaggtggatacagattttgatttcccagaagaagataaaaaagaagaatttgaagagtgtttggaaaaattttttagtacagggcccgccagaccacctaccaaagaaaaagtcaaaagacgtgtccttattgaacctggaatgccactaaatcatatagagtactgtaaccatgaaatcatgggaaaaaatgtttactacaaacaccgttgggtggcagaacattacttccttcttatgcaatatgacgagctccaaaaaatctgttacaacgaatttgtgccatctgtaattttcttgagatataaaagtccaggggaagcagcagggacctgtcacctgaaacagaggcgatgggtgatgccggaagcagcagctcctgtgggaacaggctcaagatatcctctgacaggacagttatggacatga

SEQ ID NO: 118403 - DNA, 1014 bp, Homo sapiens
atgaattcaatacagatccctaaacagcagcaaaacgaaaaataccaagtgcctcaattcgatcaatcaacgattaaatatattgagtctccaaaagagcttgatgtatgggacagctggccgctgcaaaatgctgacggaacagtagctgaatacaacggctatcacgttgcgtttgctcttgcgggaacccgaaagacgctgatgacacatcaatctacatgttttatcaaaagatataattatagtaaggatcttttgaatagaccatcctgcattgggatggtcctgaaacctatgatgcgtatcgctgtaagaaacggaaaaagagaagacacacagagatacaagagagaaagccatgtgaagagggtagagactggtattattctgtcacaaaccaagcaacttctgacaccatcagaagctggaagaagcaaggcagcgattctccccgagaaccttcagaaggagcacgcccttgctaacatcttgacttcagacttggcctccagaactgatacaactcaaattcgccagtgcgagttatctagtattgttgtcctggtttccagcaaaggaacaactccacattcaaccggcgttgtgctgaagaggttgtttatgagtcgcaacaaccggccacctctgcccctttcccggatgatctggaagatgaagcttcctcggccgcggaaaacaaaacagcccctctgcagaatcaacatatcacatccatacacgatatgcaacatcaccaaccacgactcccgtcaagctggatcactcttcagacacggcatcctatcagttgaccacccttctgaagaggccttcttccccccaatcatgtctggtagcagcataattcgaatttgcgattccgactctaatctagccaaggtagaagcgaccctggctaacggcaaatcaaagcatcattcatcaccaaaccatgccaatgccccctacaagactaacaagtcaccccatgactattacagcataccatga

SEQ ID NO: 118404 - DNA, 2299 bp, Homo sapiens
atgccctactcgccctcttgtccttgctttgtcttcgtgggcgccgcgggatggtgtgctcctagcccctcggttcgttttgggcgatcgttgctcggtgtcgcctttgtcatttacagcttcctgagcctgtgtttccagtacctgggaggcgagggcgccatcatggctgagattcgtggaaagcccatcaacttcttcctgcgtctgtgctccgaggtgcccattttggaggacacgctgatgcgcatcctggtcatcgggctgtcccgggagctcccgctcgggcctgcggacgccatggagcttgctgaccacctggtgaagcgggcggctgccgtgcaggcggatgaaaccccggctctggcacgcacctctggggcgctccacaaagctgcgcttcagctgggtcctgggtccccgggaggctcggggacctgccttctccacatctgccgttgggaattccgcggatcctctccctatagaggagcgactcaagccttcgcgaaagaaaataaccaaaaagcatacaaagaagcgtgcggcgtctctcatattacacgccatgatatgctgcagatccctaaacagcagcaaaacgaaaaataccaagtgcctcaattcgatcaatcaacgattaaaaatattgagtctgcaaaaggacttgatgtgtgggacagctggccgctgcaaaacgctgacggaacagtagctgaatacaacggctatcacgttgtgtttgctcttgcgggaagcccgaaagacgctgatgacacatcaatctacatgttttatcaaaaggtcggcgacaactcaatcgacagctggaaaaacgcgggccgtgtctttaaagacagcgataagttcgacgccaacgatccgatcctgaaagacagacgcaagaatggtcccggtctgcaacctttacatctgacgggaaaaatccggttattctacactgactattcccgtaaacattacggcaaacaaagcctgaccacaacgcaagtcggctacaactcaatcgacagctggaaaaacgcgggccgtgtctttaaagacagcgataagttcgacgccaacgatccgatcctgaaagatcagacgcaagaatggtccggttctgcaacctttacatctgacggaaaaatccgtttattctacactgactattccggtaaacattacggcaaacaaagcctgacaacagcgcaggtaaatgtgtcaaaatctgatgacacactcaaaatcaacggagtggaagatcacaaaacgatttttgacggagacggaaaaacatatcagaacgttcagcagtttatcgatgaaggcaattatacatccggcgacaaccatacgctgagagaccctcactacgttgaagacaaaggccataaataccttgtattcgaagccaacacggggaacagaaaacggataccaaggcgaagaatctttatttaacaaagcgtactacggcggcggcacgaacttcttccgtaaagaaagccagaagcttcagcagagcgctaaaaaacgcgatgctgagttagcgaacggcgccctcggtagaggttggaacagtttggaggactcagaagaagacaggaaaatgtgggaaagtttggaactcactagagacttgctgaatggctttgaccaaaattctgataatgatatggacaatgaaatccaagctgaggtggtttcagatggagatgaggaacttcttgggagctggagtaaaggaggagcgactcaagccttcgcgaaagaaaataaccaaaaagcatacaaagaaacgtacggcgtctctcatattacacgccatgatatgctgcagatccctaaacagcagcaaaacgaaaaataccaagtgcctcaattcgatcaatcaacgattaaaaatattgagtctgcaaaaggacttgatgtgtgggacagctggccgctgcaaaacgctgacggaacagtagctgaatacaacggctatcacgttgtgtttgctcttgcgggaagcccgaaagacgctgatgacacatcaatctacatgttttatcaaaaggtcggcgacaactcaatcgacagctggaaaaacgcgggccgtgtctttaaagacagcgataagttcgacgccaacgatccgatcctgaaagatcagacgcaagagggattctttagagccccaccggcaggtttgtcaagccctacgcccttctttttcaatacatccctttattcaggtctcgcgcaagatgccacacaagggccctttgttccacggcaaggaaattaa

SEQ ID NO: 118405 - DNA, 2799 bp, Homo sapiens
atggccgtcctgcagggagccctggcccgatgcctgcggaggttggagctgtgtctgcaggggatgccttggagatgcctgtgtaggagaagggctcaggcaaggttgcctgctaaaggccagtgccacattggtacaaggtgtgccttgaggaaggacgaggaaaagcagcggaagatagggactgggctgtttgcccatgaacaaggctgccgatggaccagcatcgtggtggtggtgggctctcagctcttccttcacctggctgagttcactattgtgtctgagcccgggaccatgggaggctctgatgccagtttcctgaggctgggacccaaccgaagcctccacttagggatcaatcagggagggcttcctgtaggagttgatgccagagtgggccctggaggagcgactcaagccttcgcgaaagaaaataaccaaaaagcatacaaagaaacgtacggcgtctctcatattacacgccatgatatgctgcagatccctaaacagcagcaaaacgaaaaataccaagtgcctcaattcgatcaatcaacgattaaaaatattgagtctgcaaaaggacttgatgtgtgggacagctggccgctgcaaaacgctgacggaacagtagctgaatacaacggctatcacgttgtgtttgctcttgcgggaagcccgaaagacgctgatgacacatcaatctacatgttttatcaaaaggtcggcgacaactcaatcgacagctggaaaaacgcgggccgtgtctttaaagacagcgataagttcgacgccaacgatccgatcctgaaagatcagacgcaagaatggtccggttctgcaacctttacatctgacggaaaaatccgtttattctacactgactattccggtaaacattacggcaaacaaagcctgacaacagcgcaggtaaatgtgtcaaaatctgatgacacactcaaaatcaacggagtggaagatcacaaaacgatttttgacggagacggaaaaacatatcagaacgttcagcagtttatcgatgaaggcaattatacatccggcgacaaccatacgctgagagaccctcactacgttgaagacaaaggccataaataccttgtattcgaagccaacacgggaacagaaaacggataccaaggcgaagaatctttatttaacaaagcgtactacggcggcggcacgaacttcttccgtaaagaaagccagaagcttcagcagagcgctaaaaaacgcgatgctgagttagcgaacggcgccctcggatgctgcatcataccctgtattcatggattggtgcagagacttatagaaacagctctcaccaaaacctttaattctcccccaccttactcagataaactcctacttttagaaaaccaagcagaacagcagagtcaagacatgttaaagagtttgaagaggaagaattatgaaaatcaagagggggaagtagtaggaaacattgagttcctcttcaaagatccattgtcctctattttcaaagcctatcttccttgcctccttgcccctagttatggatgcagcagactgaagaaattcagacatcccgcaacctgcgattatcgcaaggtcaaggcaaagtccggtaatggggattcttctagagtccgcaaagacgagggaggagcgactcaagccttcgcgaaagaaaataaccaaaaagcatacaaagaaacgtacggcgtctctcatattacacgccatgatatgctgcagatccctaaacagcagcaaaacgaaaaataccaagtgcctcaattcgatcaatcaacgattaaaaatattgagtctgcaaaaggacttgatgtgtgggacagctggccgctgcaaaacgctgacggaacagtagctgaatacaacggctatcacgttgtgtttgctcttgcgggaagcccgaaagacgctgatgacacatcaatctacatgttttatcaaaaggtcggcgacaactcaatcgacagctggaaaaacgcgggccgtgtctttaaagacagcgataagttcgacgccaacgatccgatcctgaaagatcagacgcaagaatgtattgacagcgcgcctaacctgggtatcggcacgattaatgtcgtatgtgctgctgatgtgctgattgttcccacgcctgctgagttgtttgactacacctccgcactgcagtttttcgatatgcttcgtgatctgctcaagaacgttgatcttaaagggttcgagcctgatgtacgtattttgcttaccaaatacagcaatagtaatggctctcagtccccgtggatggaggagcaaattcgggatgcctggggaagcatggttctaaaaaatgttgtacgtgaaacggatgaagttggtaaagctgccccgatggtggattcgttaattgcgcgcgtaggagtaatggctcgcggtaatgccattactttgcctgtatgtggtcgggatgtgaagtttactcttgaagtgctccggggtgatagtgttgagaagacctctcgggaactgaaccggagccaagagatcggcgtgaagcccttgtcctgcggctcggcccagatctggcagcacggcaccagcctcatgaactacctgcgcatgggtaaggaaatgggccctacccggtgtgagaataaatctggacactcagcaatgtgggcagaaaggatcctcacatactgcagcaaccaggtaactctgtgcacagaccaagacagccactactgccccagatccttcccttactcacgttgttcctcctccttatga

SEQ ID NO: 118406 - DNA, 3534 bp, Homo sapiens
  misc_feature (1)...(3534): n = a,t,c or g
atgaaactcatggaaacacttaaccagtgcataaacgctggtcatgaaatgacgaaggctatcgccattgcacagtttaatgatgacagcccggaagcgaggaaaataacccggcgctggagaataggtgaagcagcggatttagttggggtttcttctcaggctatcagagatgccgagaaagcagggcgactaccgcacccggatatggaaattcgaggacgggttgagcaacgtgttggttatacaattgaacaaattaatcatatgcgtgatgtgtttggtacgcgattgcgacgtgctgaagacgtatttccaccggtgatcggggttgctgcccataaaggtggcgtttacaaaacctcagtttctgttcatcttgctcaggatctggctctgaaggggctacgtgttttgctcgtggaagtttctgttcatcttgctcaggatctggctctgaaggggctacgtgttttgctcgtggaaggtaacgacccccagggaacagcctcaatgtatcacggatgggtaccagatcttcatattcatgcagaagacactctcctgcctttctatcttggggaaaaggacgatgtcacttatgcaataaagcccacttgctggccggggcttgacattattccttcctgtctggctctgcaccgtattgaaactgagttaatgggcaaatttgatgaaggtaaactgcccaccgatccacacctgatgctccgactggccattgaaactgttgctcatgactatgatgtcatagttattgacagcgcgcctaacctgggtatcggcacgattaatgtcgtatgtgctgctgatgtgctgattgttcccacgcctgctgagttgtttgactacacctccgcactgcagtttttcgatatgcttcgtgatctgctcaagaacgttgatcttaaagggttcgagcctgatgtacgtattttgcttaccaaatacagcaatattgatggcctgctggcctgccggggctgccgggattttgccgatttcggaaccaccatcaaacaggattttcgcctgctggggcaaaccagcgtggaccgcttgctgcaactctctcagggccaggcggtgaagggcaatcagctgttgcccgtctcactggtgaaaagaaaaaccaccctggcgcccaatacgcaaaccgcctctccccgcgcgttggccgattcattaatgcagctggcacgacaggtttcccgactggaaagcgggcatctcaacctcgggtcgctgcgcagcgcgatggcgctgaccctgcacacccacggggattctactagagccgcaagtgcaggaggagcgactcgagccttcgcgaaagaatataaccaaaaagcatacaaagaaacgtacggcgtctctcatattacacgccatgatatgctgcagatccctaaacagcagcaaaacgaaaaataccgagtgcctcaattcgatcaatcaacgattaaaaatattgagtctgcaaaaggacttgatgtgtgggacagctggccgctgcaaaacgctgacggaacagtagctgaatacaacggctatcacgttgtgtttgctcttgcgggaagcccgaaagacgctgatgacacatcaatctacatgttttatcaaaaggtcggcgacaactcaatcgacagctggaaaaacgcgggccgtgtctttaaagacagcgataagttcgacgccaacgatccgatcctgaaagatcagacgcaagaatggtccggttctgcaacctttacatctgacggaaaaatccgtttattctacactgactattccggtaaacattacggcaaacaaagcctgacaacagcgcaggtaaatgtgtcaaaatctgatgacacactcaaaatcaacggagtggaagatcacaaaacgatttttgacggagacggaaaaacatatcagaacgttcagcagtttatcgatgaaggcaattatacacccggcgacaaccatacgctgagagaccctcactacgtgaagacaaaggccatgaggggatctnctacagtagacctggatgcatgcacgaaaggcgttctgacttttacgactgcacttctggcaggaggagcgaatcaagccttcgcgaaagaaaataccaaaaaagcatacaaagaaacgtacggcgtctctcatattacacgccatgatatgctgcagatccctaaccagcagcaaaacgaaaaataccaagtgcctcaattcgatcaatcaacgattaaaaatattgagtctgcaaaaggacttgatgtgtgggacagctggccgctgcaaaacgctgacggaacagtagctgaatacaacggctatcacgttgtgtttgctcttgcgggaagcccgaaagacgctgatgacacatcaatctacatgttttatcaaaaggtcggcgacaactcaatcgacagctggaaaaacgcgggccgtgtctttaaagacagcgataagttcgacgccaacgatccgatcctgaaagatcagacgcaagaatggtccggttctgcaacctttacatctgacggaaaaatccgtttattctacactgactattccggtaaacattacggcaaacaaagcctgacaacagcgcaggtaaatgtgtcaaaatctgatgacacactcaaaatcaacggagtggaagatcacaaaacgatttttgacggagacggaaaaacatatcagaacgttcagcagtttatcgatgaaggcaattatacatccggcgacaaccatacgctgagagaccctcactacgttgaagacaaaggccataaataccttgtatcgaagccggggcgcaaggtaaatgtgtcaaaatctgatgacacactcaaaatcaacgaagtggaagatcacaaaacgatttttgacggagacggaaaaacatatcagaacgttcagcagtttatcgatgaaggcaattatacatccggcgacaaccatacgctgagagaccctcactacgttgaagacaaaggccataaataccttgtattcgaagccaacacgggaacagaaaacggataccaaggcgaagaatctttatttaacaaagcgtactacggcggcggcacgaacttcttccgtaaagaaagccagaagcttcagcagagcgctaaaaaacgcgatgctgagttagcgaacggcgccctcggtatcatagagttaaataatgattacacattgaaaaaagtaatgaagccgctgatcacttcaaacacggtaactgatgaaatcgagcgcgcgaatgttttcaaaatgaacggcaaatggtacttgttcactgattcacgcggttcaaaaatgacgatcgatggtattaactcaaacgatatttacatgcttggttatgtatcaaactctttaaccggcccttacaagccgctgaacaaaacagggcttgtgctgcaaatgggtcttgatccaaacgatgtgacattcacttactctcacttcgcagtgccgcaagccaaaggcaacaaggggggtctttag

SEQ ID NO: 118407 - DNA, 3339 bp, Homo sapiens
  misc_feature (1)...(3339): n = a,t,c or g
atgaacatgaacatcaaaaaaattgtaaaacaagccacagttctgacttttacgactgcacttctggcaggaggagcgactcaagccttcgcgaaagaaaataaccaaaaagcatacaaagaaacgtacggcgtctctcatattacacgccatgatatgctgcagatccctaaacagcagcaaaacgaaaaataccaagtgcctcaattcgatcaatcaacgattaaaaatattgagtctgcaaaaggacttgatgtgtgggacagctggccgctgcaaaacgctgacggaacagtagctgaatacaacggctatcacgttgtgtttgctcttgcgggaagcccgaaagacgctgatgacacatcaatctacatgttttatcaaaaggtcggcgacaactcaatcgacagctggaaaaacgcgggccgtgtctttaaagacagcgataagttcgacgccaacgatccgatcctgaaagatcagacgcaagaantgacagctgggtatgtggtggaaagagcactgaaactgaaatcaagatatcagctgtttgatgtagcagaggagttacctgagcaactcaagtatgactttctcatgttctgggaccacggtcccactcgtatcgtcggtctgattattagtctgggaccacggtcccactcgtatcgtcggtctgataatcagactgggaccacggtcccactcgtatcgtcggcccgagccggcacgttaaaccggggactgaggttgaaacctgtttggtggactctaaagaacccccgtcggcgacactcatcgacgctggaaaacgcgggccgtgtctttaaagacagcgataagttcgacgccaacgatccgatcctgaaagatcagacgcaagaatggtccggttctgcaacctttacatctgacggaaaaatccgtttattctacactgactattccggtaaacattacggcaaacaaagcctgacaacagcgcaggtaaatgtgtcaaaatctgatgacacactcaaaatcaacggagtggaagatcacaaaacgatttttgacggagacggaaaaacatatcagaacgttcagcagtttatcgatgaaggcaattatacatccggcgacaaccatacgctgagagaccctcactacgttgaagacaaaggccataaataccttgtattcgaagccaacacgggaacagaaaacggataccaaggcgaagaatctttatttaacaaagcgtactacggcggcggcacgaacttcttccgtaaagaaagccagaagcttcagcagagcgctaaaaaacgcgatgctgagttagcgaacggcgccctcggtatcatagagttaaataatgattacacattgaaaaaagtaatgaagccgctgatcacttcaaacacgtgctcagcttcaccagacctgcccccagtattcagttggacttctgctgatgttacctctaagtgtgacaatctaaaaacttgtcacacttcacatggatctgtcatggcggaaacagcggttatcaatcacaagaaacgtaaaaatagcccgcgaatcgtccagtcaaacgacctcactgaggcggcatatagtctctcccgggatcaaaaacgtatgctggtttttgggcctactccccttcacccttgggggatgtcaccattgcttttcacgtggccaccctcctgtccgttggctttcgcgtggggagtgcctgctgcctctgcggcggtcacgtcgccccggagagcctctgagctctggctgcccacgatgggagtcctctggggggcgccggagccgtgccgggtccccgccgcaggggacagtaacgcggagtctgcctggccggcggaaagggggtgctggggaacacagccgcaccccactctgctcgggaaagccctgagatccccagaacgtacggccgtctctcatattacacgccatgatatgctgcagatccctaaacagcagcaaaacgaaaaataccaagtgcctcaattcgatcaatcaacgattaaaaatattgagtctgcaaaaggacttgatgtgtgggacagctggccgctgcaaaacgctgacggaacagtagctgaatacaacggctatcacgttgtgtttgctcttgcgggaagcccgaaagacgctgatgacacatcaatctacatgttttatcaaaaggtcggcgacaactcaatcgacagctggaaaaacgcgggccgtgtctttaaagacagcgataagttcgacgccaacgatccgatcctgaaagatcagacacaagaatggtccggttctgcaacctttacatctgacggaaaaatccgtttattctacactgactattccggtaaacattacggcaaacaaagcctgacaacagcgcacgtgaatgtgtcaaaatctgatgacacactcaaaatcaacggagtggaagatcacacaacgatttttgacggagacggagaaacatatcagaacgttcagcagtttatcgatgaaggcaattatacatccggcgacaaccatacgctgagagaccctcactacgttgaagacaaaggccataaataccttgtattcgaagccaacacgggaacagaaaacggattggactacccagcgcagaaatatttccagcaaattcattctgcaatcggcttgcataacgctgaccacgttcataagcacttgttgggcgataatcgttacccaatctggataatgcagccatctgctcatcatccagctcgccaaccagaacacgataatcactttcggctcgaaccctttaagatcaacgttcttgagcagatcacgaagcatatcgaaaaactgcagtgcggaggtgtagtcaaacaactcagcaggcgtgggaacaatcagcacatcagcagcacatacgacattaatcgtgccgatacccaggttaggcgcgctgtcaataactatgacatcatagtcatgagcaacagtttcaatggccagtcggagcatcagaaccggtttacgcagtttcggcttagtgaaacaaaagaaatcaccaatccgtatgccatgcgtttatacgaatccctgtgtcagtatcgtaagccggatggctcaggcatcgtctctctgaaaatcgactggatcatagagcgttaccagctgcctcaaagttaccagcgtatgcctgacttccgccgccgcttcctgcaggtctgtgttaatgagatcaacagcagaactccaatgcgcctctcatacattgagaaaaagaaaggccgccagacgactcatatcgtattttccttccgcgatatcacttccatgacgacaggatag

SEQ ID NO: 118408 - DNA, 1774 bp, Homo sapiens
atgaagcgtgcgcctgttattccaaaacatacgctcaatactcaaccggttgaagatacttcgttatcgacaccagctgccccgatggtggattcgttaattgcgcgcgtaggagtaatggctcgcggtaatgccattactttgcctgtatgtggtcgggatgtgaagtttactcttgaagtgctccggggtgatagtgttgagaagacctctcgggtatggtcaggtaatgaacgtgaccaggagctgcttactgaggacgcactggatgatctcatcccttcttttctactgactggtcaacagacaccggcgttcggtcgaagagtatctggtgtcatagaaattgccgatgggagtcgccgtcgtaaagctgctgcacttaccgaaagtgattatcgtgttctggttggcgagctggatgatgagcagatggctgcattatccagattgggaggagcgactcaagccttcgcgaaagaaaataaccaaaaaggcatacaaagaaacgtacggcgtctctcatattacacgccatgatatgctgcagatccctaaacagcagcaaaacgaaaaataccaagtgcctcaattcgatcaatcaacgattaaaaatattgagtctgcaaaaggacttgatgtgtgggacagctggccgctgcaaaacgctgacggaacagtagctgaatacaacggctatcacgttgtgtttgctcttgcgggaagcccgaaagacgctgatgacacatcaatctacatgttttatcaaaaggtcggcgacaactcaatcgacagctggaaaaacgcgggccgtgtctttaaagacagcgataagttcgacgccaacgatccgatcctgaaagatcagacgcaagaatggtccggttctgcaacctttacatctgacggaaaaatccgtttattctacactgactattccggtaaacattacggcaaacaaagcctgacaacagcgcaggtaaatgtgtcaaaatctgatgacacactcaaaatcaacggagtggaagatcacaaaacgatttttgacggagacggaaaaacatatcagaacgttcagcagtttatcgatggttatctcctagagccggacggcggggctttgcagaactttcagcggtataccggcatacagcatgtgcatcgcataggaatggcggaacgtatgtggtgtgaccggaacagagaacgtcacaccgtcagcagcagcggcggcaaccgcctccccaatccaggtcctgaccgttctgtccgtcacttcccagatccgcgctttctctgtccttcctgtgcgacggttacgccgctccatgagcttatcgcgaataaatacctgtcggggaaaattggagctaagaaactgcggaagcttttgataaaacatgtagattgatgtgtcatcagcgtctttcgggcttcccgcaagagcaaacacaacgtgatagccgttgtattcagctactgttccgtcagcgttttgcagcggccagctgtcccacacatcaagtccttttgcagactcaatatttttaatcgttgattgatcgaattgaggcacttggtatttttcgttttgctgctgtttagggatctgcagcatatcatggcgtgtaatatgagagacgccgtacgtttctttgtatgctttttggttattttctttcgcgaaggcttgagtcgctcctcctgccagaagtgcagtcgtaaaagtcagaactgtggcttgttttacaatttttttgatgttcatgttcat

SEQ ID NO: 118409 - DNA, 2319 bp, Homo sapiens
atgaacatcaaaaaaattgtaaaacaagccacagttctgacttttacgactgcacttctggcaggaggagcgactcaagccttcgcgaaagaaaataaccaaaaagcatacaaagaaacgtacggcgtctctcatattacacgccatgatatgctgcagatccctaaacagcagcaaaacgaaaaataccaagtgcctcaattcgatcaatcaacgattaaaaatattgagtctgcaaaaggacttgatgtgtgggacagctggccgctgcaaaacgctgacggaacagtagctgaatacaacggctatcacgttgtgtttgctcttgcgggaagcccgaaagacgctgatgacacatcaatctacatgttttatcaaaaggtcggcgacaactcaatcgacagctggaaaaacgcgggccgtgtctttaaagacagcgataagttcgacgccaacgatccgatcctgaaagatcagacgcaagaatggtccggttctgctacctttacatctgacggaaaaatccgtttattctacactgactatttcggtaaacattacgggcaacaaaggctgacaacagcgcagggagtggagcaactgctgttagtcaagcagcttattgtgccccctaaaaaggagaaagtggccatcaatcggatataccttgaggaatggtccaacctagcatggatgaacctccggtttttcgatatgcttcgtgatctgctcaagaacgttgatcttaaagggttcgagcctgatgtacgtattttgcttaccaaatacagcaatagtaatggctctcagtccccgtggatggaggagcaaattcgggatgcctggggaagcatggttctaaaaaatgttgtacgtgaaacggatgaagttggtaaagctgccccgatggtggattcgttaattgcgcgcgtaggagtaatggctcgcggtaatgccattactttgcctgtatgtggtcgggatgtgaagtttactcttgaagtgctccggggtgatagtgttgagaagacctctcgggtatggtcaggtaatgaacgtgaccaggagctgcttactgaggacgcactggatgatctcatcccttcttttctactgactggtcaacagacaccggcgttcggtcgaagagtatctggtgtcatagaaattgccgatgggagtcgccgtcgtaaagctgctgcacttaccgaaagtgattatcgtgttctggtaggcgagctggatgatgagcagatggctgcattatccagattgggtaacgattatcgcccaacaagtgcttatgaactttgcctgaataagcatgtgatccgggctctcatcaaacagctgaaggagaaaaatgagggtcaaagcatggagactttgacggggctacgaatggctcttaactcctgggctgctgtctctaaagacaaggcccctgattttgaagatcacagaatttgctgctctggtatttatgagtattcttcagagaaagaagggaaccggaacctcctgctgcccaaattcaaaccatggaaatatgttatcttcccgtcaattcgggaggatcgaaacggcagatcgcaaaaaacagtacatacagaaggagacatgaacatgaacatcaaaaaaattgtaaaacaagccacagttctgacttttacgactgcacttctggcaggaggagcgactcaagccttcgcgaaagaaaataaccaaaaagcatacaaagaaacgtacggcgtctctcatattacacgccatgatatgctgcagatccctaaacagcagcaaaacgaaaaataccaagtgcctcaattcgatcaatcaacgattaaaaatattgagtctgcaaaaggacttgatgtgtgggacagctggccgctgcaaaacgctgacggaacagtagctgaatacaacggctatcacgttgtgtttgctcttgcgggaagcccgaaagacgctgatgacacatcaatctacatgttttatcaaaaggtcggcgacaactcaatcgacagctggaaaaacgcgggccgtgtctttaaagacagcgataagttcgacgccaacgatccgatcctgaaagatcagacgcaagaatggtccggttctgcaacctttacatctgacggaaaaatccgtttattctacactgactatgaattccaccacatgctctgctggcagataagccaaaaccaatccatgtcctacttcttgaccatatcctgcctgtccctggcaggaaaattcagccttcttaaggggttgagcccatcaaaagccagctgcgggacagaaaagtga

SEQ ID NO: 118410 - DNA, 2524 bp, Homo sapiens
atgtacttgccgagtgagaaccgaacacagacgctctcgcccttgcctccaaacccagtatctcgctacagctggtgcattggaagttatgagcacaaacagatgctgcagagaaatctgtttctattgctcaactgttccaagcatgtctcagtatttttagctctggggatgttctggaggagcgactcaagccttcgcgaaagaaaataaccaaaaagcatacaaagaaacgtacggcgtctctcatattacacgccatgatatgctgcagatccctaaacagcagcaaaacgaaaaataccaagtgcctcaattcgatcaatcaacgattaaaaatattgagtctgcaaaaggacttgatgtgtgggacagctggccgctgcaaaacgctgacggaacagtagctgaatacaacggctatcacgttgtgtttgctcttgcgggaagcccgaaagacgctgatgacacatcaatctacatgttttatcaaaaggtcggcgacaactcaatcgacagctggaaaaacgcgggccgtgtctttaaagacagcgataagttcgacgccaacgatccgatcctgaaagatcagacgcaagaatggtccggttctgcaacctttacatctgacggaaaaatccgtttattctacactgactattccggtaaacattacggcaaacaaagcctgacaacagcgcaagtaaatgtgtcaaaatctaatgacacactcaaaatcaacggagtgggaaaatacaaaacgatttttgacggggacgggaaaacatatcagaccgttcagcagtttatcgatgaagggaattatacatccggcggacaccatacgcttgaaagacccctcctacaatcccccactggatctgtctggcggaaacagcggttatcaatcacaagaaacgtaaaaatagcccgcgaatcgtccagtcaaacgacctcactgaggcggcatatagtctctcccgggatcaaaaacgtatgctggatctgttcgttgaccagatcagaaaatctgatggcaccctacaggaacatgacggtatctgcgagatccatgttgctaaatatgctgaaatattcggattgacctctgcggaagccagtaaggatatacggcaggcattgaagagtttcgcggggaaggaagtggttttttatcgccctgaagaggatgccggcgatgaaaaaggctatgaatcttttccttggtttatcaaacgtgcgcacagtccatccagagggctttacagtgtacatatcaacccatatctcattcccttctttatcgggttacagaaccggtttacgcagtttcggcttagtgaaacaaaagaaatcaccaatccgtatgccatgcgtttatacgaatccctgtgtcagtatcgtaagccggatggctcaagcatcgtctctctgaaaatcgactggatcatagagcgttaccagctgcctcaaagttaccagcgtatgcctgacttccggcgccgcttactgcaggtctgtgttaatgagatcaacagcagaactccaatgcgcctctcatacattgagaaaagaaggccggcagagactatatcggattttcttcgcgaatcccttcctgcaaaggatatctgagtcaattcgggaggatcgaaacggcagatcgcaaaaaacagtacatacagaaggagacatgaacatgaacatcaaaaaaattgtaaaacaagccacagttctgacttttacgactgcacttctggcaggaggagcgactcaagccttcgcgaaagaaaataaccaaaaagcatacaaagaaacgtacggcgtctctcatattacacgccatgatatgctgcagatccctaaacagcagcaaaacgaaaaataccaagtgcctcaattcgatcaatcaacgattaaaaatattgagtctgcaaaaggacttgatgtgtgggacagctggccgctgcaaaacgctgacggaacagtagctgaatacaacggctatcacgttgtgtttgctcttgcgggaagcccgaaagacgctgatgacacatcaatctacatgttttatcaaaaggtcggcgacaactcaatcgacagctggataaacgcgggccgtgtctttaaagacagcgataagttcgacgccaaccatccgatcctgaaagatcagacgcaagaatgtcaggcaccgtgtatgaaatctaacaatgcgctcatcgtcatcctcggcaccgtcaccctggatgctgtaggcataggcttggttatgccggtactgccgggcctcttgcgggatatcgtccattccgacagcatcgccagtcactatggcgtgctgctagcgctatatgcgttgatgcaatttctatgcgcacccgttctcggagcactgtccgaccgctttggccgccgcccagtcctgctcgcttcgctacttggagccactatcgactacgcgatcatggcgaccacacccgtcctgtggatctacccactagtcaattcaccatcttgttga

SEQ ID NO: 118411 - DNA, 3118 bp, Homo sapiens
atgaacatgaacatcaaaaaaattgtaaaacaagccacagttctgacttttacgactgcacttctggcaggaggagcgactcaagccttcgcgaaagaaaataaccaaaaagcatacaaagaaacgtacggcgtctctcatattacacgccatgatatgctgcagatccctaaacagcagcaaaacgaaaaataccaagtgcctcaattcgatcaatcaacgattaaaaatattgagtctgcaaaaggacttgatgtgtgggacagctggccgctgcaaaacgctgacggaacagtagctgaatacaacggctatcacgttgtgtttgctcttgcgggaagcccgaaagacgctgatgacacatcaatctacatgttttatcaaaaggtcggcgacaactcaatcgacagctggaaaaacgcgggccgtgtctttaaagacagcgataagaccccactcaatcgacgctggaaaaacgcgggccgtgtctttaaagacagcgataagttcgacgccaacgatccgatcctgaaagatcagacgcaagaatggtccggttctgcaacctttacatctgacggaaaaatccgtttattctacactgactattccggtaaacattacggcaaacaaagcctgacaacagcgcaggtaaatgtgtcaaaatctgatgacacactcaaaatcaacggagtggaagatcacaaaacgatttttgacggagacggaaaaacatatcagaacgttcagcagtttatcgatgaaggcaattatacatccggcgacaaccatacgctgagagaccctcactacgttgaagacaaaggccataaataccttgtattcgaagccaacacgggaacagaaaacggataccaaggcgaagaatctttatttaacaaagcgtactacggcggcggcacgaacttcttccgtaaagaaagccagaagcttcagcagagcgctaaaaaacgcgatgctgagttagcgaacggcgccctcggtatcatagagttaaataatgattacacattgaaaaaagtaatgaagccgctgatcacttcaaacacgagcttgacggggaaagcccgccaaccgtgcgaagaaagaagggaaaaagacgaaggaagcggcgctagggcgctggcagtgttagcggtacacctgcacaaaacacaaaccagcgcgacgaggagcgactcaagccttcgcgaaagaaaataaccaaaaagcatacaaagaaacgtacggcgtctctcatattacacgccatgatatgctgcagatccctaaacagcagcaaaacgaaaaataccaagtgcctcaattcgatcaatcaacgattaaaaatattgagtctgcaaaaggacttgatgtgtgggacagctggccgctgcaaaacgctgacggaacagtagctgaatacaacggctatcacgttgtgtttgctcttgcgggaagcccgaaagacgctgatgacacatcaatctacatgttttatcaaaaggtcggcgacaactcaatcgacagctggaaaaacgcgggccgtgtctttaaagacagcgataagttcgacgccaacgatccgatcctgaaagatcagacgcaagaatggtccggttctgcaacctttacatctgacggaaaaatccgtttattctacactgactattccggtaaacattacggcaaacaaagcctgacaacagcgcaggtaaatgtgtcaaaatctgatgacacactcaaaatcaacggagtggaagatcacaaaacgatttttgacggagacggaaaaacatatcagaacgttcagcagtttatcgatgaaggcaattatacatccggcgacaaccatacgctggagagacccctcactacgttgaaaacaaaggccataaataccttggattcgaaaccaacacgggaacagaaaacggataccaaggcgaagaatctttatttaacaaagcgtactacggcggcggcacgaacttcttccgtaaagaaagccagaagcttcagcagagcgctaaaaaacgcgatgctgagttagcgaacggcgccctcggtatcatagagttaaataatgattacacattgaaaaaagtaatgaagccgctgatcacttcaaacacggtaactgatgaaatcgagcgcgcgaatgttttcaaaatgaacggcaaatggtacttgttcactgattcacgcggttcaaaaatgacgatcgatggtattaactcaaacgatatttacatgcttggttctgatgaatcccctaatgattttggtaatcgtcacctccacaaagagcgactcgctgtataccgttggcatgctagctttatctgttcgggcaatacgatgcccattgtacttgttgactggtctgatattcgtgagcaaaaacgacttatggtattgcgagcttcagtcgcactacacggtcgttctgttactctttatgagaaagcgttcccgctttcagagcaatgttcaaagaaagctcatgaccaatttctagccgaccttgcgagcattctaccgagtaacaccacaccgctcattgtcagtgatgctggctttaaagtgccatggtataaatccgttgagaagctgggttggtactggttaagtcgagtaagaggaaaagtacaatatgcagacctaggagcggaaaactggaaacctatcagcaacttacatgatatgtcatctagtcactcaaagactttaggctataagaggctgactaaaagcaatccaatctcatgccaaattctattgtataaatctcgctctaaaggccgaaaaaatcagcgctcgacacggactcattgtcaccacccgtcacctaaaatctactcagcgtcggcaaaggagccatgggttctagcaactaacttacctgttgaaattcgaacacccaaacaacttgttaatatctattcgaagcgaatgcagattgaagaaaccttccgagacttgaaaagtcctgcctacggactaggcctacgccatagccgaacgagcagctcagagcgttttgatatcatgctgctaatcgccctgatgcttcaactaacatgttggcttgcgggcgttcatgctcagaaacaag

SEQ ID NO: 118412 - DNA, 1329 bp, Homo sapiens
atgatcttcttcgtcttggtcatctttgtgggttctttctatctggtgaacttgatcttggctgtggtggccatggcttatgaagaacagaatcaggcaacactggaggaggcagaacaaaaagaggctgaatttaaagcaatgttggagcaacttaagaagcaacaggaagaggcacagtcaattcggaggtatcgaaacggcagatgccaaaaaccagtacatacagaaggagacatgaacatgaacatcaaaaaaattgtaaaacaagccacagttctgacttttacgactgcacttctggcaggaggagcgactcaagccttcgcgaaagaaaataaccaaaaagcatacaaagaaacgtacggcgtctctcatattacacgccatgatatgctgcagatccctaaacagcagcaaaacgaaaaataccaagtgcctcaattcgatcaatcaacgattaaaaatattgagtctgcaaaaggacttgatgtgtgggacagctggccgctgcaaaacgctgacggaacagtagctgaatacaacggctatcacgttgtgtttgctcttgcgggaagcccgaaagacgctgatgacacatcaatctacatgttttatcaaaaggtcggcgacaactcaatcgacagctggaaaaacgcgggccgtgtctttaaagacagcgataagttcgacgccaacgatccgatcctgaaagatcagacgcaagaatggtccggttctgcaacctttacatctgacggaaaaatccgtttattctacactgactattccggtaaacattacggcaaacaaagcctgacaacagcgcagacccaacaccaggtcgtgtgggtgacaaagtccggtggagtcaaaggattgagaaaaagacagtttgagagagaaatgtgggcatcagggggccattgcgattgtggaggctgtgaaggccctgagctctgggagtccacgttatttattggtaattcaacaaagaaacatatggcaaggacagagaaagcgcggatctgggaagtgacggacagaacgggcatgacctggattggggaggcgggtgccgccgctgctgctgacggtgtgacgttctctgttccggtcacaccacatacgttccgccattcctatgcgatgcacatgctgtatgccggtataccgctgaaaggtctgcaaagcctgatgggacataactccatcagttcaacggaagtctacacgaaggtttttgcgctggatgtggctgcccggcaccgtgtgcaatttgcgatgcccgagtctgatgctgttgcgatgctgaaacaattatcctga

SEQ ID NO: 118413 - DNA, 4390 bp, Homo sapiens
atgaacatgaacatcaaaaaaattgtaaaacaagccacagttctgacttttacgactgcacttctggcaggaggagcgactcaagccttcgcgaaagaaaataaccaaaaagcatacaaagaaacgtacggcgtctctcatattacacgccatgatatgctgcagatccctaaacagcagcaaaacgaaaaataccaagtgcctcaattcgatcaatcaacgattaaaaatattgagtctgcaaaaggacttgatgtgtgggacagctggccgctgcaaaacgctgacggaacagtagctgaatacaacggctatcacgttgtgtttgctcttgcgggaagcccgaaagacgctgatgacacatcaatctacatgttttatcaaaagggattttgccgatttcggaaccaccatcaaacaggattttcgcctgctggggcaaaccagcgtggaccgcttgctgcaactctctcagggccaggcggtgaagggcaatcagctgttgcccgtctcactggtgaaaagaaaaaccaccctggcgcccaatacgcaaaccgcctctccccgcgcgttggccgattcattaatgcagctggcacgacaggtttcccgactggaaagcgggcagtgagcgcaacgcaattaataaccagtgccaaaagagaaaagaagaagaggggacagacaagaacaccaacaaccatgcaggaacaccgagggcacggccctgagggtgtgggccgcacgggatcaaactctttaaccggccctgacgagccgctgaacaaaacagggcttgtgctgcaaatgggtcttgatccaaacgatgtgacaaacaattactctcacttcgcagtgccgcaagccaaaggcaacaataaaaaaatcacaagaaacatgacaaacagaggcttcttcgaggataaaaaggcaacatttgcgccaagcttcttaatgaacatcaaaggcaataaaacatccgttgtcaaaaacagcatcctggagcaaaacactggggttgggggcggggtgccggagaggggggccaacggccctgaaaagacgggtgattccgcccctgggccgtgggaagaccgcggttctttgaatagtggactccttgttccagagactggacaaaaccaccgaaccctatcccggggctattctgtggaaataataaggattatgcccgatttcggaaccaccatcaaacaggattttcgcctgcgggggcaaaccagcgtggaccgcttgctgcaactctctcagggccaggcggtgaagggcaatcagctgttgcccgtctcactggtgaaaagaaaaaccaccctggcgcccaatacgcaaaccgcctctccccgcgcgttggccgattcattaatgcagctggcacgacaggtttcccgactggaaagcgggcaggattttgccgatttcggaaccaccatcaaacaggattttcgcctgctggggcaaaccagcgtggaccgcttgctgcaactctctcagggccaggcggtgaagggcaatcagctgttgcccgtctcactggtgaaaagaaaaaccaccctggcgcccaatacgcaaaccgcctctccccgcgcgttggccgattcattaatgcagctggcacgacaggtttcccgactggaaagcgggcacccgagggggagagggaccgccaaaaaaacactgaaggaaagtgagggccagaggagaggttgctcacaacacaagagccaacagcccaaccgggagagttccaaaaaggagaaaaaagcaagggattttgccgatttcggaaccaccatcaaacaggattttcgcctgctggggcaaaccagcgtggaccgcttgctgcaactctctcagggccaggcggtgaagggcaatcagctgttgcccgtctcactggtgaaaagaaaaaccaccctggcgcccaatacgcaaaccgcctctccccgcgcgttggccgattcattaatgcagctggcacgacaggtttcccgactggaaagcgggcagtgagcgcaacgcaattaatacactgttctgtatgtgaactcatttactccttagaacagctctataaggatggtcttactatgtgccctgctttgcagatctggaatctgaggcaaggtcacaccactagattttgccgatttcggaaccaccatcaaacaggattttcgcctgctggggcaaaccagcgtggaccgcttgctgcaactctctcagggccaggcggtgaagggcaatcagctgttgcccgtctcactggtgaaaagaaaaaccaccctggcgcccaatacgcaaaccgcctctccccgcgcgttggccgattcattaatgcagctggcacgacaggtttcccgactggaaagcgggcagtgagcgcaacgcaattaatggattttgccgatttcggaaccaccatcaaacaggattttcgcctgctggggcaaaccagcgtggaccgcttgctgcaactctctcagggccaggcggtgaagggcaatcagctgttgcccgtctcactggtgaaaagaaaaaccaccctggcgcccaatacgcaaaccgcctctccccgcgcgttggccgattcattaatgcagctggcacgacaggtttcccgactggaaagcgggcagctgtctgcaaagggccattcccaacttcaacagatccctaaacagcagcaaaacgaaaaataccaagtgcctcaattcgatcaatcaacgattaaaaatattgagtctgcaaaaggacttgatgtgtgggacagctggccgctgcaaaacgctgacggaacagtagctgaatacaacggctatcacgttgtgtttgctcttgcgggaagcccgaaagacgctgatgacacatcaatctacatgttttatcaaaaggtcggcgacaactcaatcgacagctggaaaaacgcgggccgtgtctttaaagacagcgataagttcgacgccaacgatccgatcctgaaagatcagacgcaagaatggtccggttctgcaacctttacatctgacggaaaaatccgtttattctacactgactattccggtaaacattacggcaaacaaagcctgacaacagcgcaggtaaatgtgtcaaaatctgatgacacactcaaaatcaacggagtggaagatcacaaaacgatttttgacggagacggaaaaacatatcagaacgttcagcagtttatcgatgaaggcaattatacatccggcgacaaccatacgctgagagaccctcactacgttgaagacaaaggccataaataccttgtattcgaagccaacacgggaacagaaaacggataccaaggcgaagaatctttatttaacaaagcgtactacggcggcggcacgaacttcttccgtaaagtaagccagaagcttcagcagagcgctaaaaaacgcgatgctgagttagcgaacggcgccctcggtatcatagagttaaataatgattacacattgaaaaaagtaatgaagccgctgatcacttcaaacacgatccctaaccagcagcaaaacgaaaaataccaagtgcctcaattcgatcaatcaacgattaaaatatttgagtctgcaaaaggacttgatgtgtgggacagctggccgctgcaaaacgctgacggaacagtagctgaatacaacggctatcacgttgtgtttgctcttgcgggaagcccgaaagacgctgatgacacatcaatctacatgttttatcaaaaggtcggcgacaactcaatcgacagctggaaaaacgcgggccgtgtctttaaagacagcgataagttcgacgccaacgatccgatcctgaaagatcagacgcaagaatggtccggttctgcaacctttacatctgacggaaaaatccgtttattctacactgactattccggtaaacattacggcaaacaaagcctgacaacagcgcaggtaaatgtgtcaaaatctgatgacacactcaaaatcaacggagtggaagatcacaaaacgatttttgacggagacggaaaaacatatcagaacgttcagcagtttatcgatgaaggcaattatacatccggcgacaaccatacgctgagagaccctcactacgttgaagacaaaggccataaataccttgtattcgaagccaacacgggaacagaaaacggataccaaggcgaagaatctttatttaacaagcccatagatacagtgcctgttccagtggaggtggcggagggtgcaatggactccatgagagtccttagctttggtggcttaatgctctatttttgtgctgattggcctcctgccagtaggtggtgttttccagaaaccgtcagctgcagtagtgtggagagggaccgacg

SEQ ID NO: 118414 - DNA, 7271 bp, Homo sapiens
  misc_feature (1)...(7271): n = a,t,c or g
atgaacatgaacatcaaaaaaattgtaaaacaagccacagttctgacttttacgactgcacttctggcaggaggagcgactcaagccttcgcgaaagaaaataaccaaaaagcatacaaagaaacgtacggcgtctctcatattacacgccatgatatgctgcagatccctaaacagcagcaaaacgaaaaataccaagtgcctcaattcgatcaatcaacgattaaaaatattgagtctgcaaaaggacttgatgtgtgggacagctggccgctgcaaaacgctgacggaacagtagctgaatacaacggctatcacgttgtgtttgctcttgcgggaagcccgaaagacgctgatgacacatcaatctacatgttttatcanaagataatgaagcgtgcgcctgttattccaaaacatacgctcaatactcaaccggttgaagatacttcgttatcgacaccagctgccccgatggtggattcgttaattgcgcgcgtaggagtaatggctcgcggtaatgccattactttgcctgtatgtggtcgggatgtgaagtttactcttgaagtgctccggggtgatagtgttgagaagacctctcgggtatggtcaggtaatgaacgtgaccaggagctgcttactgaggacgcactggatgatctcatcccttcttttctactgactggtcaacagacaccggcgttcggtcgaagagtatctggtgtcatagaaattgccgatgggagtcgccgtcgtaaagctgctgcacttaccgaaagtgattatcgtgttctggttggcgagctggatgatgagcagatggctgcattatccagattgggtaacgattatcgcccaacaagtgcttatgaacgtggtcagcgttatgcaagccgattgcagaatgaatttgctggaaatatttctgcgctggctgatgcggaaaatatttcacgtaagattatttacccgctgtatcaacaccgccaaattgcctaaatcagttggtgctcttttttctcaccccggtgaaactatctgcccgggcaggtgcgactctaaagaaccccctcttgagagcgactcagccttcgcgaagaaaataccaaaaacatacaaagaaacgtacggcgtctctcatattacacgccatgatatgctgcagatccctaaacagcagcaaaacgaaaaataccaagtgcctcaattcgatcaatcaacgattaaaaatattgagtctgcaaaaggacttgatgtgtgggacagctggccgctgcaaaacgctgacggaacagtagctgaatacaacggctatcacgttgtgtttgctcttgcgggaagcccgaaagacgctgatgacacatcaatctacatgttttatcaaaaggtcggcgacaactcaatcgacagctggaaaaacgcgggccgtgtctttaaagacagcgataagttcgacgccaacgatccgatcctgaaagatcagacgcaagaatggtccggttctgcaacctttacatctgacggaaaaatccgtttattctacactgactattccggtaaacattacggcaaacaaagcctgacaacagcgcagtttttcgtgtcaggaattcctcgctttgtccacaacccctggcacatagcagtgttggaagttctggccagggcaattaggcaggagaaggaaataaagggtattcagttaggaaaagaggaagtcaaattgtccctgtttgcagatgacatgattgtatatctagaaaaccccattgtctcagcccaaaatctccttaagctgataagcaacttcagcaaagtctcaggatacaaaatcaatgtacaaaaatcacaagcattcttatacaccaacaacagacaaacagagaaccaaatcatgagtgaactcccattcacaattgcttcaaagagaataaaatacctaggaatccaacttacaagggatgtgaaggacctcttcaaggagaactacaaaccactgctcaaggaaataaaagaggatacaaacaaatggaagaacattccatgctcatgggtaggaagaatcaatatcgtgaaaatggccatactgcccaagggaagcataggtttctgcctgcctgcagagtttaggcagaagtgggaccactgggctggaagcactagcaatgtgacccatctggccacaggaggtggaatgagtgaagtttcctgccctgccatctggtgcttccagtacaaaaggtggctgtgtaccttgacaaattcaggtagaagaaagactgctcagctggaagctctagcaagcataaacttcctggctaccagaggcagaggaggagcgactcaagccttcgcgaaagaaaataaccaaaaagcatacaaagaaacgtacggcgtctctcatattacacgccatgatatgctgcagatccctaaacagcagcaaaacgaaaaataccaagtgcctcaattcgatcaatcaacgattaaaaatattgagtctgcaaaaggacttgatgtgtgggacagctggccgctgcaaaacgctgacggaacagtagctgaatacaacggctatcacgttgtgtttgctcttgcgggaagcccgaaagacgctgatgacacatcaatctacatgttttatcaaaaggtcggcgacaactcaatcgacagctggaaaaacgcgggccgtgtctttaaagacagcgataagttcgacgccaacgatccgatcctgaaagatcagacgcaagaatggtccggttctgcaacctttacatctgacggaaaaatccgtttattctacactgactattccggtaaacattacggcaaacaaagcctgacaacagcgcagaccgttcagctggatattacggcctttttaaagaccgtaaagaaaaataagcacaagttttatccggcctttattcacattcttgcccgcctgatgaatgctcatccggagttccgtatggcaatgaaagacgtctgggaccacgatcccactcgtgttgtcggtctgattatcggtctgggaccacggtcccacttgtattgtcgatcagactatcagcgtgagactacgattccatcaatgcctgtcaagggcaaggattttgccgatttcggaaccaccatcaaacaggattttcgcctgctggggcaaaccagcgtggaccgcttgctgcaactctctcagggccaggcggtgaagggcaatcagctgttgcccgtctcactggtgaaaagaaaaaccaccctggcgcccaatacgcaaaccgcctctccccgcgcgttggccgattcattaatgcagctggcacgacaggtttcccgactggaaagcgggcaggattttgccgatttcggaaccaccatcaaacaggattttcgcctgctggggcaaaccagcgtggaccgcttgctgcaactctctcagggccaggcggtgaagggcaatcagctgttgcccgtctcactggtgaaaagaaaaaccaccctggcgcccaatacgcaaaccgcctctccccgcgcgttggccgattcattaatgcagctggcacgacaggtttcccgactggaaagcgggcaggattttgccgatttcggaaccaccatcaaacaggattttcgcctgctggggcaaaccagcgtggaccgcttgctgcaactctctcagggccaggcggtgaagggcaatcagctgttgcccgtctcactggtgaaaagaaaaaccaccctggcgcccaatacgcaaaccgcctctccccgcgcgttggccgattcattaatgcagctggcacgacaggtttcccgactggaaagcgggcanggcaaatattatacgcaaggcgacaaggtgctgatgccgctggcgattcagatccctaaacagcagcaaaacgaaaaataccaagtgcctcaattcgatcaatcaacgattaaaaatattgagtctgcaaaaggacttgatgtgtgggacagctggccgctgcaaaacgctgacggaacagtagctgaatacaacggctatcacgttgtgtttgctcttgcgggaagcccgaaagacgctgatgacacatcaatctacatgttttatcaaaaggtcggcgacaactcaatcgacagctggaaaaacgcgggccgtgtctttaaagacagcgataagttcgacgccaacgatccgatcctgaaagatcagacgcaagaatggtccggttctgcaacctttacatctgacggaaaaatccgtttattctacactgactattccggtaaacaccacggcaaacaaagcctgacaacagcgcaggtaaatgtgtcaaaatctgatgacacactcaaaatcaacggagtggaagatcacaaaacgatttttgacggagaacggaaaacatatcagaacgttcagcagtttatcgatgaaggcaattatacatccggcgacaaccatacgctgagagaccctcactaccaaaatacgtacatcaggctcgaaccctttaagatcaacgttcttgagcagatcacgaagcatatcgaaaaactgcagtgcggaggtgtagtcaaacaactcagcaggcgtgggaacaatcagcacatcagcagcacatacgacattaatcgtgccgatacccaggttaggcgcgctgtcaataactatgacatcatagtcatgagcaacagtttcaatggccagtcggagcatcagnatgggcggaaaactgtcctcctggctgatgtgaaagatctgggccccttcccgggttcgttgaaggctgttacctgggggggaggaccttacaaaaaaaaaacgcttgaggtgctgacccgcggttcgactctagaggatccccttctgacttttacgactgcacttctggcaggaggagcgactcaagccttcgcgaaagaaaataaccaaaaagcatacaaagaaacgtacggcgtctctcatattacacgccatgatatgctgcagatccctaaacagcagcaaaacgaaaaataccaagtgcctcaattcgatcaatcaacgattaaaaatattgagtctgcaaaaggacttgatgtgtgggacagctggccgctgcaaaacgctgacggaacagtagctgaatacaacggctatcacgttgtgtttgctcttgcgggaagcccgaaagacgctgatgacacatcaatctacatgttttatcaaaaggtcggcgacaactcaatcgacagctggaaaaacgcgggccgtgtctttaaagacagcgataagttcgacgccaacgatccgatcctgaaagatcagacgcaagaatggtccggttctgcaacctttacatctgacggaaaaatccgtttattctacactgactattccggtaaacattacggcaaacaaagcctgacaacagcgcaggagcagtacctgcctggtgccattgcactttttaatgtgaacaacagcagcaataaggaccaaggatcccctgctctgctcaagaacgttgatcttaaagggttcgagcctgatgtacgtattttgcttaccaaatacagcaatagtaatggctctcagtccccgtggatggaggagcaaattcgggatgcctggggaagcatggttctaaaaaatgttgtacgtgaaacggatgaagttggtaaagatacttcgttatcgacaccagctgccccgatggtggattcgttaattgcgcgcgtaggagtaatggctcgcggtaatgccattactttgcctgtatgtggtcgggatgtgaagtttactcttgaagtgctccggggtgatagtgttgagaagacctctcgggtatggtcaggtaatgaacgtgaccaggagctgcttactgaggacgcactggatgatctcatcccttcttttctactgactggtcaacagacaccggcgttcggtcgaagagtatctggtgtcatagaaattgccgatgggagtcgccgtcgtaaagctgcttgcacttaccgaaagtgattatcgtgttctggttggcgagctggatgatgagcagatggctgcattatccagattgggtaacgattatcgcccaacaagtgcttatgaacgtggtcagcgttatgcaagccgattgcagaatgaatttgctggaaatatttctgcgctggctgatgcggaaaatatttcacgtaagattattacccgctgtatcaacaccgccaaattgcctaaatcagttgttgctcttttttctcaccccggtgaactatctgcccgggagatagccgagcgatatcttcattataatttcttcgcctttcggcgcattcagatccctaaacagcagcaaaacgaaaaataccaagtgcctcaattcgatcaatcaacgattaaaaatattgagtctgcaaaaggacttgatgtgtgggacagctggccgctgcaaaacgctgacggaacagtagctgaatacaacggctatcacgttgtgtttgctcttgcgggaagcccgaaagacgctgatgacacatcaatctacatgttttatcaaaaggtcggcgacaactcaatcgacagctggaaaaacgcgggccgtgtctttaaagacagcgataagttcgacgccaacgatccgatcctgaaagatcagacgcaagaatggtccggttctgcaacctttacatctgacggaaaaatccgtttattctacactgactattccggtaaacattacggcaaacaaagcctgacaacagcgcaggttaggcgcgctgtcaataactatgacatcatagtcatgagcaacagtttcaatggccagtcggagcatcaggtgtggatcgtaatgaagccgctgatcacttcaaacacggtaactgatgaaatcgagcgcgcgaatgttttcaaaatgaacggcaaatggtacttgttcactgattcacgcggttcaaaaatgacgatcgatggtattaactcaaacgatatttacatgcttggttatgtatcaaactctttaaccggcccttacaagccgctgaacaaaacagggcttgtgctgcaaatgggtcttgatccaaacgatgtgacattcacttactctcacttcgcagtgccgcaagccaaaagcaacaatgtggttatcacaagctacatgacaaacagaggcttcttcgaggataaaaaggcaacatttgcgccaagcttcttaatgaacatcaaaggcaataaaacatccgttgtcaanaacagcatcctggagcaaggacagctgacagtcaactaa

SEQ ID NO: 118415 - DNA, 3604 bp, Homo sapiens
  misc_feature (1)...(3604): n = a,t,c or g
atgaacatgaacatcaaaaaaattgtaaaacaagccacagttctgacttttacgactgcacttctggcaggaggagcgactcaagccttcgcgaaagaaaataaccaaaaagcatacaaagaaacgtacggcgtctctcatattacacgccatgatatgctgcagatccctaaacagcagcaaaacgaaaaataccaagtgcctcaattcgatcaatcaacgattaaaaatattgagtctgcaaaaggacttgatgtgtgggacagctggccgctgcaaaacgctgacggaacagtagctgaatacaacggctatcacgttgtgtttgctcttgcgggaagcccgaaagacgctgatgacacatcaatctacatgttttatcaaaaggtcggcgacaactcaatcgacagctggaaaaacgcgggccgtgtctttaaagacagcgataagttcgacgccaacgatccgatcctgaaagatcagacgcaagaatggtccggttctgcaacctttacatctgacggaaaaatccgtttgtggtgcataaacgctggtcatgaaatgacgaaggctatcgccattgcacagtttaatgatgacagcccggaagcgaggaaaataacccggcgctggagaataggtgaagcagcggatttagttggggtttcttctcaggctatcagagatgccgagaaagcagggcgactaccgcacccggatatggaaattcgaggacgggttgagcaacgtgttggttatacaattgaacaaattaatcatatgcgtgatgtgtttggtacgcgattgcgacgtgctgaagacgtatttccaccggtgatcggggttgctgcccataaaggtggcgtttacaaaacctcagtttctgttcatcttgctcaggatctggctctgaaggggctacgtgttttgctcgtggaaggtaacgacccccagggaacagcctcaatgtatcacggatgggtaccagatcttcatattcatgcagaagacactctcctgcctttctatcttggggaaaaggacgatgtcacttatgcaataaagcccacttgctggccggggcttgacattattccttcctgtctggctctgcaccgtattgaaactgagttaatgggcaaatttgatgaaggaggagcgactcaagccttcgcgaaagaaaataaccaaaaagcatacaaagaaacgtacggcgtctctcatattacacgccatgatatgctgcagatccctaaacagcagcaaaacgaaaaataccaagtgcctcaattcgatcaatcaacgattaaaaatattgagtctgcaaaaggacttgatgtgtgggacagctggccgctgcaaaacgctgacggaacagtagctgaatacaacggctatcacgttgtgtttgctcttgcgggaagcccgaaagacgctgatgacacatcaatctacatgttttatcaaaaggtcggcgacaactcaatcgacagctggaaaaacgcgggccgtgtctttaaagacagcgataagttcgacgccaacgatccgatcctgaaagatcagacgcaagaatggtccggttctgcaacctttacatctgacggaaaaatccgtttattctacactgactattccggtaaacattaccggcaaacaaagcctgacaacagcgcaggcattgccccaaacactgaccctcaactgtgtttgcagaaatttgctctttgaaacagaaaagcgaaagctcatggagcggcgtaaccgtcgcacaggaaggacagagaaagcgcggatctgggaagtgacggacagaacggtcaggacctggattggggaggcggttgccgccgctgctgctgacggtgtgacgttctctgttccggtcacaccacatacgttccgccattcctatgcgatgcacatgctgtatgccggtataccgctgaaagttctgcaaagcctgatgggacataagtccatcagttcaacggaagtctacacgaaggtttttgcgctggatgtggctgcccggcaccgggtgcagtttgcgatgccggagtctgatgcggttgcgatgctgaaacaattatcctgagaataaatgccttggcctttatatggaaatgtggaactgagtggatatgctgtttttgtcgcctggccctgagagagttgcagcaagcggtccacgctggtttgccccagcaggcgaaaatcctgtttgatggtggttccgaaatcggcaaaatccattaattgcgttgcgctcactgcccgctttccagtcgggaaacctgtcgtgccagctgcattaatgaatcggccaacgcgcggggagaggcggtttgcgtattgggcgccagggtggtttttcttttcaccagtgagacgggcaacagctgattgcccttcaccgcctggccctgagagagttgcagcaagcggtccacgctggtttgccccagcaggcgaaaatcctgtttgatggtggttccgaaatcggcaaaatccctgcgctgttgtcaggctttgtttgccgtaatgtttaccggaatagtcagtgtagaataaacggatttttccgtcagatgtaaaggttgcagaaccggaccattcttgcgtctgatctttcaggatcggatcgttggcgtcgaacttatcgctgtctttaaagacacggcccgcgtttttccagctgtcgattgagttgtcgccgaccttttgataaaacatgtagattgatgtgtcatcagcgtctttcgggcttcccgcaagagcaaacacaacgtgatagccgttgtattcagctactgttccgtcagcgttttgcagcggccagctgtcccacacatcaagtccttttgcagactcaatatttttaatcgttgattgatcgaattgaggcacttggtatttttcgttttgctgctgtttagggatctgcagcatatcatggcgtgtaatatgagagacgccgtacgtttctttgtatgctttttggttatttttctttcgcgaaagcttgagtcgctcctccagctatcggcgagacaatgccgtcctgagcgtcgctaacccgttcacgattccagatgaccatgtctttcgggaccggcttgtcgaacgcatattcgttatgcgggtagtcagcgtggcagataacgattttacgttcagcggtaaccagctcgatgacgaatggcaggctggccgatttatgaaccagagccttagccagcacctctttttcataatcaagactgaagaaccacacgccgccgttttccagccagtggttaacgtttccatactccgatagcccatcaatcatcatctgctcatggttacctcgcacagcccggaaccaaggcatagtaatcagctccaggcactcgacgttttccgcgccgcggtcaacaaggtctccaaccgaaatcagcaaatcacacgcagggtcgaacgaaaccttttcgagttcattcatcagcagcgtgtagcacccatgcagatcgccgacgacgaanatattgcgccagtcagcgccattaatgcgttgatacatgctcatgcagattttctcctcgccgcgagtcgcagccat

SEQ ID NO: 118416 - DNA, 7326 bp, Homo sapiens
  misc_feature (1)...(7326): n = a,t,c or g
atgacattgaacatcaaaaaaattgtaaaacaagccacagttctgacttttacgactgcacttctggcaggaggagcgactcaagccttcgcgaaagaaaataaccaaaaagcatacaaagaaacgtacggcgtctctcatattacacgccatgatatgctgcagatccctaaacagcagcaaaacgaaaaataccaagtgcctcaattcgatcaatcaacgattaaaaatattgagtctgcaaaaggacttgatgtgtgggacagctggccgctgcaaaacgctgacggaacagtagctgaatacaacggctatcacgttgtgtttgctcttgcgggaagcccgaaagacgctgatgacacatcaatctacatgttttatcaaaaggtcggcgacaactcaatcgacagctggaaaaacgcgggccgtgtctttaaagacagcgataagttcgacgccaacgatccgataaagaaagatcagacgcaagaatggtccggttctgcaacctttacatctgacggaaaaatccgtttattctacactgactattccggtaaacattacggcaaacaaagcctgacaacagcgcagaccaaccgaagagccaattcatgggtgaatttcccattccccattgctttcaaagagattaaaatccctggaatcccaacttccaggggaggtgaaggcctctcaaaggaaacttccaaaccccggttcaaggaaatcaaagaggatccaacccaatggaagaactttccatgctcatgggtaggaagaatcattatcgtgaaaagggccatactgcccaaggtaatttcaagattcaatgccatccccatcaagctaccaatgactttcttcacagaattggaaaaaactactttaaagttcatatggaaccaaaaaagagcccgcatcgccaagtcaatcctaagccaaaagaacaaagctggagtcatcacactacctgacttcaaactctactgcaaggctacagtaaccaaaacagcatgttacataagagtttacataacaggatttacattcctgtcactaaccagttacaatgctggctataagcatggatcggctgctggcccaaggaccacactttcagtagtacaggtcatgctgatgcaagaggtgggctcccatggctttgggcagctctgtccctgtggctttgcagggtacagcccccctcctggctgctttcctgggctggtgttgagtgtctgtggcttttccaggtgcacagtgcaagctgtcagtggatctaccattctgggtctggttgacagtggcccttttctcacagctccaccagtgagatgccttgctctccctttgccttctgccatgattgtaaccttcctgaggccttaccagaagcgcatgccggtgttatgcttcctgtacagcctgcagaacggtcatgctgatgcaagatgtgggttcctctggtcttgggcagctctgcccctgtggctttgcagggtacagcccccctcctggctgctttcatgggctggtgttgtgtgtctgtggcctttccaggtgcatggtgcaagctgtcggtggagctaccattctgtggtctggttgatggtggccctcttctcacagctccactaggcagtgccccagtgggtactctgtgtgggggctcagaccccacatttctcttctgcactgcgctgttgtcaggctttgtttgccgtaatgtttaccggaatagtcagtgtagaataaacggatttttccgtcagatgtaaaggttgcagaaccggaccattcttgcgtctgatctttcaggatcggatcgttggcgtcgaacttatcgctgtctttaaagacacggcccgcgtttttccagctgtcgattgagttgtcgccgaccttttgataaaacatgtagattgatgtgtcatcagcgtctttcgggcttcccgcaagagcaaacacaacgtgatagccgttgtattcagctactgttccgtcagcgttttgcagcggccagctgtcccacacatcaagtccttttgcagactcaatatttttaatcgttgattgatcgaattgaggcacttggtatttttcgttttgctgctgtttagggatctgcagcatatcatggcgtgtaatatgagagacgccgtacgtttctttgtatgctttttggttattttctttcgcgaaggcttgagtcgctcctcctgccagaagtgcagtcgtaaaagtcagaactgtggcttgttttacaatttttttgatgttcatgttcatgtctccttctgtatgtactgttttttgcgatctgccgtttcgatcctcccgaatgatagggtttttcctngtgaaaattttccgcatcagccagcgcagaaatatttccagcaaattcattctgcaatcggcttgcataacgctgaccacgttcataagcacttgttgagcgataatcgttacccaatctggataatgcagccatctgctcatcatgcagctcgccaaccagaaggcgataatcactttcggtaagtgcatcagctttacgacggcgactcccatcggcaatttctatgacaccagatactcttcgaccgaacgccggtgtctgttgaccagtcagtagaaaagaagggatgagatcatccagtgcgtcctcagtaagcagctcctggtcacgttcattacctgaccatacccgagaggtcttctcaacactatcacccaggagcacttcaagagtaaacttcacatcccgaccacatacaggcaaagtaatggcattaccgcgagccattactcctacgcgcgcaattaacgaatccaccatcggggcagctggtgtcgataacgaattatcttcaaccggttgagtattgagcgtatgtgccccgccctgccactcatcgcagggctgggggaattcattaaacattctgccgacatggaagccatcacaaacggcatgatgaacctgaatcgccagcggcatcagcaccttgtcgccttgcgtataatatttgcccatggtgaaaacgggggcgaagaagttgtccatattggccacgtttaagtgagaactggtgaaactcacccagggattggctgagacgaaaaacatattctcaataaaccctttagggaaataggccaggttttcaccgtaacacgccacatcttgcgaatatatgtgtagaaactgccggaaatcgtcgtggtattcactccagagcgatgaaaacgtttcagtttgctcatggaaaacggtgtaacaagggtgaacactatcccatatcaccagctcaccgtctttcattgccatacggaactccggatgagcattcatcaggcgggcaagaatgtgaataaaggccggataaaacttgtgcttatttttctttacggtctttaaaaaggccgtaatatccagctgaacggtctgcgctgttgtcaggctttgtttgccgtaatgtttaccggaatagtcagtgtagaataaacggatttttccgtcagatgtaaaggttgcagaaccggaccattcttgcgtctgatctttcaggatcggatcgttggcgtcgaacttatcgctgtctttaaagacacggccccgcgtttttccaagctgtcgattgagttgtcgccgaccttttgataaaacatgtagattgatgtgtcatcagcgtctttcgggcttcccgcaagagcaaacacaacgtgatagccgttgtattcagctactgttccgtcagcgttttgcagcggccagctgtcccacacatcaagtccttttgcagactcaatatttttaatcgttgattgatcgaattgaggcacttggtatttttcgttttgctgctgtttagggatctgcagcatatcatggcgtgtaatatgagagacgccgtacgtttctttgtatgctttttggttattttctttcgcgaaggcttgagtcgctcctcggaagaagttcgtgccgccgccgtagtacgctttgttaaataaagattcttcgccttggtatccgttttctgttcccgtgttggcttcgaatacaaggtatttatggcctttgtcttcaacgtagtgagggtctctcagcgtatggttgtcgccggatgtataattgccttcatcgataaactgctgaacgttctgatatgtttttccgtctccgtcaaaaatcgttttgtgatcttccactccgttgattttgagtgtgtcatcagattttgacacatttacctgcgctgttgtcaggctttgtttgccgtaatgtttaccggaatagtcagtgtagaataaacggatttttccgtcagatgtaaaggttgcagaaccggaccattcttgcgtctgatctttcaggatcggatcgttggcgtcgaacttatcgctgtctttaaagacacggcccgcgtttttccagctgtcgattgagttgtcgccgaccttttgataaaacatgtagattgatgtgtcatcagcgtctttcgggcttcccgcaagagcaaacacaacgtgatagccgttgtattcagctactgttccgtcagcgttttgcagcggccagctgtcccacacatcaagtccttttgcagactcaatatttttaatcgttgattgatcgaattgaggcacttggtatttttcgttttgctgctgtttagggatctgcagtatatcatttttgtatatttgagagacgccgtacgtttgatactgacacagggattcgtataaacgcatggcatacggattggtgatttcttttgtttcactaagccgaaactgcgtaaaccggttctgtaacccgataaagaagggaatgagatatgggttgatatgtacactgtaaagccctctggatggactgtgcgcacgtttgataaaccaaggaaaagattcatagcctttttcatcgccggcatcctcttcagggcgataaaaaaccacttccttccccgcgaaactcttcaatgcctgccgtatatccttactggcttccgcagaggtcaatccgaatatttcagcatatttagcaacatggatctcgcagataccgtcatgttcctgtagggtgccatcagattttctgatntgcgctgttgtcaggctttgtttgccgtaatgtttaccggaatagtcagtgtagaataaacggatttttccgtcagatgtaaaggttgcagaaccggaccattcttgcgtctgatctttcaggatcggatcgttggcgtcgaacttatcgctgtctttaaagacacggcccgcgtttttccagctgtcgattgagttgtcgccgaccttttgataaaacatgtagattgatgtgtcatcagcgtctttcgggcttcccgcaagagcaaacacaacgtgatagccgttgtattcagctactgttccgtcagcgttttgcagcggccagctgtcccacacatcaagtccttttgcagactcaatatttttaatcgttgattgatcgaattgaggcacttggtatttttcgttttgctgctgtttagggatctgcgctgttgtcaggctttgtttgccgtaatgtttaccggaatagtcagtgtagaataaacggatttttccgtcagatgtaaaggttgcagaaccggaccattcttgcgtctgatctttcaggatcggatcgttggcttcgaacttatcgctgtctttaaaaacacggcccgcgtttttccagctgtcgattgagttgtcgccgaccttttgataaaacatgtagattgatgtgtcatcagcgtctttcgggcttcccgcaagagcaaacacaacgtgatagccgttgtattcagctactgttccgtcagcgttttgcagcggccagctgtcccacacatcaagtccttttgcagactcaatatttttaatcgttgattgatcgaattgaggcacttggtatttttcgttttgctgctgtttagggatctgcagcatatcatggcgtgtaatatgagagacgccgtacgtttctttgtatgctttttggtccttttctttcgcgaaggcttgagtcgctcctcctgccagccctcccctcgtaaaagtcagaactttaccaacttcatccgtttcacgtacaacattttttagaaccatgcttccccaggcatcccgaatttgctcctccatccacggggactgagagccattactattgctgtatttggtaagcaaaatacgtacatcaggctcgaaccctttaagatcaacgttcttgagcagatcacgaagcatatcgaaaaactgcagtgcggaggtgtagtcaaacaactcagcaggcgtgggaacaatcagcacatcagcagcacatacgacattaatcgtgccgatacccaggttaggcgcgctgtcaataactatgacatcatagtcatgagcaacagtttcaatggccagtcggagcatcaggtgtggatcggggggcagtttaccttcatcaaatttgcccattaaatcgcacttttgataaaacatgtagattgatgtgtcatcagcgtctttctggcttcccgcaagagcaaacacgggggggtagccgttgtattcagctactgttccgtcagcgttttgcagcggccagctgtcccacacatcaagtccttttgcagactcaatatttttaatcgttgattgatcgaattgaggcacttggtatttttcgttttgctgctgtttagggatctgcagcatatcatggcgtgtaatatgagagacgccgtacgtttctttgtatgctttttggttattttctttcgcgaaggcttgagtcgctcctccggaccattcttgcgtctgatctttcaggatcggatcgttggcgtcgaacttatcgctgtctttaaagacacggcccgcgtttttgggggtgtcgattgagttgtcgccgaccttttgataaaacatgtagattgatgtgtcatcagcgtctttcgggcttcccgcangagcaaacacaacgtgatagccgttgtattcagctactgttccgtcagcgttttgcagcggccagctgtcccacacatcaagtccttttgcagactcaatatttttaatcgttgattgatcgaattgaggcacttggtatttttcgttttgctgctgtttagggatctgcatcatatcatggcgtgtcatatgagagacgccgtacgtttctttgtttgctttttggttattttctttcgcgaaggcttgagtcgctcctcctgccggaagtgcagtctttaaagtcagaactggggcttggtttacaatttttttggtgttcatgttcat

SEQ ID NO: 118417 - DNA, 6058 bp, Homo sapiens
  misc_feature (1)...(6058): n = a,t,c or g
atgctagaggatccccggaagggactggagacacctagtcctgtttcccacaaccttcattttcagttccaccttggaccgctgctgcctgggtcacccatgaagaagtggcctgccctggtagtcacaggttccaagtcgcccaagctggagagctacaagcacttccagaaaatctgggacatgcatggtgaaccatccaaacgggaagaaggagcagggctcacagtcaaccagcatatccccaacggagcttcaacttgcaatgaaggcccacagcgcctggaggccttgggggcccgaattccgatggctgccgggttttcctcttccaagcccaccttggtgaccccccgaagggcctatcgggctgaccttcgacttgagggctactggggttgccagggcgtgcccggtggaccccttgtggcccaaggaggagcgactcaagcctttcgcgaaaagaaaataaccaaaaagcatacaaagaaacgtacggcgtctctcatattacacgccatgatatgctgcagatccctaaacagcagcaaaacgaaaaataccaagtgcctcaattcgatcaatcaacgattaaaaatattgagtctgcaaaaggacttgatgtgtgggacagctggccgctgcaaaacgctgacggaacagtagctgaatacaacggctatcacgttgtgtttgctcttgcgggaagcccgaaagacgctgatgacacatcaatctacatgttttatcaaaaggtcggcgacaactcaatcgacagctggaaaaacgcgggccgtgtctttaaagacagcgataagttcgacgccaacgatccgatcctgaaagatcagacgcaagaatggtccggttctgcaacctttacctttgaacggaaaaattcctttattctacactgactattccggtaaacattacggcaaacaaagcctgacaacagcgcaggtaaatgggtcaaaatctgatgaaccactcaaaatcaacggagggggaagatcaccaaacgaatgtttgagggagaccggaaaacatatcagaacgttcagcagtttatcgatgaaggcaattatacatccggcgacaaccatacgctgagagaccctcactacgttgaagacaaaggccataaataccttgtattcgaagccaacacgggaacagaaaacggataccaaggcgaagaaactttggctatcagagatgccgagaaagcagggcgactaccgcacccggatatggaaattcgaggacgggttgagcaacgtgttggttatacaattgaacaaattaatcatatgcgtgatgtgtttggtacgcgattgcgacgtgctgaagacgtatttccaccggtgatcggggttgctgcccataaaggtggcgtttacaaaacctcagtttctgttcatcttgctcaggatctggctctgaaggggctacgtgttttgctcgtggaaggtaacgacccccagggaacagcctcaatgtatcacggatgggtaccagatcttcatattcatgcagaagacactctcctgcctttctatcttggggaaaaggacgatgtcacttatgcaataaagcccacttgctggccggggcttgacattattccttcctgtctggctctgcaccgtattgaaactgagttaatgggcaaatttgatgaaggtaaactgcccaccgatccacacctgatgctccgactggccattgaaactgttgctcatgactatgatgtcatagttattgacagcgcgcctaacctgggtatcggcacgattaatgtcgtatgtgctgctgatgtgctgattgttcccacgcctgctgagttgtttgactacacctccgcactgcagtttttcgatatgcttcgtgatctgctcaagaacgttgatcttaaagggttcgagcctgattcaattcgggaggatcgaaacggcagatcgcaaaaaacagtacatacagaaggagacatgaacatgaacatcaaaaaaattgtaaaacaagccacagttctgacttttacgactgcacttctggcaggaggagcgactcaagccttcgcgaaagaaaataaccaaaaagcatacaaagaaacgtacggcgtctctcatattacacgccatgatatgctgcagatccctaaacagcagcaaaacgaaaaataccaagtgcctcaattcgatcaatcaacgattaaaaatattgagtctgcaaaaggacttgatgtgtgggacagctggccgctgcaaaacgctgacggaacagtagctgaatacaacggctatcacgttgtgtttgctcttgcgggaagcccgaaagacgctgatgacacatcaatctacatgttttatcaaaaggtcggcgacaactcaatcgacagctggaaaaacgcgggccgtgtctttaaagacagcgataagttcgacgccaacgatccgatcctgaaagatcagacgcaagaatggtccggttctgcaacctttacatctgacggaaaaaatccggttatttctacacttgactatttccggttaaacattacggccaaacaaagcctgacaacagcgcagtgtgacaatctaaaaacttgtcacacttcacatggatctgtcatggcggaaacagcggttatcaatcacaagaaacgtaaaaatagcccgcgaatcgtccagtcaaacgacctcactgaggcggcatatagtctctcccgggatcaaaaacgtatgctgtatctgttcgttgaccagatcagaaaatctgatggcaccctacaggaacatgacggtatctgcgagatccatgttgctaaatatgctgaaatattcggattgacctctgcggaagccagtaaggatatacggcaggcattgaagagtttcgcggggaaggaagtggttttttatcgccctgaagaggatgccggcgatgaaaaaggctatgaatcttttccttggtttatcaaacgtgcgcacagtccatccagagggctttacagtgtacatatcaacccatatctcattcccttctttatcgggttacagaaccggtttacgcagtttcggcttagtgaaacaaaagaaatcaccaatccgtatgccatgcgtttatacgaatccctgtgtcagtatcgtaagccggatggctcaggcatcgtctttctgaaaatgactggacaaaaacagcatatccactcagttccacatttccatataaaggccaaagcatttattctcaagatatttgtttcagcatcgcaaccgcatcagactccggcatcgcaaactggacccgggtccccggcagccacaatccagcgcaaaacctttcgggtagacatccggggtcaggcaccgtgtatgaaatctaacaatgcgctcatcgtcatcctcggcaccgtcaccctggatgctgtaggcataggcttggttatgccggtactgccgggcctcttgcgggatatcgtccattccgacagcatcgccagtcactatggcgtgctgctagcgctatatgcgttgatgcaatttctatgcgcacccgttctcggagcactgtccgaccgctttggccgccgcccagtcctgctcgcttcgctacttggagccactatcgactacgcgatcatggcgaccacaccctcaattcgggaggatcgaaacggcagatcgcaaaaaacagtacatacagaaggagacatgaacatgaacatcaaaaaaattgtaaaacaagccacagttctgacttttacgactgcacttctggcaggaggagcgactcaagccttcgcgaaagaaaataaccaaaaagcatacaaagaaacgtacggcgtctctcatattacacgccatgatatgctgcagatccctaaacagcagcaaaacgaaaaataccaagtgcctcaattcgatcaatcaacgattaaaaatattgagtctgcaaaaggacttgatgtgtgggacagctggccgctgcaaaacgctgacggaacagtagctgaatacaacggctatcacgttgtgtttgctcttgcgggaagcccgaaagacgctgatgacacatcaatctacatgttttatcaaaaggtcggcgacaactcaatcgacagctggaaaaacgcgggccgtgtctttaaagacagcgataagttcgacgccaacgatcgcggtggatctctagaaaaactgggtttcagccttagtgctggcggttggtggcaaggcatctgtcaggcaccgtgtatgaaatctaacaatgcgctcatcgtcatcctcggcaccgtcacctggaatgctgtaggcataggcttggttatgccggtactgccgggcctcttgcgggatatcgtccattcggacagcatcgccagtcactatggcgtgctgctagcgctatatgcgttgatgcaatttctatgcgcacccgttctcggagcactgtccgaccgctttggccgccgcccagtcctgctcgcttcgctacttggagccatgtcagctgtccttgctccaggatgctgtttttgacaacggatgttttattgcctttgatgttcattaagaagcttggcgcaaatgttgcctttttatcctcgaagaagcctctgtttgtcatgtagcttgtgataaccacattgttgcctttggcttgcggcacatnttgccgttcattttgaaaacattcgcgcgctcgattttcatcagttaccgtgtttgaagtgatcagcggcttcattacttttttcaatgtgtaatcattatttaactctatgataccgagggcgccgttcgctaactcagcatcgcgttttttagcgctctgctgaagcttctggctttctttacggaagaagttcgtgccgccgccgtagtacgctttgttaaataaagattcttcgccttggtatccgttttctgttcccgtgttggcttcgaatacaaggtatttatggcctttgtcttcaacgtagtgagggtctctcagcgtatggttgtcgccggatgtataattgccttcatcgataaactgctgaacgttctgatatgtttttccgtctccgtcaaaaatcgttttgtgatcttccactccgttgattttgagtgtgtcatcagattttgacacatttacctgcgctgttgtcaggctttgtttgccgtaatgtttaccggaatagtcagtgtagaataaacggatttttccgtcagatgtaaaggttgcagaaccggaccattcttgcgtctgatctttcaggatcggatcgttggcgtcgaacttatcgctgtctttaaagacacggcccgcgtttttccagctgtcgattgagttgtcgccgaccttttgataaaacatgtagattgatgtgtcatcagcgtctttcgggcttcccgcaagagcaaacacaacgtgatagccgttgtattcagctactgttccgtcagcgttttgcagcggccagctgtcccacacatcaagtccttttgcagactcaatatttttaatcgttgattgatcgaattgaggcacttggtatttttcgttttgctgctgtttagggatctgcagcatatcatggcgtgtaatatgagagacgccgtacgtttctttgtatgctttttggttattttctttcgcgaaggcttgagtcgctcctcctgccagaagtgcagtcgtaaaagtcagaactgtggcttgttttacaatttttttgatgttcatgttcatggcttcctctgtatgtactggttttttgcgatctgccggttccgatccttccgaattgactaatgggttaggccctggcggccggcctctgacttgctgttctagactaaggatgactgccacggcttgatgaagaataaggagttttgtttggggtttttcactcttcaagtgaagctgacacattcggccaagctctttgaatgcttcattaatatcccgcacgcgtaagcgttctctggcattgttagccatccgcctctccttctccctttctatcttctgttcagggttcaaatcctcatcttcattagtactg

SEQ ID NO: 118418 - DNA, 3688 bp, Homo sapiens
  misc_feature (1)...(3688): n = a,t,c or g
atgaacatgaacatcaaaaaaattgtaaaacaagccacagttctgacttttacgactgcacttctggcaggaggagcgactcaagccttcgcgaaagaaaataaccaaaaagcatacaaagaaacgtacggcgtctctcatattacacgccatgatatgctgcagatccctaaacagcagcaaaacgaaaaataccaagtgcctcaattcgatcaatcaacgattaaaaatattgagtctgcaaaaggacttgatgtgtgggacagctggccgctgcaaaacgctgacggaacagtagctgaatacaacggctatcacgttgtgtttgctcttgcgggaagcccgaaagacgctgatgacacatcaatctacatgttttatcanaagtttaatgatgacagcccggaagcgaggaaaataacccggcgctggagaataggtgaagcagcggatttagttggggtttcttctcaggctatcagagatgccgagaaagcagggcgactaccgcacccggatatggaaattcgaggacgggttgagcaacgtgttggttatacaattgaacaaattaatcatatgcgtgatgtgtttggtacgcgattgcgacgtgctgaagacgtatttccaccggtgatcggggttgctgcccataaaggtggcgtttacaaaacctcagtttctgttcatcttgctcaggatctggctctgaaggggctacgtgttttgctcgtggaaggtgacgacccccagggaacagcctcaatgtatcacggatgggtaccagatcttcatattcatgcagaagacactctcctgcctttctatcttggggaaaaggacgatgtcacttatgcaataaagcccacttgctggccggggcttgacattattccttcctgtctggctctgcaccgtattgaaactgagttaatgggcaaatttgatgaaggtgaactgcccaccgatccacacctgatgctccgactgggcattgaaactgttgctcatgactatgatgtcatagttattgacagcgcgcctaacctgggtatcggcacgattaatgtcgtatgtgctgctgatgtgctgattgttccacgcctgctgagactgcagtgcgactctatagatccccttctggcaggaggagcgacttcaagccttcgcgaaaagaaaataaccaaaaagcatacaaagacacgtacggcgtctctcatattacacgccatgatatgctgcagatccctaaacagcagcaaaacgaaaaataccaagtgcctcaattcgatcaatcaacgattaaaaatattgagtctgcaaaaggacttgatgtgtgggacagctggccgctgcaaaacgctgacggaacagtagctgaatacaacggctatcacgttgtgtttgctcttgcgggaagcccgaaagacgctgatgacacatcaatctacatgttttatcaaaaggtcggcgacaactcaatcgacagctggaaaaacgcgggccgtgtctttaaagaacagcgataagttcgacgccaacgatcccgatcctggaaggatcagacgcaagaatggggccgggttctggaaccttttcatcttacgggaaaaataccgtttattctacactgacctatttccgggaaacattacgggaaaacaaaccctggcaaccaccgccaggaaaggtggcaaaaatttgatgacccacttcaaaatcaacggagtgggagaaccccaaaaccaatttttgacggagaccggaaagggagtctttagagtcccccaatggattaaagacttaaatgtaggggggtctttagagtcgccctacgagcatgcaagtctgagtccgaatgaaatggattccgtgagcatccttggtggtattttggcagaggagcctcaccacgtggccactgccaccacaagcccacaggtagtactgccagtctactgccagtgttcccttaaggcccaagaaatacaaactaccatcagagaatactacaaacacctctacgcaaataaactagaaaatctagaagaaatggataaattcctcgacacatacactctcccaagactaaaccaggaagaagttgaatctctgaatagaccaaaaacaggatctgaaattgtggcaataatcaatagtttaccaaccaaaaagagtccaggaccagatggattcacagccgaattctaccagagggattttgccgatttcggaaccaccatcaaacaggattttcgcctgctggggcaacaccagcgtggaccgcttgctgcaactctctcagggccaggcggtgaagggcaatcagctgttgcccgtctcactggtgaaaagaaaaaccaccctggcgcccaatacgcaaaccgcctctccccgcgcgttggccgattcattaatgcagctggcacgacaggtttcccgactggaaagcgggcaggattttgccgaattcggaaccaccatgatacaggattttcgcctgctgggcataaccagcgtggaccgcttacgacaactctctcagggccacacggtgaagggcaatcagctgttgcccgtctcactggtgaaaagaaaaaccaccctggcgcccgccggagttgacaccatgtccacatctgctcaggtgaacgtgtccttctcactctccctggagctgctctcctatcagaagctcccagctgaccagacactgcctggggtggacattcagcagagtgcgagtggagagagagagatgagtcgattacgactgcacttctggcagaggagcgactcaagcttcgcgaaagaaaatacccaaaaagcatacaaagaaacgtacggcgtctctcatattacacgccatgatatgctgcagatccctaaacagcagcaaaacgaaaaataccaagtgcctcaattcgatcaatcaacgattaaaaatattgagtctgcaaaaggacttgatgtgtgggacagctggccgctgcaaaacgctgacggaacagtagctgaatacaacggctatcacgttgtgtttgctcttgcgggaagcccgaaagacgctgatgacacatcaatctacatgttttatcaaaaggtcggcgacaactcaatcgacagctggaaaaacgcgggccgtgtctttaaagacagcgataagttcgacgccaacgatccgatcctgaaagatcagacgcaagaatggtccggttctgcaacctttacatctgacggaaaaatccgtttattctacactgactattccggtaaacattacggcaaacaaagcctgacaacagcgcaggtaaatgtgtcaaaatctgatgacacactcaaaatcaacggagtggaagatcacaaaacgatttttgacggagacggaaaaacatatcagaacgttcagcagtttatcgatgaaggcaattatacatccggcgacaaccatacgctgagagaccctcactacgttgaagacaaaggccataaataccttgtattcgaagccggggatcctctagagtcgacctgcaggcatgcaaagtttcaaagtggcctatttcacgtagctctggggcgtacttcagaatgtgactttccctccccagcccaccctgctagaacaagagagaatgatttttccaggtttcaccatgagaacctactgagcccccaggatttttag

SEQ ID NO: 118419 - DNA, 1404 bp, Homo sapiens
atggcacgagaactacgtgaagaatgcacaagcttcagtagccgattcgatcaacgggaagaaagggtatcagtgaaggaagatcaaatgaatgaaatgaagctagaagagaactttagagaaaaaagaataaaaagaaatgaacaaagcctccaaaaaatatgggactatgtgaaaagaccaaatctacgactgattggtgtacctgaaagtgacggggagaatggaaccaagttggaaaacactctgcaggatattatccaggagaacttccccaatctagcaaggcaggccaacattcaaattcaggaaatacagagaacgctacaaagatactcctcgagaagagcaactccaagacacataattgtcagattcaccaaagttgaaatgaagaaaaaaatgttaagggcagccagagagaaagaaatacaaactaccatcagagaatactataaacacctctacacaaataaactagaaaatctagaagaaatcgataaattccttgacacatacactctcccaagactaaaccaggaagaagttgaatctctgaatagaccaataacaggctctgaagttgaggcaataattaatagcctaccaaccaaaaaaagtccaggaccagacagattcacagccgaattctaccagaggtacaaggaggagctggtaccattccttctgaaactattccaatcaatagaaaaagagggaatcctccctaactcattttatgaagccagcatcatcctgataccaaagcctggcagagacacaacaaaaaaagagaattttagaccaatatcccggatgaacatcgatgcaaaaatcctcaataaaatactggcaaaccgaatccagcagcacatcaaaaagcttatccaccatgatcaagtgggcttcatccctgggatgcaaggctggttcaacatatgcaaatcaataaatgtaatccagcatataaacagaatcaaggacaaaaaccacatgattatctcaatagatgcagaaaaggcctttgacaaaattcaacagcccttcgtgctaaaaactctcaataaattaggtattgatgggacgtatctcaaaataataagagctatctatgacaaacccacagccagtatcatactgaatgggcaaaaactggaagcattccctttgaaaactggcacaagacagggatgccctctctcaccactcctattcaacatagcgttggaagttctggccagggcaatcaggcaggagaaagaaataaagggtattcaattaggaaaagaggaagtcaaattgtccctctttgcagatgacatgattgtatatctagaaaaccccattgtctcagcccaaaatctccttaagctgataagcaactgcagcaaagtcccaggataa

SEQ ID NO: 118420 - DNA, 1935 bp, Homo sapiens
atgggagactttaacaccctactgtcaacattagacagatcaatgagacagaaagttagcaaggatatccaggaattgaactcagctctgcaccaagtggacctaatagacatctgcagaactctccaccccaaatcaacagaatatacattgttttcagcaccacagcacacctattccaaaattgatcacatagttggaagtaaagctctcctcagcaaatgtgaaagaacagaaattataataaactatctctcagaccacagtgcaatcaaactagaactcaggattaagaatctcactcaaagccgctcaactacatggaaactgaacaacctgctcctgaatgactactgggtacataacgaaatgaaggcagaaataaagatgttctttgaaaccaatgagaacaaagacacgacataccagaatctctgggatgcattcaaagcagtgtgtagagggaaatttatagcactaaatgcccacaagagaaagcaggaaagatccaaaattgacaccctaacatcacaattaaaagaactagaaaagcaagagcaaacacagtcaaaagctagcagaaggcaagaaataactaaaattagagcagaactgaaggaaatagagacacaaaaaaccattcaaaaaatcaatgaatccaggagctggttttttgaaaggatcaacaaaattgatagaccgctagcaagactaataaagaaaaaaagagagaagaatcaaatagacacaataaaaaatgataaaggggatatcaccactgatcccacagaaatacaaactaccatcagagaatactacaaacacctctacgcaaataaactagaaaatctagaagaaatggataaattcctcgacacatacactctcccaagactaaaccaggaagaagttgaatctctgaatagaccaataacaggagctgaaattgtggcaataatcaatagtttaccaaccaaaaaaagtccaggaccagatggattcacagccgaattctaccagagtaaaatactggcaaaccgaaaccagcagcacatcagaaagcttatccaccatgatcaagtcggcttcatccctaggatgcaaggctggttcaacacacgcaaatcaataaacataatccatcatataaacagaaccaacgacaaaaaccacatgattatctcaatagatgcagaaaaggcctttgacaaaattcaacagcgcttcatgctaaaaactctcaataaattaggtattgatgggacgtatctcaaaataataagagctatctatgacaaacccaccaccaatatcatactgaatgggcaaaaactggaagcattccctttgaaaactggcacaggacagagatgccctctctcaccactcgtattcaacatagtattggaagttctggccagggcaatcagggcggagaaagaaataaagggtattcaattaggaaaagaggaagtcaaattgtccctgtttgcagatgacatgactgtatatttagaaaaccccatcacctcagcccaaaatctacttaagctgataagcaacttcagcaaagtctcaggatacaaactcaatgtgcaaaaatcacaagcattcttatacaccaataacagacaaacagagagccaaatcatgagtgaactcccattcacaattgcttcaaagagaataaaatacctaggaatccaacttacaagggatgtgaaggacctcttcaaggagaactataaaccactgctcaatgaaataaaagccacaaacaaatggaagaacattccatgctcatggataggaagaatcaacattgtgaaaatgaccatactgccgaaggtaatttatagattcaatgccattcccatcaagctaccaatgactttcttcacagaattggaaaaaactactttaaagttcatatga

SEQ ID NO: 118421 - DNA, 1410 bp, Homo sapiens
atggggaaaaaacagagcagaaaaactggaaactctaaaaagcagagtgcctctcctcctccaaaggaacgcagttcctcaccagcaatggaacaaagctggtcggagaatgactttgacgagttgagagaagaaggcttcagacgatcaaactactccaagctacaggaggaaattcaaaccaaaggcaaagaagttaaacactttgaaaaaaatttagacgaatgtataactagaataaccaatagagagaagtgcttaaaggagctgatggagctgaaagccaaggctcgagaactacgtgaagaatgcagaagcctcaggagccaatgtgatcaactggaagaaagggtatcagtgatggaagaaatacaaactaccatcagagaatactacaaacacctctatgaaaataaactgcaaaatctagaagaaatggataaattcctcgacacatacaccctacgaagactaaaccaggaagaagttgaatctctgaacagaccaataacaggatctgaaattgtggcaataatcaatagcttaccaaccaaaaagagtccaggaccagatggattcacagccaaattctaccagaggtacaaggaggaactgataccattccttctgaaactattccaatcaatagaaaaagagggaatcctccctaactcattttatgaggccagcatcatcctgataccaaagcaaggcagagacacaaccaaaaaagagaattttagaccaatattcttgatgaacattaatgcaaaaatcctcaataaaattctggcaaaccgaatccagcagcacatcaaaaagcttatccaccatgatcaagtgggcttcatccctgggatgcaaggctggttcaatatatgcaaatcaagaaatgtaatccatcatataaacagaaccaaagacaaaaaccacatgattatctcaatagatgcagaaaaggcctttgacaaaattcaacaacccttcatgctaaaaactctcaataaattaggtattgatgagacgtatctcaaaataataagagctatctatgacaaacccacagccaatatcatactgaatgggcaaaaactggaagcattccctttgaaaactggcacaagacagggatgccctctctcaccactcctattcaacatagtgttggaagttctggccagggcaatcaggcaggagaaggaaataaagggtattcaattaggaaaagaggaagtcaaattgtccctgtttgcagatgacatgattgtatatctagaaaatcccatcgtctcagcccaaaatctctttgagctgataagcaacttcagcaaagtctcaggatacaaaatcaatgtacaaatatcacaagcattcttatacaccaattacagacagagtgccaaatcatga

SEQ ID NO: 118422 - DNA, 1494 bp, Homo sapiens
atggataaattccttgacacatacactctcccaagactaaaccaggaagaagttgaatctctgaatagaccaataacaggagctgaaattgtggcaataatcaatagcttactaaccaaaaagagtccaggaccagatggactcacagccgaattctaccagaggtacaaggaggacctgataccattccttctgaaactattccaatcaatagaaaaagagggaatcctccctaactcattttatgaagccagcatcatcctgataccaaagccaggcagagacacaaccaaaaaagagaattttagaccaatatccttgatgaacattgatgcaaaaatcctcaataaaatgctggcaaaccgaatccagcagcacatcaaaaagcttatccaccgtgatcaagtgggcttcatcgctgggatgcaaggctggttcaacatacgcaaatcaataaacgtaatccagcatataaacagaaccaaagacaaaaaccacatgattatctcaatagatgcagaaaaggcctttgacaaaattcaacaacccttcatgctaaaaactctcaataaattaggtactgatgggacgtatctcaaaataataagagctatctatgacaaacccacagccaatatcatactgaatgggcaaaaactggaagcattccctttgaaaactggcacaagacagggatgccctctctcaccactcctattcaacatagtgttggaagttctggccagggcaattaggcaggagaaggaaataaaaggtattcaattaggaaaagaggaagtcaaattgtccctgtttgcagatgacatgattgtatatctagaaaaccccattgtctcagcccaaaatctccttaagctgataagcaacttcagcaaagtctcaggatacaaaatcaatgtacaaaaatcacaagcattcttatacaccaataacagacaaacagagagccaaatcatgagtgaactcccattcacaattgcttcaaagagaataaaatacttaggaatccaacttacaagggacgtgaaggatctcttcaaggagaactacaaaccactgctcagtgaaataaaagaggatacaaacaaatggaagaacattccatgctcatgggtaggaagaatcaatattgtgaaaatggccatagtacccaagaatgggattttaaacatcttgatcaagcaacaggattctgcctcatctcctgacactgataatcagctagcagggcaatattgttgctctaactggcatcctgatgctgttatgaaactgcatgaggcattactcaagaagtgggttgtgattgaaaatagccagcagaaatttaaagcaaaaacttgggatcaacccaaatgcccatcagtgatagactggataaagaaaatgtggcacctatatgccatggaacactatgcagccataaaaaagaatgagttcatgccctttgtagggacacggatgaagctgtaa

SEQ ID NO: 118423 - DNA, 855 bp, Homo sapiens
atgtgcaaaccaaaaagagggctctcaccaggaaatgaattggttggcagcttgagtttggacttccaacctacagaatggagtggcagcaagttttactttttttctgtggaaacttgttaccacttccaggggcagatcactttccagttacacttaagagtttcacatcctcctcctcttcgtcttctgactctgcatcttcctccacagatactaaatactgtctatgaatatgtacaggccctgaaccacacttcaactcagcacatcaaaaagcttatccgccacgatcaagtcagcttcatccccaggatgcaaggctggttcaacatacgcaaatcaataaacataatccatcacataaacagaaccaatgacaaaaaccacatgattctctcagtagatgcagaaaaggcctttgataaaattcaacagcccttcatgctaaaaactctcaataaactaggtattgatgaaacgtatcacaaaataataagagctatctatgacaaacccacagccaatatcatactgaatgggcaaaagctggaagcattccctttgaaaaccggcacaagacaaggatgccctctctccccactcctattcaacatagcattggaagttctggccagggcaatcgggcaagagaaagaaataaacggtattccaataggaagagaggaagtcaaattgtctctgtttgcagatgacatgattgtacatttagaaaaccccattgttggtaaagggatcgattcaccaagaagagctaattatcctaaatatatatgcacccaatacaggagcacccagattcgtaaagccttagagacctacaaagagacttag

SEQ ID NO: 118424 - DNA, 1014 bp, Homo sapiens
atggggataaaccagagaagaaaagctgaaaattctaaaaatcagagtgcctcttctcctacaaaggattgcagctcctcaccagcaaaggaacaaagctggacggagaatgactttgaagagttgacagaagtaggcttcagaaggcaagcaaatgctgagagattttgtcaccaccaggtctgccctaaaagagctcctgaagagagcactaaacatggcaagaaacaaccagtatcagccactgcaaaaacatgccaaattgtaaagaccatcgatgctatgaagaaactgcatcaactgacagcctggcagagacacaacaacaaaaaagagaattttagaccaatatccctgatgaacatcgatgcaaaaatcctcaataaaatactggcaaaccgaatccagcagcacatcaaaaagcttatccacaatgatcaagttggcttcatccctgggatgcaaggctggttcaatatacacaaatcaataaacataatccatcacataaagagaaccaacgacaaaaaccacatgattatctcaatagatgcagaaaaggccttcaacaaaattcaacagcccttcatgctaaaaactctcaataaactaggtattgatggaacttatctcaaaataataagagctatttatgacagacccacagccaatgtcatactgaatgggcaaaaactggaagcattccctttcaaaactggcacaagacaaggatgccctctctcaccactcctattcaacatagtgttgaaagttctggccagggcaatcaggcaagagacagaaataaagggtattcaattagcaaaagaggaagtcaaattgtctctgtttgcagatgacatgattgtatatttagaaaaccccatcatctcagcccaaaatctccttaagctgataagcaacttcagcaaatctcaggatacaaaatcaatgtgcaaaaatcacaagcattcttatacaccattaacagacaaacagagagccaaatcatga

SEQ ID NO: 118425 - DNA, 1235 bp, Homo sapiens
atacaagtaggaaaagtcgccagaagacaagagctgtagggaaaaccaccaaccctatcttcaaccacactatggtgtatgatgggttcaggcctgaagatctgatggaagcctgtgtagagcttactgtctgggaccattacaaattaaccaaccaatttttgggaggtcttcgtattggctttggaacagaaatacaaaccaccatcagagaatactataaacacttctatgcaaacaaactagaaaatctagaagaaatggataaattcctggacacacacaccctcccaagactaaaccaggaagacgttgaatccctgaatagaccaataacaagttcagaaatggaggcagcaattaatagcctagcaaccaaaaaaagtccaggaccagatggattcacagccgaattctaccggaggtacaaagaggagctggtaccattcgttctgaaactatcccaaacaacagaaaaagagggactcctccctaactcattttgtggggccaacatcaacctgataccaaaccctggcagagacaacacaagaaaagaaaatttcagaccaatatccctgatgaacattgataccaacattctcaataaaatactggcaaacagaatccagcagcacatcaaaaagcttatcgactatgatcaagtcagcttcatccctgggatgaaaggctggtgcaacatatgcaaatcaataaacgtaatccatcacgtaaacagaaccaatgacaaaaaccacatgattatctcaatagatgcagaaaaggccttcgaaaaaattcaacagcccttcttgctaaaaaccctcaataaactaggtattgatggaacgtatctcaaaataataaaagctatttataacaaacccacagccaatatcatactgaatgggcaaaagctggaagcattctctttgaaaactggcacaagacaaggatgccctctctcaccactcctattcaacatagtattggaagttctggctaggacaatcaggcaagagaaaaaaaaaaatggtattcaaataggaagagaggaggtcaaattgtctctttttgcagatgacatgattgtatatttagaaaacctcatcgtctcagcccaaaatctccttaagctgataagcaacttcagcaaagtctcaggatacaaaatcaatgtgcaaaaatcacaagcattcctatacaccaataataaagagccaaatcatgagtga

SEQ ID NO: 118426 - DNA, 2853 bp, Homo sapiens
atgggcatgggacctgccaagccaggcatgggagggaatctcctggtctgctggttgcaaagaccatgggaaaagcgcagtatttgggcagaagtgtaccgttcctccaggtatagtcactcatggcttcccttgtctaggaaaggttgtgattttagtggaacctgcaggcagactttaagtatcttaacccagccattgagacagtggggcttagaaggtatcaagaaaccaaacagctggattataagtgaagagtcagtcagtaatggagggcctccgctgctgatacccaggcaaacagcgtctggagtggacctccagcaaactccaacagacctgcagctgagggtcctgactgttagaaggaaaactaacaaacagaaaggaatagcatcaacatcaacaaaaaggacatccacaccaaaaccccatctgtacgtcaccatcatcaaagaccaaagttacataaaaccacaaagatggggaaaaaacatagcagaaaagctgaaaattctaaaaatcagagtggctctctccctccaaaggaatgcagctcctcaccagcagtggaacaaagctggacggagaatgagtttgatgagttcacagaagaaggcttcagaagtgattgaaagtcaaatgaatgaaataaagggagaagagaagtttagagaaaaaagagtaaaaagaaacgaacaaagcctacaagaaatatgggactatgtgaaaagaccagatctacgtctgattggtgtacctgatagtgacggggagaatggaaccaggttggaaaacactctgcaggatattatccgggagaatttccccaacctagcaaggcaggccagcattcaaattcaggaaatacagagaacgccacaaagatactcctcaagaagagcaactccaagacacataattgtcagattcaccaaagttgaaatgaaggaaaaaatgttaagggcagccagagagaaagaactcaagattaagaaactcactcaaaactgcttaactacatggaaactgaacaacctgctcctgaatgactactgggtacataatgaaatgaagggagaaataaagatgttctttgaaaccaatgagaacatagacacaacataccagaatctctggcatacatttaaggcagtgtgtagagggaaatttatagcactaaatgcgcacaagagaaagcaggaaagatctaagattgacaccctagcatcacaattaaaagaaatagagaagcaagagcaaacacattcaaaagctagcagaagacaagaaataactaagatcagagtagaactgaaggagatagagacacaaaaaagccttcaaaaaatcaatgaatccaggagctggttttttgaaaagatcaacaaaattgatagaccactaccaagactaataaagaagaaaagagagaagaatcaaatagacacaataaaaaatgataaaggggatatcaccaccaatcccacagaaatacaaactatcagcagagaatactataaacacctctatgcaaataaactagaaaatctagaagaaatggataaattcctggacacatacaccctctcaggactaaacaaggaagaagttgaatctctgaatacatcaataacaggctctgaagttgaggcaataattaatagcataccaaccaaaaaaaagtccaggaccagatggattcacagccgaattctaccagagcttagcagagacacaacaaaaaaagagaattttagaccaatatccctgatgaacatcgatgtgaaaatcctcaataaaatgctggcaaacggaatccagcagcacatcaaaaagcttatccaccatgatcaagtgggcttcatccctgggatgcaaggctggttcaacatacacaaatcaataaatgtaatccagcatataaacagaaccaaggacaaaaaccacatgattatctcaatagatgcagaaaaggcctttgacaaaattcaacagcccttcatgctaaaaactctcaataaattagatattgatgggacatatctcaaaataataagagctatttatgacaaacccacagccaatatcatactgaatgggcaaaaactggaagcattccctttgaaaagcagcacaagacagggatgccctctctcaccacacctattcaacatagtgttggaagttttggccagggcaatcaggcaagagaaagaaataaagggtattcaattaggaaaagaggaagtcaaattgtccctgtttgcagatgacatgattgtatatttagaaaaccccatcatctcagcccaaaatctccttaagctgataagcaacttcagcaaagtctcaggatacaaaatcaatgtgcaaaaatcacaagcattcctatacaccagtaacagacaaacagagagtcaaatcatgagtgaactcccattcacaattgcttcaaagagaataaaatacctagaaatacaacttacaagggatgtgaaggacctcttcaaggagaactacaaaccactgctcaacgaaataaaagaggacacaaacaaatggaagaacattccatgctcatggataggaagaatcaatattgtgaaaatggccatattgcccaaggatgacaaaaaatgtgtcagtgatgatcatgatgctgacaatgacagtgacaatgacggcgataactttctgcaagtctcagcagcaaaatcttacatctctcattactttcctgtgataaggctcctcacagcatactggaggagactctccaacagccttgaaaaggcaaagggccatgatgtggaagggccatgtggcaaggaattagtagttggcctttag

SEQ ID NO: 118427 - DNA, 748 bp, Homo sapiens
gaagattcgatggacatggacatgagccccctgaggccccagaactatcttttcggttgtgaactaaaggccgacaaagattatcactttaaggtggataatgatgaaaatgagcaccagttatctttaagaacggtcagtttaggggctggtgcaaaggatgagttgcacattgttgaagcagaggcaatgaattacgaaggcagtccaattaaagtaacactggcaactttgaaaatgtctgtacagccaacggtttcccttgggggctttgaaataacaccaccagtggtcttaaggttgaagtgtggttcagggccagtgcatattagtggacagcacttagtagctgtggaggaagatgcagagtcagaagatgaagaggaggaggatgtgaaactcttaagtatatctggaaagcggtctgcccctggaggtggtagcaaggttccacagaaaaaagtaaaacttgctgctgatgaagatgatgacgatgatgatgaagaggatgatgatgaagatgatgatgatgatgattttgatgatgaggaagcttgaagaaaaagcgccagtgaagaaatcttattacgagatacttccagccaaaattgcacaaaagtcaaatcagaatggaaaagactcaaaaccatcatcaacaccaagatcaaaaggacaagaatccttcaagaaacaggaaaaaactcctaaaacaccaaaaggacctagttctgtagaagacattatagca

SEQ ID NO: 118428 - DNA, 3743 bp, Homo sapiens
atgggagaatttaacaccccactctcaacattagacagaccaatgagacagaagtttaacaaggatattcaggacttgaactcagctctgcaccaagcagacctaatagacatctacagaactctccaccccaaatcaacagaatatacattcttctcagcaccacatcacacttattccaaaactgaccacacagttgtaagtaaagcactcctcagcaaatgtaaaagaacagaaatcacaacaaagtgtctctcagaccacagtgcaatcaaattagaattcaggattaagaaactcactcaaaactgcacaattacatggaaactgaacaacctgctcctgaatgactatggggtaagtaacgaaatgaaggcagaaacaaagatgttgtttgaaaccaatgagaacaaagacacaacataccagaatctctgggacgcaattaaaggagtatgtagagggaaatttatagcactaaatgcccacaagagaaagcaggaaagacctaatatcaacaccttaacatcacaattaaaagaactagagaagcaagggcaaacaaattcaaaagctagcagaaggcaagaaataactaagatcagagcagaactgaaggagatagagacacaaaaaacccttcaaaaaatcagtgaatccaggagctggttttttgaaaagatcaacaaaattgatagactgctagcaagactaataaagaagaaaagagagaagaatcaaatagacgcaataaaaaatgatacaggggatatcgccaccgatcccacagaaatacaaactaccatcagagaatactataaacacctctatgcaaataaactggaaaatctagaagaaatggatgaattcctggacacatacaccctcccaagactaaaccaggaagaagttgaatctctgaatagaccaataacaggctctgaaattgaggcaataattaatagcttaccaaccaaaaaaagtccaggaccagatggattcacagccaaattctaccagaggtacaaagaggagctggtaccattccttctgaaactattccaatcaatagaaaaagagagaatcctacctaactcattttatgaggccagcatcatcctgataccaaatcctggcagagacagaacaaaaaaagagaattttagaccaatatccctgatgaacatcaatgcaaaaatcctcaaaaaaattattggtaaacagaatccagcagcacatcaaaaagcttattcaccatgaccaagttggcttcatccctgggatgcaaggctggttcaacatatgcaaatcaataaatgtaatccatcacataaacagaaccagtgacaaaaaccacatgattatctcaatagatgcagaaaaggcctttgaccaaaatttcagcagcccttcatgctaaaaactctcagtaaactcggtattgatacaatgtatctcaaaataataagagctatttacgacaaacccatagccagtatcatactgaatgggcaaaaactgaaagcattccctttgaaaactggcacaagacagggatgccctctctcaccactcctattccaacatagtgttggaagttctggccagggcaatcaggcaggagaaggaaataaagggtattcaattaggaaaagaggaagtcaaattgtccctgtttgcagatgacatgattgtatatctagaaaaccccactgtctcagcccaaaatctccttaagctgataagcaacttcagcaaagtctcaggatacaaaatcaatgtggaaaaatcacaagcattcttatacaccaataacacacaaacagagagccaaatcatgagtgaactcccattcacaattgcttcaaagagaataaaatacctaggaatccaacttacaagggacgtgaaggacctcttcaaggagaactacaaaccactgttcaatgaaataaaagaggatacaaacaaatggaagagaattccatgctcatgggtaggaagaatcaatattgtgaaaatgcccatactgcccaaggtaatttatagattcaatgccatccccatcaagctaccaatgagtttcttcacagaattggaaaaaaactacattaaagttcagatggaaccaaaaaagagcccacatagccaagacaatcctaaacaaaaagaacaaagctggaggcttcacgctacctcacttcaaactatactacaaggctacagtaaccaaaacagcatgcccgtctttcaaaacaaaagactataatttcatcaaagctgtttgctttgcccttggtcggcttctcagaataatcacctctacagtctgcaacgtgtcttggaaatgtgggctttcccggggttgtaaagcgttacagctactgctagaaggaggcttttcagggcatgccattctgcacatggtttctgagacttttaaatcggagagggagctcaaagaccacgaaatcatacctgttaactttacaggtgaggaaaggaaggctcagaggcactgtggggagccgctgaaagattttaaacagggatgggccaacggggctctctggtctgcggcttcattcctgaagtcagtgagaccacgaacctactggaaggaagaaactccagacacatctgaacatctgaagaaaccaactccagacacatcatctttaagaactgtaacactcactgtgaggttccgcggcttcattcttgaagtcagcgagaccaagaacccaccagaaggaaccaattccagacacattttggcaaccacaaagggactattgactatcgccaagtggaggaaaactagcgtttctgctgctgcgtcagtgagcgcaactattccgatcagcagggtccagggaccgttgcgggttcttgggcaagaggtgtttctgctgcttcatcgcctccctatagctccccttcctattaatgataagcctcctctaatcttccccacccagaaggaaataaacaaagacatctccaaaggaccacaaaaccctctgggctatcagttatgtccccttcatgctatagggggaggagaatttggcgcaacctggaattggaaaaaactacttaagttcatatggaaccaaaaaagagcctacattgccaagacaatcctaagccaaaagaacaaagctggaggcttcatgctacctgacttcaaactatactacaaggctacagtaaccaaaacagcattgtactggtaccaaaagagagatatagaccaatggaacagaacagagcccttagaaataataccacacatctacaaccttctgatctttgacaaacctgacaaaaacaagaaacggggaaaggattccctacttaataaatggtgctgggaaaactggctagccatatgtagaaagctgaaactggatcctttccttacaccttatacaaaaactaattcaagatggattaaagacttaaatgttagacttaaaaccataaaaaccctagaagaaaacctaggcaataccattcaggacataggcatgggcaaggacttcatgactaaaacaccaaaagcaatggcaccaaaagcaatggcaacaaaagccaaaattgacaaatgggatctaattaacctaaaaagcttctgcacagcaaaagaaactaccatcagagtgaacaggcaacctacagaatgggagaaaatttttaccatctacccatctgacaaagggctaatatccagaatctaa

SEQ ID NO: 118429 - DNA, 1092 bp, Homo sapiens
ttatgctgaccaccagatggcacagttgttccacaccagctggttgccttcgatagtggctatttctgaaggcaatgagcccttctgatgtgatgcatgctgtaactggagaatatgaaagcagtcatttaagcagttcatagttgccatggaagtagctttgagcattaagagatcctggtccaaggaacgatgcagtttgccaccatcaaatggcttggtatgaaaagtgatgctggctgaatatccagtttttgcacagttgacactgactttgccacccagttcggcttcctgggaacccagtcgagggcccgggcccaggggcataagaggaagttgtcccgagtggctcgcctctggccctgggagaggcggccccgggagccggcgtcccgcccccggcggcctcattccccgaccctcctccccggctgcgcgcgccggccctggctgtatctcgggggctgcggcgggaactgccgagcgggcttgactggacgcactgcctgaggaccttaccctcgctaatagtccagattctgcaacaggctgctcttctgggactgccaccggcttactctgatcagttgcaaagggctggtcagctccatttttatagtggtttgataaagatatctttggttctaaccactcgattgtcgttctggggtaccactgagtagagctgtgagaagagggccgctgtcctccaaaactcagaatgttagatccactgacagcttgtaccatgtgcctgcaaaagccgcagacactcaatgccagcccgtgaaagcagccaggagggaggctgtgccctgcaaagccacggggcggagctgcccaagaccatgggaacccacctcttccatcagggtgacctgcctcagcttgtttcggttccttgacattttcttcactgttgtgcagaaccacacagtctgggagttggaggagctttccaatagcttcagtatgatgctgtgtacatatctgaagtctgctaacccagtgctgtcgctcttttgcatctgtagctgaaatcacccagtttgtgggtgtcagtgtgaaaatgtagatacctaaggccat

SEQ ID NO: 118430 - DNA, 644 bp, Homo sapiens
ttttaagatttgatctgaatatgataccggttgctaaatcacacggcggctggggcgggactgtcaaatggtccagaaaaggaagatacacattcccacagaagttaaacttttaagagggcaggggaagcaacgaggacagatatccttcacatgtatctctctcctttccggcaaaagcaaggaggaaaaagcatccggcgaggaagacttaagtgacatactcaaaagagaaggagtgtggggaggtcgcagattctgtagccaagacggctttggaaaaggacggagcgccacggacaggggacccgcggcctaacctcggggctgacccgccgcgctccctcgtctcctccgcaggtcctcaggcagtgcgtccagtcaagcccgctcggcagttcccgccgcagcccccgagatacagccaggggccggcgcgcgcagccggggaggagggtcggggaatgaggccgccgggggcgggacgccggctcccggggccgcctctcccagggccagaggcgagccactcgggacaacttcctcttatgcccctggcccgggccctcgactgggttcccaggagccggtgagtctctcgcgctatctccagacccaagcgcgaatgccagggccgcggccgc

SEQ ID NO: 118431 - DNA, 1023 bp, Homo sapiens
atgcacgatgtccttagcaaatacaacacagcccgctggtatcgcctcttccttcactacctccacaaccacttgtggcagaggaggagcctccagttgcacttggccaaggcggcttttgcctgcgacaagcacttctcatcttcccatcctctgacggagccagtcccacccaccacgtggacgtgggtgttgtctgtggaccaagagacagcaaaaaatgtgcagaactacgtacacatccgtgggccggaaagcactttccctatagattctggtgccctgcggctctcggatggggagatgcgcgcactccagacccccacaggcccccagagcacggtggagggtcacacccatcttcagtctctgctcaccatgacagagtcacagccacacccgggacagaacctgggctccgggcagcaggtaataggaggatattctacccagggccggaacaagccaggtccagcctcaactgctctgtggctatggcaacgcttccagaaccccagctgctctaacaccaggcccagctcctccaacccaagcgtctctacccaactgtgggatctgtccgcacctccagatggggaggcccacgtctccgtgtcacctgagggcggccaccccagctcctcgctctacatctccctctccccaccgccaccttccgcccctgccctgcggctcccaccgcccctgccctgctgctcccaccgcccctgctctgctctgctgctccttccgcccctgccctgcggctcctacggcccctgccctgctgctccttccgcccccgccccgctgctccttccgcccccgccccgaggctccttccgcccctattggtctgctccttccgcccctgcccggcggctccttccgcccctgccggtctgctccttccacccctgctctgctgctctgggctttccccgaggctttgctgcccacactcttcttgctcgtcagacccaccaaggttgcagagaaaggcagacagcagcagatggctag

SEQ ID NO: 118432 - DNA, 984 bp, Homo sapiens
atgtcgacatccctttctcacttccgcagttgcgacactcagagttttggagaggtcttccgggtcctgcaggagcagtctacttccttcagatgtgtctgtgaggttttgtctgcagctcatcctgctacatttcttgtttccctgatcaggaagcgaggcagcttaggcctgctctatggagcatccctgtgggagactctggcctgccttagtgacgtgatccaaagagtgatcccaggtaggcaattgccctggtggaatgccttgccagagcagcatgtgccaggcccacatggaggatcaacgcagtggctgaacacaagggaggaactggcacttggagtgcagacatctgaaacttgggatgtggtggctcaagacccccagaagtttcctgctaaagacctaggctgtgtcttgctccagtacgtgaatgaccttctgctaggactctccatgtcagtcggttgtgcaaaagggatggatgccctgcacctggaggactgtgggtataaggtgtccaagaagaaagctcagacctgcagacagcagtattgtgtggaaaagaatgtgggtactgctcttgtgtcatttgggctacttggaaaaaaagatgaaacagatcctgtttggctccaaaaagggaaaggaagcccctcctgcatgattggaagcagcaatcctttagaattagtaatcacaaacccctcagacccaaaatggaaaaaaggagaaaacgtatctctaggcattgatggaaaaggactagaccctaaggtaaacattttaataaaagaagagactcaaaaacgctctccagagccagtatttcagactttctatgatgaactaaatgtaccagtgcctgaaattccaggaaaaactagaaatttgtttttgcaattagccaagcatgtagcccagtctctaaaagtaacttcatgttatgtttgtggaggaactgtaacaggagatcgatga

SEQ ID NO: 118433 - DNA, 847 bp, Homo sapiens
ctgctctgaaaccaggtctctaagtgaacatttctcaggcatggatgcatttgagagtcaaattgttgagtcgaagatgaaaacctcttcatcacatagctcagaagctggcaaatctggctgtgacttcaagcatgccccaccaacctatgaggatgtcattgctggacatattttagatatctctgattcacctaaagaagtaagaaaaaattttcaaaagacgtggcaagagagtggaagagtttttaaaggcctgggatatgcaaccgcagactgcttctgcaacatgagatgagaaccaccttccaagaggaatctgcatttataagtgaagctgctgctccaagacaaggaaatatgtatactttgtcaaaagacagtttatccaatggagtgcctagtggcagacaagcagaattttcataagtcctgcttcccgatgccaccattgcaacagtaaactaagtttgggaaattatgcatcacttcatggacaaatatactgtaaacctcactttaaaccaacttttcaaaatcccaaaggaaattatgatgaaggttttggacataaagcagcataaagatagatggaactggcaaaaacccaaagcagattcagtggactttattcctaatgaagaaccaaatatgtgtaaaaatattgcagaaaacacccttgtacctggagatcgtaatgaacatttagatgctggtaacagtgaagggcaaaggaatgatttgagaaaattaggggaaaggggaaaattaaaagtcatttggcctccttccaaggagatccctaagaaaaccttaccctttgaggaagagctcaaaatgagtaaag

SEQ ID NO: 118434 - DNA, 870 bp, Homo sapiens
ggaatgtactagcaatggctctgaagaaacagactgacagagcagctgctggcagtcctgtgcagcctgctccaaaaccaagcctcagcagaggcgttatggtaacaggggggaagttcaatcatctctcctgatacaaatctcttaaacattaaaggaagccattcaaagagcaaaaatttacactttttcttttctaacaccgtgaaaatcactgcattttccaagaaaaatgagaacattttcaattgtgatttaatagattctgtagatcaaattaaaaatatgccatgcttggatttaagggaatttggaaaggatgttaaaccttggcatggtgaaacaacagaagctgcccgcaataatgaaaacacaggttttgatgctctgagccatcaatgtaccagctaagcccttgtttccccagagtggaggtgcagtcagaacaactcacggtgggaagagcagattaaaagaaacaggtgctaccagtgacactgagtaaaatatctatggccactgacagtccacacttaggcactgagagatattgatgttctgaaataagattttatgaatttggatacccttttgaggaacttgatgtaaacatggtgttcagaaatctcgtgtctatctcaatgggatatttcttgtattacaccttgtcatttttttcacaatttatttacatctacttttgtttgaactggaatgaagagatgaaacactatggatatgttttccattcaaatggcactttagcatattgttctgttttcctgtaaaacatcatgggtgtgatttttatactgctgatacttgtcacaattattataacttctctgtaatttcctctgaaataaaatt

SEQ ID NO: 118435 - DNA, 609 bp, Homo sapiens
atgaaatccaagaagtacataataattttcagcaacaatgaaggaactgaggtaaatcgtgaaaacacagagtatagatggaatggaaacctgaggatcacagaaaaaggtctaaagctagaaggagactctgattcttacaacctctctacgccaaagaaatccagtcccgaccaggtcttgggacccaagaacagagctgtcagactctcagcagctgctcgagtcgtggccagcagcagcatgctgaagctgcctgagatgaccaagtttccagaggggaaggggagctgccatcacttgccccagccgttttcccctgctggtgccctggagactaggtggtttggtgggaaagaagtccccacagtgcaacacagcagctgtagcagattgtggcagactgcttctttaggggttgccagatatttatgcaagagcattccagccagcatcaagtcactacccttctgggacgagctcccagaggaaggagcagacagccgtccttgctgttctgcagactcactggtgacacctccaggtgcaggaaaagacccaggagtggccccccacaaactgcagcagctgtacagaagaggggcctga

SEQ ID NO: 118436 - DNA, 922 bp, Homo sapiens
cggacgcgtgggcaaccgtcccttttgtggtggcctgatgggattatcttaatcccaatgttgccctgaaatttatgtccaggattcaaaaagtttaggactgctaagagacattactgccgggagtgttgagtgaagggaccaggtggagatgatgcctcaggagcagtacactcaccaccggagcaccatgcctggctctgtggggccacaggtatacaaggtggggatttatggctggcggaaacgatgcctgtatttctttgtcctgctcctcatgattttaatactggtgaacttggccatgaccatctggattctcaaagtcatgaacttcacaattgatggaatgggaaacctgaggatcacagaaaaaggtctaaagctagaaggagactctgaattcttacaacctctctacgccaaagaaatccagtcccgaccaggtaatgccctgtacttcaagtctgccagaaatgttacagtgaacattctcaatgaccagactaaagtgctaactcagcttataacaggtccaaaagccgtagaagcttatggtaaaaaatttgaggtaaaaactgtttctggaaaattgctcttctctgcagacaataatgaagtggtagtaggagctgaaagattacgagttttaggagcggagggcacagtgttccctaaatctatagaaacacctaatgtcagggcagaccccttcaaagaactaaggttggagtccccaacccggtctctagtgatggaggccccaaaaggagtggaaatcaatgcagaagctggcaatatggaagccacctgcaggacagagctgagactggaatccaaagatggagaggtgagggatgagaaggacagaagttcaaagagctacagcttcaacaggccaacccttcccataactggttga

SEQ ID NO: 118437 - DNA, 1680 bp, Homo sapiens
caaatgtcagtgtacacccgagacatcagtggctgaaagctacagtcttaggttgacttgcggactttttttaaaatacaaagtcaagcccccgggagccatttcttcagtgggtcagtgcagactggctccttgctgggggtctgacgctcgctgggaccagtcctctgtttctgtggttctttatctgttcactgactgtttggcagttgaagacttgctccccaaggccctcagtctttgccacttcattcagagcacttaattaaaagagaaaaggaatgcagttctgatgcagttataactagtaaaaagaaccaataaaaatgactataaagtgcctgacaaatagaaaatgtttagtaataccaaggtactttatgggggaagggtttacctcttggcacaggatggcagctccccccccccaccccaaccccaggcctttccctccatgatgcccttggcagggagctcttgcccagccagaacaggtgagtgaaaagattctgctgtcttggagtcacctgacttcttactacaagaacatccttcagaagtgaaaatcacagacatgtaggtcttttgctggtgatgacagataacacaagagataaagaatactttggtgatgagagtaaaagggaaaatgaggaaaagacagtagaaaaaagtataggagaaaagcaggccacactgaccactcatgccaacataatcacaataaggcactgcgtaaagccagagccagacttctctgaccacctcaacctgttgttaggtagggcagacatcacaggtgaggagatggcggcccagagaagcagtgtggagaagttggccaatggtaacatagcccttgtggattctctcagaagcaggagtttggaggaaggtgattctgaccctcataaacgactttcaggggctcaagacatcaagacaacagtggaggaagtaattgcagatgtagtggaaatagcaagagaactagaattagaagtggagcctgaagatgtgactgaattcctgcaagctcatgagaaaacgttaacagatgtggagttgtttcttataaatgagcaaataaagtggtttcttgagatgaaatctactcctagggaagatgctgtgatcattgctgaaacgataacaaaggttttagaatatgacataaatttagtgacaaagcagcagcagggtatgagacaactgacaccaattttgaaagaagtcctactgtgggtaaaatgccatcaaacagccttgcatgctacagagaaacctttcataaaaggaagaatcaatccatgtggcaaaattcatacttgtctcaatttaagaaattgtggccagcttctcataagggaggaggaggaggaagacaaggaggaggaggagcaatatgaggagaaggaagaggaggaggaagaggaggaggaagaggaggaagaggaggaggaggaagaggaggaggaggaagaggaggaggaagaagaggaggaggaagatgaggaggaggaagacaaggaggatgaggaggaagacaaggagaaggaggaggaagaagacaacaaggaggaggaggaggaggaagacaaggagaaggaggaggaagaagacaaggagggagaaggaagacaaggaggaggaggaagacaaggaggaggaggaagatga

SEQ ID NO: 118438 - DNA, 495 bp, Homo sapiens
atgaagacactggaacatttagaatctatagagagtgctggtgctgtaaaaaaggctagaggtttcttggaatttgtggaggattttattcaggtttctaagaatctcattggaaaagtaattggaaaaaatggcaaagttattcaagaaatagtggacaaatctgatatggttccggtgagaattgaaggggacagtgaaaataaactacccagagaagacaaagatgatcgagacagccgacatcagcgtgacagcaggagatgcccaggaggaagatgcagaagtgtttcagggcgtcgaggtcgtggtggaccacgtggtggcaaatcctccatcagttctgtgcccaaagatccagacagcaatccatacagcgtacttgataatcagaatcagatcagactgcagacactgatgccagcaaatctcatcacagtactaatcgtcatacgaggtctcgtagacgaaggactgatgaagatgctgttctga

SEQ ID NO: 118439 - DNA, 804 bp, Homo sapiens
acggaatctgagcgtaaagacgagctgagtgattggtcattggcaggagaagatgatcgagacagccgacatcagcgtgacagcaggagacgcccaggaggaagaggcagaagtgtttcagggggtcgaggtcgtggtggaccacgtggtggcaaatcctccatcagttctgtgctcaaagatccagacagcaatccatacagcttacttgataatacagaatcagatcagactgcagacactgatgccagcgaatctcatcacagtactaaccgtcgtaggcggtctcgtagacgaaggactgatgaagatgctgttctgatggatggaatgacctgaatctgatacagcttcagttaatgaaaatgggctaggcaaaagatgtgattgaagagcatggtccttcagaaaaggcaataaacggcccaacttagtgcttctgggcgatgacatttctaagctacagcgtactccaggagaaagaaaaagattaataccttaaaagaaggaaaacactcaagaagcagcagtcctgaatggtgtttcataaactgaagaagttcctagtttacagttcttttacattacatttacaatagtgcttgtacaagcttgccaaagatagaatatggatcgccagtctttacatcgcactttcagttcctccatttggaattcaaataaggggagggatcctgaagaaatcatatgttaaacatactttgacacctactgtgttataaaatatatcatcagatgtgccttgagaatagtatatgtaacattaaaaaaaagttgctggct

SEQ ID NO: 118440 - DNA, 2065 bp, Homo sapiens
atggcggagctgacggtggaggttcgcggctctaacggggctttctacaagggatttatcaaagatgttcatgaagactcccttacagttgtttttgaaaataattggcaaccagaacgccaggttccatttaatgaagttagattaccaccaccacctgatataaaaaaagaaattagtgaaggagatgaagtagaggtatattcaagagcaaatgaccaagagccatgtgggtggtggttggctaaagttcggatgatgaaaggagaattttatgtcattgaatatgctgcttgtgacgctacttacaatgaaatagtcacatttgaacgacttcggcctgtcaatcaaaataaaactgtcaaaaaaaataccttctttaaatgcacagtggatgttcctgaggatttgagagaggcgtgtgctaatgaaaatgcacataaagattttaagaaagcagtaggagcatgcagaattttttaccatccagaaacaacacagctaatgatactgtctgccagtgaagcaactgtgaagagagtaaacatcttaagtgacatgcatttgcgaagtattcgtacgaagttgatgcttatgtccagaaatgaagaggccactaagcatttagaatgcacaaaacaacttgcagcagcttttcatgaggaatttgttgtgagagaagatttaatgggcctggcaataggaacacatggtagtaacatccagcaagctaggaaggttcctggagttaccgccattgagctagatgaagatactggaacattcagaatctacggagagagtgctgatgctgtaaaaaaggctagaggtttcttggaatttgtggaggattttattcaggttcctaggaatctcgttggaaaagtaattggaaaaaatggcaaagttattcaagaaatagtggacaaatctggtgtggttcgagtgagaattgaaggggacaatgaaaataaattacccagagaagacggtatggttccatttgtatttgttggcactaaagaaagcattggaaatgtgcaggttcttctagagtatcatattgcctatctaaaggaagtagaacagctaagaatggaacgcctacagattgatgaacagctgcgacagattggtatgggtttcagaccttcttccaccagagggcctgaaaaagagaaaggatatgccactgatgaaagtaccgtctcttctgtacaaggttctaggtcttatagcggaagaggcagaggtcgtcggggacctaattacacctccggttatggtacaaattctgagctgtctaacccctctgaaacggaatctgagcgtaaagacgagctgagtgattggtcattggcaggagaagatgatcgagacagccgacatcagcgtgacagcaggagacgcccaggaggaagaggcagaagtgtttcagggggtcgaggtcgtggtggaccacgtggtggcaaatcctccatcagttctgttcaatatagatcaaacattcataattgcagtactcttaaacgaatatttcttgcctctgacatgaatatagtgctcaaagatccagacagcaatccatacagcttacttgataatacagaatcagatcagactgcagacactgatgccagcgaatctcatcacagtactaaccgtcgtaggcggtctcgtagacgaaggactgatgaagatgctgttctgatggatggaatgactgaatctgatacagcttcagttaatgaaaatgggctagatgatagtgaaaaaaaaccccagcgacgcaatcgtagccgcaggcgtcgcttcaggggtcaggcagaacgatagacagccagctatagatttcatttataaagaagttgaaaaagttgtctccctttggcaggcaaaagatgtgattgaagagcatggtccttcagaaaaggcaataaacggcccaactagtgcttctggcgatgacatttctaagctacagcgtactccaggagaagaaaagattaataccttaaaagaagaaaacactcaagaagcagcagtcctgaatggtgtttcataa

SEQ ID NO: 118441 - DNA, 2144 bp, Homo sapiens
tgcggttccaacatggcggacgtgacggtggaggttcgcggctctaacggggctttctacaagggatttatcaaagatgttcatgaagactcccttacagttgtttttgaaaataattggcaaccagaacgccaggttccatttaatgaagttagattaccaccaccacctgatataaaaaaagaaattagtgaaggagatgaagtagaggtatattcaagagcaaatgaccaagagccatgtgggtggtggttggctaaagttcggatgatgaaaggagaattttatgtcattgaatatgctgcttgtgacgctacttacaatgaaatagtcacatttgaacgacttcggcctgtcaatcaaaataaaactgtcaaaaaaaataccttctttaaatgcacagtggatgttcctgaggatttgagagaggcgtgtgctaatgaaaatgcacataaagattttaagaaagcagtaggagcatgcagaattttttaccatccagaaacaacacagctaatgatactgtctgccagtgaagcaactgtgaagagagtaaacatcttaagtgacatgcatttgcgaagtattcgtacgaagttgatgcttatgtccagaaatgaagaggccactaagcatttagaatgcacaaaacaacttgcagcagcttttcatgaggaatttgttgtgagagaagatttaatgggcctggcaataggaacacatggtagtaacatccagcaagctaggaaggttcctggagttaccgccattgagctagatgaagatactggaacattcagaatctacggagagagtgctgatgctgtaaaaaaggctagaggtttcttggaatttgtggaggattttattcaggttcctaggaatctcgttggaaaagtaattggaaaaaatggcaaagttattcaagaaatagtggacaaatctggtgtggttcgagtgagaattgaaggggacaatgaaaataaattacccagagaagacggtatggttccatttgtatttgttggcactaaagaaagcattggaaatgtgcaggttcttctagagtatcatattgcctatctaaaggaagtagaacagctaagaatggaacgcctacagattgatgaacagctgcgacagattggttctaggtcttatagcggaagaggcagaggtcgtcggggacctaattacacctccggttatggtacaaattctgagctgtctaacccctctgaaacggaatctgagcgtaaagacgagctgagtgattggtcattggcaggagaagataatcgagacagccgacatcagcgtgacagcaggagacgcccaggaggaagaggcagaagtgtttcagggggtcgaggtcgtggtggaccacgtcggtggcaaatcctccatcagttctgtgctcaaagatccagacagcaatccatacagcttacttgataatacctgaatcagatcagactgcagacactgatgccagcgaatctcatcacagtactaaccgtcgtaggcggtcatccgtagacgaaggactgattgaagatgctgttctgatgaatggaatgactgaatctgatacagcttcagttaatgaaaatgggctagtcacagttgcagattatatttctagagctgagtctcagagcagacaaagaaacctcccaagggaaactttggctaaaaacaagaaagaaatggcaaaagatgtgattgaagagcatggtccttcagaaaaggcaataaacggcccaactagtgcttctggcgatgacatttctaagctacagcgtactccaggagaagaaaagattaataccttaaaagaagaaaacactcaagaagcagcagtcctgaatggtgtttcataaactgaagaagttcctagtttacagttcttttacattacatttacaatagtgcttgtacaagcttgccaaagatagaatatggatcgccagtctttacatcgcactttcagttcctccatttggaattcaaaaaggggagggatcctgaagaaatcatatgttaaacatactttgacacctactgtgttataaaatatatcatcagatgtgccttgagaatagtatatgtaacattaaaaaaaagtaactggctaaaaaaaa

SEQ ID NO: 118442 - DNA, 421 bp, Homo sapiens
tccacgcgtccgggattcggacacagaggacgactctgaagccgaacattttgaaagtttcattcaccccactgcaatgatgtttaccagcactattaacttactgcagactctttgtctgtctgctggagttcatgctgagatcatgcagagtgaagccaccaagactttatgcggactgctgcaaatcttctccaaacaggctggtgtacagggagcaacaccggagctggtgcacgctggggtttgtgcagagcatcgctctcacgctgcaggtgtgcggcgccctcagctccctgcagtggatcacgctgctcatgaaggtcgtggaagggcacgcacccttcactgccacctcgctgcagaggcagatcttagctgtgcatttgttgcaagcagtccttccgtcatgggacaagag

SEQ ID NO: 118443 - DNA, 417 bp, Homo sapiens
ggcacgaggggcgcttcacaggcgcagcgacagcgacagcgacagctcgaacctgagtcccaggattccggggactggagggcagcgccggcagccaagatgcaacttctccaggagtgcttatgttacccaaagagaaacagatgcacaaagagaaggaatgagatgctcggggatattttatcaaggaaaccagcaaaccgtctttttcctgaagaccttttaagattaggacaagcagctgtttataaaagcagaacagtgttaagatttgaactgtaaagtaggatcatgctttgaagtatattctagctaaaagcaggggataaactagataaaacttggagactctaagacctgaccctgattaagtgggcctacaagtgagaatctgaagaacagctctctggctgaaca

SEQ ID NO: 118444 - DNA, 516 bp, Homo sapiens
ctgggagaggacgggtggataagagtccagtgggacacaggcagcaccaactcctacaggatggggaaagaaggaaaatacgacctcaagctggcagagctgccagcccctgcacagccctcagcagaggattcggacacagaggacgactctgaagccgaacaaactgaaaggaacattcaccccactgcaatgatgtttaccagcactattaacttactgcagactctttgtctgtctgctggagttcatgctgagatcatgcagagtgaagccaccaagactttatgcggactgctgcgaatgttagtggaaagcggaacgacggacaagacatcttctccaaacaggctggtgtacagggagcaacaccggagctggtgcacgctggggtttgtgcagagcatcgctctcacgctgcaggtgtgcggcgccctcagctccccgcagtggatcacgctgctcatgaaggttgtggaagggcacgcacccttcactgccacctcgctgcagagg

SEQ ID NO: 118445 - DNA, 1527 bp, Homo sapiens
atggcaggggaggcctcggaatcatggcgagaggcaaaaggcacttcttatgtagcagcagcaagagaaaatgaggaagatgcaaaagcagaaccccccacccccggaataaaaccatcagatctcgtgagacttattcactaccaagagaacagtatgggggaaaccgcccccatgattcaaattatctcccactgggtccctcccacaacacatgggatttatgggagtacaattcaagatgaaattcgggtggggaccgcaagcggtgcccagcggccgccccgctgtccaccccgacctcagaggctccagggagacgcccggggctcaggaatcctaccttggctgccggcgctgccctccagtccccggaatcctgggactcaggttcgagctgtcgctgtcgctgtcgctgcgcctgtgaagcgcccactagagcgcaggcgccacctagtgggcgcggggcggctgcgcagggaccgcgctggcaggcgggagcgcagtccagggcggaaatgcagccagggcttcttcccacgtgggcggttttccagcgcgccgccagccctgtggccagatccggcctggggcgggaccaccttcacccgctgcggggcactgggatctaaacttggtgaactttctcttggggcacggagggacccctcggcctgggcagaggaggacaaggaggagcaggaggagaaggaggatgaggagcaggaggaggagcaggaggaggaggagcaggagaaaggaggagaagcaggagcaggaggaagaggagcaggagaagaaggagcagaaggaggaggagcaggaggaggagaaggaggaggagcaggtggaggaggaggagcaggaggaggagaagcaggaggagcagaaggagaggaggagcaggaagaggaggagaaagagcaggaggaagaagaggaggagaagcaggaggaggaggaggaagagcaggaggaggaggaagagcttgaggaggagcatgaggaggaggagaaggagcaggaggaagaggaggagaagcaggagcagggggaggaggaggaggcagagcaggaggaggagcaggaggaggaggaggaggtgtcatctgtggacaatacctggaagggcaaggggtggtgggtgtcactaaaaggaaccagccccagctacttcactgcaggctggtgccctggtgaaggtgaatcagtcagaggagtgctgactgcccatgctgatattctgcgcatccttctaggtccagctcaaatgtggcctgctctaggaagccctcccctgtcccctatttccagtgtgacatcttccatattaaaggacttattgatgctgctaaatagtataatttgctgcaagaatgtggcctcctccagcagattctatgcccctgaatcaggagtaagatcctccagtggaaatttaccttgcaaaacaggactgtgcatggtgagagctgcttgcaatgtccacactcaggactctatggaaagagttcgcagctggtggtga

SEQ ID NO: 118446 - DNA, 1620 bp, Homo sapiens
tcatccttctgaggtggttcctttcacaaagttgtggttagtgttgtgtgtggccttgctaccttgtccacactgctgattgtagcaggcaggatataggacagaccaatgacctttaaaaaggccacttacaaccagatagatggtgggtggtttcttgatcactccctcatcactacgaatcagcagctcacgataaacctttagtaaggcctctaggggtggcaacccacacagtatgaccaaggcgccttctgacttcaggaaagccaggcagacggggatccctggatgctcacagcttggcagccgatattcactggagccagaacagtctgctctgaggcttgtctgcatccagaagttgcaggaaagttccacaacgtgtgaagacttcttttgtcctctctgtgggagagcatgggcagtcagcactcctctgactgattcaccttcaccagggcaccagcctgcagtgaagtagctggggctggttccttttagtgacacccaccaccccttgcccttccaggtattgtccacagatgacacctcctcctcctcctcctgctcctcctcctgctctgcctcctcctcctccccctgctcctgcttctcctcctcttcctcctgctccttctcctcctcctcatgctcctcctcaagctcttcctcctcctcctgctcttcctcctcctcctcctgcttctcctcctcttcttcctcctgctctttctcctcctcttcctgctcctcctctccttctgctcctcctgcttctcctcctcctgctcctcctcctccacctgctcctcctccttctcctcctcctgctcctcctccttctgctccttcttctcctgctcctcttcctcctgctcctgcttctcctcctttctcctgctcctcctcctcctgctcctcctcctgctcctcatcctccttctcctcctgctcctccttgtcctcctctgcccaggccgaggggtccctccgtgccccaagagaaagttcaccaagtttagatcccagtgccccgcagcgggtgaaggtggtcccgccccaggccggatctggccacagggctggcggcgcgctggaaaaccgcccacgtgggaagaagccctggctgcatttccgccctggactgcgctcccgcctgccagcgcggtccctgcgcagccgccccgcgcccactaggtggcgcctgcgctctagtgggcgcttcacaggcgcagcgacagcgacagcgacagctcgaacctgagtcccaggattccggggactggagggcagcgccggcagccaaggtaggattcctgagccccgggcgtctccctggagcctctgaggtcggggtggacagcggggcggccgctgggcaccgcttgcggtctgcagagataaccggaggagtcggggcggcagcacgtgttgtagccgtgggggggacccagagacccgcagcctcggagctgggcatatgtctttatcagcagcatgaaaatggactaatacatatggtaatttcatttttaatcttttgaggacctgacgtactgttttccccacaggtatagcttttttacattcccaccagcagtgcacaaggattcccat

SEQ ID NO: 118447 - DNA, 2610 bp, Homo sapiens
atgatgggtcacagcagtgccataccactcacagccacaccaggagagctgaaggggcagtcaccaacgaagatgcccgacccagaacttggctgccagggagccaaaagccagggatgttcacggaacgccagacaccaaaaggccagaagcatgcccctgcaggaccagcacttggctctggccatcctgctggagctggctgtgcagagaggcacgctgagccaaatgttgtctgccatcctgttgttgcttcagctgtgggacagcagggcacaggaaactgacaatgagcgttctgcccagggcaccagcaccttgcttttgtccttgctgcaaacgttccagagcatcatttgcagtaaggatacgcccccctccgagggcaacatgcaccttttgtctggccctctgagccccagtgagagtttcctgagagagtcattttttacagttcagaactgtagaaataatgaggaagtgacacttatatgcaaagctgatttggagaaccataataaagatggaggcttctggattgtgattgatgagaaagtgtatgatataaaggacttccagacacagtcgttaacaggaaatagtattcttgctcagtttgcaggggaaaacccagtggtagctttggaagctgctttcgagtttgaagtcacccgggaatccatgcacgcattttgtgttggccaatatttggaggtgaggctgtatgccttgagtgatgcagaggatggcaggggacaccctctaatggcttcagtcatccatcttctctggaggctgcagaccagccagatccactacagctacaacgaggagaaagatgaggaccactgcagctcccagtgggcacacctgccagcaaatcgcgactgctcccacagatgggccctgggggaccattctcaggcatttctgcaagccattgcagacaataacattcaggatcacaacgtgaagactcatcaagaacagggccgttcttacaaggaggtctgcactcctgtcatcgaacgtttgagattcctctctaatgaattgagacctgctgttggtaatgacctctctataatctctgagtttaaattgttaagttctttgccccgttggaggaggatagctcagaagataattcgggaacggaggaaaaagagaattcctaagaagccagaatctacggctgatgaagaaaaaattggaaacgaagagagtgatttagaagaagcctgcattttgcctcatagtccaataaatgtggacaagagacccattgcaattaaatcacccaagaccatcaccagtgagaacccattgggaccgagcctggggagcatcccgcaagcccgcttcctcctgatgatgctcagcatgctcaccctgcagcacagcgcaaacaacctcgacctcctgctcaattccggcacgctggccctcactcagacggcactgcgcctgattggccccagttgtgacaatgttgaggaagatatgaatgcttctgctcaaggtgtttctgccacagttttggaagcaacaaggaaggaaacggctcctgtgcatctccctgtttcagggccagaactggctgccacgatgaagattggaacgagggtcatgagaggtgtggactggaaatggggcgatcaggatgggcctcctccaggcctaggccgagtgattggtgagctgggagaggacgggtggataagagtccagtggggcacgggcagcaccaactcctacaggatggggaaagaaggaaaatacgacctcaagctggcagagctgccggccgctgcacagccctcagcagaggattcggacacagaggacgactctgcttctccaaacaggctggtgtacagggagcaacaccggagctggtgcatgctggggtttgtgcggagcatcgctctcacgccgcaggtgtgcggcgccctcagctccccgcagtggatcacgctgctcatgaaggtcatgaaagggcacgcacccttccctgccgcctcgctgcagaggcagaggtgggtggccgtctcccttccccatgccctggtgaagagcggcacagtgccatcactcagagagtccatgccgaggtggcgcagggtgcgcccgcaggccttgctgactgccacccatagcagcacactggtggaggtggtggtggcactgctgtgcacgctgcactccctgactcagtggaatgggctcatcaacaagtacatcaactcccagctccgctccatcacccacagctttgcgggaaggccttctgaaggggcccagttagaggactacttccccgactccgagaaccctgaagtggggggcctcatggcggtcctggctgtgattggaggcatcgatggtcgcctgtgcctgggcggccaaattgtgcacgatgagtttggagaaggcactgtgactggcatcaccccgaagggcaaaatcaccgtgcagttctctgacatgcggacgtgtcacatttgcccattgaatcagctgaaaccagtaggtgaacttgtgctcagttactgtatgataagggaaattggctttacactaggacccagcaccaacattagcacttga

SEQ ID NO: 118448 - DNA, 1113 bp, Homo sapiens
atggaagaggaagaattttcctcccaacagagtcatcagaacacagcggcagctaaagcccttgttaccgcaagcggtgcccagcggccgccccgctgtccaccccgacctcaaaggctccagggagacgcccggggctcaggaatcctaccttggctgccggcgctgccctccaatccccggaatcctgggactcaggttcgagctgtccctgtcgctgtcgctgcgcctgtgaagcgcccactaaaacgcaggccccacctaatgggcgcggggcggctgcgcaaggaacgcgcttgcaagcgggaacgcaattcaaggcggaaaatgcaacccagggctttttcccccttctccaaacaggctggtgtacagggagcaacaccggagctggtgcatgctggggtttgtgcggagcatcgctctcacgccgcaggtgtgcggcgccctcagctccccgcagtggatcacgctgctcatgaaggtcatgaaagggcacgcacccttccctgccgcctcgctgcagaggcagctttgtccagagacacatcctgtcctgtccttaaggacttctgcaaatcagtaatcacagatgttgcgtgcagttcactgatatctactctcctcgtattttggggtggcttactgcatacccacaaggaggcctctgaatcatggcgagaggcaaaaagcacttcttacgtagcagcagcaagagaaaatgaggaagatgcaaaagcagaaccccccacccccggaataaaaccatcagatctcgtgagacttattcactaccaagagaacagtatgggggaaaccgcccccatgattcaaattatctcccactgggtccctcccacaacacatgggatttatgggagtacaattcaagatgaaattcgggtgggggtctcatatccaggtcacactgatgcaagaggattccagctgttgctggtttctggagacttcagcatcccttattggtccctcagctctgcctacacctctgtaaatagttccttcgttgaatctcttcagtcaaatcttttgaagggaattctgcttcctgccacgatcatgactgatccaagaactacagggcatcagtaa

SEQ ID NO: 118449 - DNA, 736 bp, Homo sapiens
atggttcagttgagcgggaagcgtattctcaactccccctacctggagcttaggtgtcatcagaacatggaccatctgggctgggtcatcaagaagagtcttaaccgctctgaagtctcctgggtcccaggtctggagttcccctggggaccgaaacccttcagggaagtcattgcagggcccttgcttagaaacaatgggcagtctctggagagcagcagcctggaggggtctcacgtgggcgtctatttctccgcacattggtgtccgccctgccgaagcctcacccgggtcctggtggaatcctaccggaagatcaaggaggcaggccagaacttcggagatcatcttcgttagtgcagacaggtcggaggagtccttcaaacagtacttcagtgagatgccctggctcgccgtcccctacacggatgaggcccggcggtcgcgcctcaaccggctgtacggaatccaagcccacctctttcttacagccaatgcagaggattttgacaccacggttcaagtcaacaaaatcatcctgatcacttacagacagaacgagaactctcttagctctttaaagactggggaaactgaggcccagggcagactgcagggatctcccagcaacgtgagagggcacgaccctgacagacacgccattcctctttctgtcaaccggtggaatccaagcaagagcagcccctcaccggccgtgtggtcacggctgccttag

SEQ ID NO: 118450 - DNA, 1074 bp, Homo sapiens
atggaaaagctgtggctccaccccactggaattgtggaagaggcaagaaactcagaaaataacaactgtggacaaagaagggaaaccactggaatgtttatccgccagcgggagtttcggatggcgcgaccattgtgggaaaccgtttggcagaagggaccaaaacagaacatatccaccattctactttctgactccatgaatttgactcctctagggatctcacctcaggactcgggggcgctcggacgcaccgacggctcggcggaccctcggacgcgcctcgcgggctgcccgcgcctccacccgcgccgccggtccgaccgggtctcgctctcccggtcccagcgcggggacggcccgcgagcgccgcgacccagtgtacagatgcgggcacagaggccggcgcggggctccaccaaggacctgatcgagacttgctgcgcagccggacagcagtgggccattgacaatgacgagtgcctggagatccctgagagtggcactgaggacaacgtctgcaggacagcccagaggcactgctgtgtctcctacttgcaggagaagagctgcatggccggcgtcctgggagccaaggagggtgagacctgtggggctgaggacaacgacagctgcggcatctccctgtacaaggcaagcctgacctgtggccttcaaggcaggtgtctcaacccccagcaggctagcatgggcctgttcagttatgatgtgcagagttccaagaaaataaatagaagcattcaagagaagctcgggggccacggcgtgtgtgcagcgacacctggcggtggcatgcggaactgcggacggctgcgcaggagcggacagcgaagaggcggtactgaccggtgcgaggcggtgctgaccggcctcttcaccagggccctgataagggagcagatgggagacccacatcctctggaccacactggccagctggccaagcccctggaagtagagaagacccccgcaaggtggaaatacctggatacaaatggagaaaaggaggaaccggagctgaggactcagtgtccttctctgtatgaggactga

SEQ ID NO: 118451 - DNA, 520 bp, Homo sapiens
atgatgggtgagaaagctgagaagccagatactaaagagaagaaacctaaggccaagaaagctgatgctggtggcaagaggaattgcagatattcccgatctgctatgtattccagaaagaccacgtccaggaagaagtattcagctgctaaatccaaggttgaaaagaaaaagaagtttcttgcaactgttacaaaaccagttggtgttgacaagaacagtggtacccaggtggttaaacttcacaaaatgcctagatattaccctactgaagatgtgcctctaaagctgttgagccatggcaaaagaaacccttcagtcagcataggcgagggtggttttcctgaagcagctggtcttgggactggacctctggtcctcaatcaagttcctctacgaagaacacaccagaaatttgtcattgctacctcaaccaaaattggtagcagcaatgtaaaaattgcaaaacgtcttactggtgcttactttaagaaggtgtggaagcctaaacaccaggaag

SEQ ID NO: 118452 - DNA, 518 bp, Homo sapiens
  misc_feature (1)...(518): n = a,t,c or g
gcaactgttacaaaaccagttggtggtgacaagaacggcggtacccgggtggttaaacttcgcaaaatgcctagatattatcctactgaagatgtgcctcgaaagctgttgagccacggcaaaaaacccttcagtcagcacgtgagaaaactgcgagccagcattacccccgggaccatgctgatcatcctcactggaccgccacaggggcaagagggtggttttcctgaagcagctggctagtggcttattacttgtgactggacctctggtcctcaatcgagttcctctaccgaagaacacaccagaaatttgtcattggccaccttcaaccaaaatccgatatcagcaatgtaaaaatcccaaaacatcttactgatgcttacttcaagaagaagaagctgcggaanccagacaccaggaaggtgagatcttcgacacagaaaaagagaaatatgagatttacggagcagcgcnagattgttnagaaagctgttggnctccncaattttttccaa

SEQ ID NO: 118453 - DNA, 333 bp, Homo sapiens
cagcgcagctgcatcgagaacatcctcagggcctgcgtgggctcccgccacagaaccacatgctcctggaacacaaaatggagcgccaagcgagttggacccgtggctgccacctaccctatgttgaacaagaaaggaccggtacccgctgccaccaatggctgcaccggtgatgccaatgggcatctgcaagaggagcccccaatgcccaccacctgaggccccggtcacacagtttctcggctcttcctccccgctgccccccacgaccctaccttgaaggcccccacaaataacagcgctgccactcagccctcaaaaaataaaaaaaaa

SEQ ID NO: 118454 - DNA, 1104 bp, Homo sapiens
atggggagccagggatgggactgcctggtaggtgctgctgcccacgaagggggagtaggcgggagaggcggggaagggggcggggcgggggaggggccgcagcgctttctccggaggtcgcgcgcccgagagcccgcgctgtccgccgccgctgccgagtcgactctgcgccgcccgccgcgatggaggccgccgcccagtcttcgtcgagagcccggacgtggtctacggccccgaggccatcgaggcgaatacgagtaccggacgacgcgcgtcagccgcgagggtggcgttctcaagtggaccagggggctgaggaaggaggcgtgctggggagagcggggcggccggggagaagggcacgggacccgggattcactgcgcggcctgtcttcagtgcaccccacgtccacgcgcttcaccttccggaccgcccggcaggaggccaactactacggctcgctgactcaggcgggcaccgtgagccgggcctggacgccgagggccaggaggtgttcgtacccttcagcgcggtgtgcccatggtggcgcccaacgacctcgtgttcgatggtgcgtgggcctagggagctgcgagtgcaggaagggggcctgggccgcgagcacctggcttgtggggccgcgggcctgcagctgctggggcttcccttgtacccacagaccatgtccatctgagttacaaccacctgggcaacaacgatggggagaacctatcggcgccttgcagttccgctctaaggaggtgtccaagagcaacgtggtggacgacaggtgcagagcaacccagtgctctatacgcccggcgaagagcctgaccacgcgactcgctgctggccgcacccatctgctggacctagcgctgctgaccgagctgtgccagcgcggcctgcgggggctcccgccacagaaccacatgctcctggaacacaaaatggagcgccagggcccagcctcaagcgagttggacccgtggctgccacctaccctatttgaacaagaaaggaccggtacccgctgccaccaatggctgcaccggtgtgccaatgggcatctgcaagaggagcccccaatgcccaccacctga

SEQ ID NO: 118455 - DNA, 334 bp, Homo sapiens
ccgcgctgtccgccgccgctgcctgagtcgactctgcgccgcccgccgcgatggaggccgcgcgcccagttcttcgtcgagagcccggacgtggtctacggccccgaggcccatcgaggcgcaatacgagtaccggacgacgcgcgtcagccgcgagggtggcgttctcaaggtgcaccccacgtccacgcgcttcaccttccggaccgcccggcaggtgccccggctcggggtcatgcttgtcggctggggcgggaacaacggctccacactcaccgccgcggtgctggccaatcgactgcgtttgtcctggcccacgcgcagcggccgcaag

SEQ ID NO: 118456 - DNA, 1271 bp, Homo sapiens
ttctgccaccacactctccaccctgtgttcttgttccgtccccgcccccatctagccccacctttgagaactggggcagagcgaggctccaggttctgggcttctcccctgggaagttggggtgaatgaccatgggcagaggggatgggactgaaaactgggcgctcaagagtcggggaagtagagggaggcagagtcaggtcacaggccccaagaaccccaggtggaaggagggctgagtggcagcgccctttatttgtgggggccttcaaaggtagggtccgtggggggcaagcggggaggaagagccgaagaaactgtgtgaccggggccgtcaggtggtgggcattgggggctcctcttgcagatgcccattggcatcactcggtgcagccattggtggcagcgggtaccggtcctttcttgttcaacatagggtagggtgggagccacggggtccaactcgcttgaggctgggccctgggcgctccattttgtgttccaggagcatgtggttctgtggcgggagccccacgcaggccctgaggatggactccgatgcatcttgtactgctggaaaatcgcattgacccaccgggcctgccgggcggcaactagtggcgcccttgaaagaggaagctgagcagggacagcacggggtggaagggtctgcggctcggggtccatgtcagtgcagaagctcacgcgctggcaacagctcggtcaagcagcgcctaggtcccagcatgatgggtgcggcccagcagcgagtcctcacacgtgttgtgcagcaccagtgtgttggttccgcccagcatcagctccgaggtatactcatcccagcgcgcgcttgctgtcacccacgtacggcacatacttgatgaccacgcagtggtcaggctcttcgccgggcgtatagagcactgggttgctctgcaccatgtcgtccaccacgttgctcctggaccacctccttagagcggaaccgcaatggcgccgacaggttctccccatcgttgtatgcccaggtggttgtaactcacgatggacatggtcttgaggccggagccaatgaggaagtccacaagcacggacttgactttggtctggcctgacttgaagtcatctccgcccacaaaaacccggtgctgccacgcgagctcaagagctccgggcaccagggtgttctgcggagacccattgaggaaggcacagccctccaggatgctggccacggcgaagagcgtggagggcgacacctccagaccgag

SEQ ID NO: 118457 - DNA, 365 bp, Homo sapiens; identical to SEQ ID NO: 118339

SEQ ID NO: 118458 - DNA, 376 bp, Homo sapiens; identical to SEQ ID NO: 118341
  misc_feature (1)...(376): n = a,t,c or g

SEQ ID NO: 118459 - DNA, 380 bp, Homo sapiens
ggcaagactgggacgtctagtccacaggaagacctgcaccactgtcgccttcacacaggtgaactcgtaagtacacagcctggccccaaacttccccccagttcatttaatccatgcctcacagttgtttccttttgccttaaaggccaatcttttagtttaagaaatatatttatctgaacttttgccaatgatggttaagaatttcttcacctgaataaaccatgtggtcagcattgcatctgaggcaaaagactgtcttgagctaaaaggtatttttgcattctaaaagggaaactaaggcaaaaaacccacttttgtttcccctcctgccttttagggaagacaaaggcgctttggctaagctggtggaagctatc

SEQ ID NO: 118460 - DNA, 1026 bp, Homo sapiens
  misc_feature (1)...(1026): n = a,t,c or g
ggcacgaggcccaagatgccgaaaggaaagaaggccaagggaaagaaggtggctccggccccagctgtcgtgaagaagcaggagggctttagaaaaaagtggtgaatcccctggtttgagaaaaggccttaagaattttggcattggacaggacatccagccccaaaagagacctcccccccttttgtgaaaatggccccgccagtatcaggcgtgcagcgggcagagagccatcctctataagcgggctgaaagtgcctcctgcgatgaaaccagtttcacccagggccctggacccgccaaaccagctactcagcttgcttaagctgtggcccacaaagtacagacccagagacaaaagcaagagaagaagcagagactgtttggcccgggccgacgaagaaggctgcttggcaaagggtgacgtccccaacgaaagagacccacctgtcccttcgagccaggagtttaaccccgtttcaccacccttggtgaaggaacaagaaaagctcaagctggtggtgaattggcacacggacgtgggatccccatncgagcttggtttgtcttccttgccttgccctgcccctgtgtcgtgaaaaatggggggtccctttacttgcattattcaagggaaaagggcaagactttgggaccgtctagtcccacaggaaagaccttgcaccacttgtccgcctttcacaccaggtgaacttcggaagacaaagtgcggcttttggctaaagctgggttggaagctattcagggaccaatttacaattgaccagatacgatggagatccggccgtcacttggggttggcaatgtcctggggtcctaagtctgtggctcgtattcgccaaagctcgcaacaggcacaaggctaaagaaacagccactcatactgggttaaatgttacactgttgagttttctgtactataaaaataattgaaataatacaaattttcctttcaaaaaaaaaaaaaaaaaaaaaaaaaaaaaaaaaaaaaaaagggcggccgct

SEQ ID NO: 118461 - DNA, 1392 bp, Homo sapiens
atgcctgatgtttctgaagagcagaaggaaagtgtgtgtactggaagcatgatgagggaggaggaaagtagcagaaagggcaaggtcaggactgcaggagccaagtcctccagtagtgacagggtgccaagactaaaccaggaagaagttgaatctctgaatagaccaataacaggagctgaaattgtggcaataatcaatagcttaccaaccaaaaagagtccagcaccagatggattcacagccgaattctaccaaaggatccgaatccagcagcccatcatccgaatccagcagcccatcaaaaagcttatccaacatgataaagtggggttcatccctgggatgcaaggctggttcaatatatgcaaatcaataaatgtaatccagcatataaacagaaccaaagaaaaaaaccacatgattatctcaatagatgcagaaaagccctttgacaaaattcaacaatgcttcatgctaaaaactctcaataaattaggtattgatgggacgtatctcaaaataataagagctatctatcacaagcccacagccaatatcatactgaatgggcaaaaactggaagcattccctttgaaaactggcacaagacagggatgccctctctcaccactcctattcaacatagtgttggaagttctggccagggcaattaggcaggagaaggaaataaagggtattcaattaggaaaagaggaagtcaaattgtccctgtttgcagacgacatgattatatatctagaaaaccccactgtctcagcccaaaatctccttaagctgataagcaacttcagcaaagtctcaggatacaaaatcaatgtacaaaaatcacaagcattcttatacaccaataacagacaaacagagagccaaatcatgagtgaactcccattcacaattgcttcaaagagaataaaacacctaggaatccaacttacaagggatgtgaaggacctcttcaaggagaactacaaaccactgctcaatgaaataaaagaggatacaaagaaatggaagaacattccatgctcatgggcaggaagaatcagtatcatgaaaatggccatactgcccaaggtaatttatagattcaatgccatccccatcaagctaccaatgactttcttcacagaattggaaaaaactactttaaagttcatacggaaccaaaaaagagcccacatcgccaagtcaatcctaagccaaaagaacaaagctggaggcatcacgctacctgacttcaaactatactacaaggctacagtaaccaaaacagcatggtactggtaccaaaacagagatatagatcaatgcaccagaacacagcccctcagaaataacgccacatatctacaactatctgatctttga

SEQ ID NO: 118462 - DNA, 1950 bp, Homo sapiens
atggccctcaggcgtctttcccatgatgtcagtggggccctgctgttggcaaatggggagagcactggaaattctgggggcagcagtggaagcagcccgagtgggggagccaccagtgggtcttcccagaccagtatctcaggagatgtggtggaggcatgctgcagcgttctgtcaatggtctgtgctgaccctgtctacaaagtgtacgttgctgctttagcagtgcatgctgttggtgactctagaggatccctccagtcacttcaccaggatgcgtcgccgtttgatggctatgcagatgaggtggaaattgccgaagccatccagttgggcgtagaagacactttggatggtcaacaggacagcttcttgcaggcatctgttcccaacaactatctggaaaccacagagaacagttcccctgagtgcacaatccatttagagaaaactggaaaaggattatgtgctacaaaattgagtgccagttcagaggacatttctgagagactggccagcatttcagtaggaccttctagttcaacaacaacaacaacaacaacagagcaaccaaagccaatggttcaaacaaaaggcagaccccacagtcagtgtttgaactcctctcctttatctcatcattcccaattaatgtttccagccttgtcaaccccttcttcttctaccccatctgtaccagctggcactgcaacagatgtctctaagcatagacttcagggattcattccctgcagaataccttctgcatctcctcaaacacagcgcaagttttctctacaattccacagaaactgtcctgaaaacaaagactcagataaactttccccagtctttactcagtcaagacccttgccctccagtaacatacacaggccaaagccatctcgacctaccccaggtaatacaagtaaacagggagatccctcaaaaaatagcatgacacttgatctgaacagtagttccaaatgtgatgacagctttggctgtagcagcaatagtagtaatgctgttatacccagtgacgagacagtgttcaccccagtagaggagaaatgcagattagatgtcaatacagagctcaactccagtattgaggaccttcttgaagcatctatgccttcaagtgatacaacagtaacttttaagtcagaagttgctgtcctgtctcctgaaaaggctgaaaatgatgatacctacaaagatgatgtgaatcataatcaaaagtgcaaagagaagatggaagctgaagaagaagaagctttagcaattgccatggcaatgtcagcgtctcaggatgccctccccatagttcctcagctgcaggttgaaaatggagaagatatcatcattattcaacaggatatgacttttttccgacatatcataccaccaatacaatggatctacaaaaaggaaagtgccaatttgctaattgacagcactggtcagagactaagaattgcagattttggagctgcagccaggttggcatcaaaaggaactggtgcaggagagtttcagggacaattactggggacaattgcatttatggcacctgaggtactaagaggtcaacagtatggaaggagctgtgatgtatggagtgttggctgtgctattatagaaatggcttgtgcaaaaccaccatggaatgcagaaaaacactccaatcatcttgctttgatatttaagaaactactggattttgcaaatactgcatgtgatggtgataaggaatcagaggttgaagatgttgaaacagacagtggtaattcacctgaagatttgaggaaggaaataatgattggtttacaatatcaggcagagattcccccttatcttggagagtacgatggtaatgagaaagacagccctcaacccaagaagatgactggagtacaaaatgcaaaagaggtgctttctacctga

SEQ ID NO: 118463 - DNA, 4488 bp, Homo sapiens
ccgagccctgaggcaggcggcggcggaggagccctcaaggcgagcagcgcgcgcgcggctgccgcgggactgctgcgggaggcgggcagcgggggccgcgagcgggcggactggcggcggcggcagctgcgcaaagtgcggagtgtggagctggaccagctgcctgagcagccgctcttccttgccgcctcaccgccggcctcctcgacttccccgtcgccggagcccgcggacgcagcggggagtgggaccggcttccagcctgtggcggtgccgccgccccacggagccgccagccggcgcggcgcccaccttaccgagtcggtggcggcgccggacagcggcgcctcgagtcccgcagcggccgagcccggggagaagcgggcgcccgccgccgagccgtctcctgcagcggcccccgccggtcgtgagatggagaataaagaaactctcaaagggttgcacaagatggatgatcgtccagaggaacgaatgatcagggagaaactgaaggcaacctgtatgccagcctggaagcacgaatggttggaaaggagaaataggcgagggcctgtggtggtaaaaccaatcccagttaaaggagatggatctgaaatgaatcacttagcagctgagtctccaggagaggtccaggcaagtgcggcttcaccagcttccaaaggccgacgcagtccttctcctggcaactccccatcaggtcgcacagtgaaatcagaatctccaggagtaaggagaaaaagagtttccccagtgccttttcagagtggcagaatcacaccaccccgaagagccccttcaccagatggcttctcaccatatagccctgaggaaacaaaccgccgtgttaacaaagtgatgcgggccagactgtacttactgcagcagatagggcctaactctttcctgattggaggagacagcccagacaataaataccgggtgtttattgggcctcagaactgcagctgtgcacatggaacattctgtattcatctgctatttgtgatgctccgggtgtttcaactagaaccttcagacccaatgttatggagaaaaactttaaagaattttgaggttgagagtttgttccagaaatatcacagtaggcgtagctcaaggatcaaagctccatctcgtaacaccatccagaagtttgtttcacgcatgtcaaattctcatacattgtcatcatctagtacttctacatctagttcagaaaacagcataaaggatgaagaggaacagatgtgtcctatttgcttgttgggcatgcttgatgaagaaagtcttacagtgtgtgaagacggctgcaggaacaagctgcaccaccactgcatgtcaatttgggcagaagagtgtagaagaaatagagaacctttaatatgtcccctttgtagatctaagtggagatctcatgatttctacagccacgagttgtcaagtcctgtggattccccttcttccctcagagctgcacagcagcaaaccgtacagcagcagcctttggctggatcacgaaggaatcaagagagcaattttaaccttactcattatggaactcagcaaatccctcctgcttacaaagatttagctgagccatggattcaggtgtttggaatggaactcgttggctgcttattttctagaaactggaatgtgagagagatggccctcaggcgtctttcccatgatgtcagtggggccctgctgttggcaaatggggagagcactggaaattctgggggcagcagtggaagcagcccgagtgggggagccaccagtgggtcttcccagaccagtatctcaggagatgtggtggaggcatgctgcagcgttctgtcaatggtctgtgctgaccctgtctacaaagtgtacgttgctgctttaaaaacattgagagccatgctggtatatactccttgccacagtttagcggaaagaatcaaacttcagagacttctccagccagttgtagacaccatcctagtcaaatgtgcagatgccaatagccgcacaagtcagctgtccatatcaacactgttggaactgtgcaaaggccaagcaggagagttggcagttggcagagaaatactaaaagctggatccattggtattggtggtgttgattatgtcttaaattgtattcttggaaaccaaactgaatcaaacaattggcaagaacttcttggccgcctttgtcttatagatagactgttgttggaatttcctgctgaattttatcctcatattgtcagtactgatgtttcacaagctgagcctgttgaaatcaggtataagaagctgctgtccctcttaacctttgctttgcagtccattgataattcccactcaatggttggcaaactttccagaaggatctacttgagttctgcaagaatggttactacagtaccccatgtgttttcaaaactgttagaaatgctgagtgtttccagtgtttccactcacttcaccaggatgcgtcgccgtttgatggcttatgcagatgaggtggaaattgccgaagccatccagttgggcgtagaagacactttacaacgacaacaacacaacagcttttgcaggcatctgttcccaacaactatctggaaaccacagagaacagttccccttgagtgcacagtccatttagagaaaactggaaaaggattatgtgctacaaaattgagtgccagttcagaggacatttctgagagactggccaggatttcagtaggaccttctagttcaacaacaacaacaacaacaacaacagagcaaccaaagccaatggttcaaacaaaaggcagaccccacagtcagtgtttgaactcctctcctttatctcatcattcccaattaatgtttccagccttgtcaaccccttcttcttctaccccatctgtaccagctggcactgcaacagatgtctctaagcatagacttcagggattcattccctgcagaataccttctgcatctcctcaaacacagcgcaagttttctctacaattccacagaaactgtcctgaaaacaaagactcagataaactttccccagtctttactcagtcaagacccttgccctccagtaacatacacaggccaaagccatctcgacctaccccaggtaatacaagtaaacagggagatccctcaaaaaatagcatgacacttgatctgaacagtagttccaaatgtgatgacagctttggcttgagcagcaatagtagtaattgctgttataccagtgacgagacagtgttcaccccagtagaggagaaatgcagattagatgtcaatacagagctcaactccagtattgaggaccttcttgaagcatctatgccttcaagtgatacaacagtaacttttaagtcagaagttgctgtcctgtctcctgaaaaggctgaaaatgatgatacctacaaagatgatgtgaatcataatcaaaagtgcaaagagaagatggaagctgaagaagaagaagctttagcaattgccatggcaatgtcagcgtctcaggtagccctccccatagttcctcagctgcaggttgaaaatggagaagatatcatcattattcaacaggatacaccagagactctaccaggacataccaaagcaaaacaaccgtatagagaagacactgaatggctgaaaggtcaacagataggccttggagcattttcttcttgttatcaggctcaagatgtgggaactggaactttaatggctgttaaacaggtgacttatgtcagaaacacatcttctgagcaagaagaagtagtagaagcactaagagaagagataagaatgatgagccatctgaatcatccaaacatcattaggatgttgggagccacgtgtgagaagagcaattacaatctcttcattgaatggatggcagggggatcggtggctcatttgctgagtaaatatggagccttcaaagaatcagtagttattaactacactgaacagttactccgtggactttcgtatctccatgaaaaccaaatcattcacagagatgtcaaaggtgccaatttgctaattgacagcactggtcagagactaagaattgcagattttggagctgcagccaggttggcatcaaaaggaactggtgcaggagagtttcagggacaattactggggacaattgcatttatggcacctgaggtactaagaggtcaacagtatggaaggagctgtgatgtatggagtgttggctgtgctattatagaaatggcttgtgcaaaaccaccatggaatgcagaaaaacactccaatcatcttgctttgatatttaagattgctagtgcaactactgctccatcgatcccttcacatttgtctcctggtttacgagatgtggctcttcgttgtttagaacttcaacctcaggacagacctccatcaagagagctactgaagcatccagtctttcgtactacatggtag

SEQ ID NO: 118464 - DNA, 927 bp, Homo sapiens
gatagaccatatgataggccataaagcgagcctcaataaatttaagaaaattgaaattatatcaagcactctctctggccacaatggaataaaactggaaatcaactccaaaagggaccttcaaaaccatgcaaatacaagaaaatttgaataacctgctcctgaatgagcattgggtcaaaaatgaaatcaagatggaaattttaaaattctttgaactgaatgaccataatgacacaacctatcaaaacctctgggatacagcaaaggccacctttcctcctaagaggaaagttcacagccctaaatgcatacatcaaaaagactgaaagagcacaaactgacattctaaggtcacacgtcaaggaactagagaaacaagaacaaaccaaacccaaacccagtagaagaaaggaaataaccaagatcagagaagaactaaatgaaatggaaacaaacaaaaaaaaaatacaaaagataaatgaaacaaaaagcaggttctttgaacagataaataaaattgatagatcattggcaagattagccaagaaaagaagagaaaaaatccaaataacctcaataagaaacaaaacaggagatactacaactgacaccacagaaatacaaaagatcattcaaggctactatgagcacctttatgcacataaactagaaaacctagaggagatggataaattcctggaaaaatacaaccctcctagcttaaatcaggaagaattagataccctgaacagaacaataacaagcaacaagattgaaatggtaattaaaaagttaccaacaaaaaaaaaaagtccaggaccaaatggattcacagctgaattctaccagacatttaaaggaagaattggtaccaatcctttcgatactagtccacaagacagagaaagagggaaccctccctaa

SEQ ID NO: 118465 - DNA, 539 bp, Homo sapiens
ttctctaatgttgtatcatactcttctaaaacttgagtggctgtcttaaaagatataaggggaaagataatattgtctgtctctatattgcttagtaagtatttccatagtcaatgatggtttaataggtaaaccaaaccctataaacctgacctcctttatggttaatactattaagcaagaatgcagtacagaattggatacagtacggatttgtccaaataaattcaataaaaaccttaaagctgacttcgtttgttatgtaggctgtatgcatatattgaaaacagaagtgaaactttcgattgcttttaaataaataccaactaatgaatttactgctaagctcaaaaccgtctacgcttaaggtgagaatctttgccaacagaaaggcgttgctctaaatcgcgaatggtattacgaagaattgcaatctccttgtttttttcttcttgaaaatgctgaagtttctaaacgaaacaaaaaatttgttattagaattcagaaataaaatttagtacaaggaacaacaaaataac

SEQ ID NO: 118466 - DNA, 1200 bp, Homo sapiens
atggaaatttcagagttaaatgcaaagctaagaagtcaagaaaaagaaaaacaaaatgaaataatcaagctacaactagaaaaacttcagcattttcaagaagaaaaaaacaaggagattgcaattcttcgtaataccattcgcgatttagagcaacgcctttctgttggcaaagattctcaccttaagcgtgaaaatgaacaactaaaaataagtgctgatcttataaaagagaagttaaagtctcatgaacaggaatataagaataatattgccaaacttgtaagtgaaatgaaaatcaaagaggagggatataagaaagaaataagcaaactttatcaggacatgcagagaaaaggacgcatcaaagttacttgtgaatggacatgttctgaaaggaaaactgagggaagagagccaggacctgtcagagagcccacaggaagaagccaaagtgcagaaaatgaaggcagcaagactctagcagagatcaacaccaaaggaactcagagccctgcagaaaggataaataaaattgatagattattagcaagattaaccaataaaagaagagagaaggtccaaataagctcaattagaaacaaaacgggagatattagaactgataccacagaaaaacaaaagtttatgcaaggctaccatgaacacctttacatgcataaactggaaaacctaaaggagatggataaattcctggaaatatacagccctcctcgattaaaacgggaagacatagaaactctgagcagaccaataacaatcagcgacattgaaatgaaaaatctaaagattcccccaaaactcccagaactgataaataaattcagcaaagtttcaagatacaaaattaatgtacacaaattagtagctctgctatatgccaacagcgaccaaactgataatcaaatcaagaactcaacccattttacaatagttgcaaaaaaattacttaggaatatatctaaccaaggacatgaaagacctccacaaggaaaactcaaaacactgctgaaggaaatcatagatgacacaatcaaatggaaacacatcccatgctcatggatgagtacaaccaatattgtgaaaatgaccatactgccaaaaacaatctacaaattcaatgcaattatcatcaaaataccaccatcattcttcgcagaaagaaaaaaacagtcctaa

SEQ ID NO: 118467 - DNA, 666 bp, Homo sapiens
atgattcagaggaaacgtgccagcattggtgctccctgtgcctgggtccgaaaaaaagaagaagaagaagaagaagaagaagaagaagaagaagaggaagaggaagaggaagaggaagaggaagaggaagaagaagaagaagaagaagaaggagagaacaacttggctatggggaaatcctttaacgtgattactgtgcatgtccgttccgaggaatgggatttaatgacctttgatgccaacccatatgacagcgtgaaaaaaatcaaagaacatgtccggtctaagaccaaggttcctgtgcaggaccaggttcttttgctgggctccaagatcttaaagccacggagaagcctctcatcttatggcattgacaaagagaagaccatccaccttaccctgaaagtggtgaagcccagtgatgaggagctgcccttgtttcttgtggagtcaggtgatgaggcaaagaggcacctcctccaggtgcgaaggtccagctcagtggcacaagtgaaagcaatgatcgagactaagacgggtataatccctgagacccagattgtgacttgcaatggaaagagactggaagatgggaagatgatggcagattacggcatcagaaagggcaacttactcttcctggcatcttattgtattggagggtga

SEQ ID NO: 118468 - DNA, 429 bp, Homo sapiens; identical to SEQ ID NO: 118058

SEQ ID NO: 118469 - DNA, 252 bp, Homo sapiens; identical to SEQ ID NO: 118012

SEQ ID NO: 118470 - DNA, 159 bp, Homo sapiens; identical to SEQ ID NO: 117049

SEQ ID NO: 118471 - DNA, 354 bp, Homo sapiens
aagaagaagaagaagaagaagaagaagaagaagaagaagaagaagaagaagaagaagaagaagaagaagaagaagaagaagaagaagaagaagaagaagaagaagaagaaggaggaggaggaggaggaggaggaggaggaagaagagggagaagaagaagagttgggtagactgcacggaggaagtggcaaagtacgtgggcttggcttcactgagaatcagcagggttccaccaacagacagcaccaaagagaagacaatagaaaaagtaaacagaagaaaataaacaacacgaagcctgaggccacagaaagcctcattgttaatggaataacaatcacagcacctgcctga

SEQ ID NO: 118472 - DNA, 195 bp, Homo sapiens
atgaagaagaagaaagaagaagaagaagaagaagaagaagaagaggaagaggaagaggaagaagaagaagaagaagaagaagaagaagaagaagaagaagaagaagaagaagaagaagaagaagaagaacaggccattgtttctgttcactgtaaaaagaaacacaagcgagaggaggaggaggatgatgagtaa

SEQ ID NO: 118473 - DNA, 259 bp, Homo sapiens
ttccacacgaagaagaagaagaagaagaagaacaagaagaagaagaagaagaagaagaagaggaagaggaagaggaagaggaagaagaagaagaagaagaagaagaagaagaagaagaagaagaagaagaagaagaagaagaagaagaaagcctttctgacaagcaccacccaactactagttccatggaggcctggtttcaggtggctgtcatgacagcaccccctgagagcaggcacttgccatgggtgcctttcag

SEQ ID NO: 118474 - DNA, 282 bp, Homo sapiens; identical to SEQ ID NO: 117047

SEQ ID NO: 118475 - DNA, 708 bp, Homo sapiens; identical to SEQ ID NO: 118062

SEQ ID NO: 118476 - DNA, 269 bp, Homo sapiens
atgggccccatccacaagatatctcattatgtatatgcaaatatttcaaaatccgaaaaggtcttaaagtcagaacacttccgctctcaggcatttcagcctgggcaacagagcaagactctgtctcaaaaaaaaaaaaagagaagaagaaagaagaagaagaagaagaagaagaagaagaagaagaagaagaagaagaagaagaagaagaagaagaagaagaagaagaagaagaagaaaagaagaggaagaaaagaaaaatgccaaag

SEQ ID NO: 118477 - DNA, 495 bp, Homo sapiens; identical to SEQ ID NO: 117054

SEQ ID NO: 118478 - DNA, 715 bp, Homo sapiens
attggccttggggctctccagccctttgggacttccaatgggatcttagaagcagccgaagcagcgtgagggcggcagcccagggccagccacgatttgaacgctctgccttgcagctcttctggaccgaggagcccaaagccctaccctcaccattcaccaggtcctgtgggaagagcagcgtggaggtgggctgaggttagaaggtgcagagcgtggaagaagattgtgagctgagtattggacatctgttcttgaatagtccctgggcctgccataggaaaggaagttctccagggttacagttcttatccgcatgaatacacatggctctgttacgaaaaattaatcaggtgctgctgttccttctgatcgtgaccctctgtgtgattctgtataagaaagttcataaggggactgtgcccaagaatgacgcacatgatgaatccgagactcctgaagaactggaagaagagattcctgtggtgatttgtgctgcagcagggaggatgggtgccactatggctgccatcaatagcatctacagcaacactgacgccaacatcttgttctatgtagtgggactccggaatactctgactcgaatacgaaaatggattgaacattccaaactgagagaaataaactttaaaatcgtggaattcaacccgatggtcctcaaagggaagatcagaccagactcatcgaggcctgg

SEQ ID NO: 118479 - DNA, 963 bp, Homo sapiens
  misc_feature (1)...(963): n = a,t,c or g
atggctgctgcactccagctgggagacagagcaaaaccctgttttaaaaaagaaaaagaaagaagacagagaagaaagaaaagaaaagaaagagagaaaggaaggaaggagaaggagaaggagaagaagaaagaagaagaagaagaagaagaagaagaagaagaagaagaagaagaagaagaagaagaagaagaagaagaagaagaagaagaagaagaggaagaagaggaagaagaagaggaagaggaagaagaagaagaagaagaagaagaagaagaagaagaanaagaagaagaagaagaagaagaagaagaagaagggaaagacactgagttaacagggctgccccagggctcagacaggaccagaatagacctggaggatccacaagctggccaagttaatcaggtgctgctgttccttctgatcgtgaccctctgtgtgattctgtataagaaagttcataaggggactgtgcccaagaatgacgcanacccgcttttacgaccacgctctccacctgattcacagaaagggttctacgaccgtcaggtcaccgccgcctttgtactttattggggagtcgaaggcctcagcgctgctcgcgatttccctaaggtggtcgggaaggtcccaaccacgttcttctgtaaaccagataaggaaggcctggggattccggccgcggaaaggcacagaggaggtgaacgctccggctgcccaagtgacgcacttgaaagtgatgaccccatggcttatattcactttactgctgaaggggaagttaccttcaaatcaattttatttgtacccacatctgctccacgtggtctgtttgacgaatatggatctaaaaagagcgattacattaagctctatgtgcgccgtgtattcatcacagacgacttccatgatatgatgcctaaatacctcaattttgtcaagggtgtggtaagtatctga

SEQ ID NO: 118480 - DNA, 2802 bp, Homo sapiens
gtgggcggaccgcgcggctggaggtgtgaggatccgaacccaggggtggggggtggaggcggctcctgcgatcgaaggggacttgagactcaccggccgcacgccatgagggccctgtgggtgctgggcctctgctgcgtcctgctgaccttcgggtcggtcagagctgacgatgaagttgatgtggatggtacagtagaagaggatctgggtaaaagtagagaaggatcaaggacggatgatgaagtagtacagagagaggaagaagctattcagttggatggattaaatgcatcacaaataagagaacttagagagaagtcggaaaagtttgccttccaagccgaagttaacagaatgatgaaacttatcatcaattcattgtataaaaataaagagattttcctgagagaactgatttcaaatgcttctgatgctttagataagataaggctaatatcactgactgatgaaaatgctctttctggaaatgaggaactaacagtcaaaattaagtgtgataaggagaagaacctgctgcatgtcacagacaccggtgtaggaatgaccagagaagagttggttaaaaaccttggtaccatagccaaatctgggacaagcgagtttttaaacaaaatgactgaagcacaggaagatggccagtcaacttctgaattgattggccagtttggtgtcggtttctattccgccttccttgtagcagataaggttattgtcacttcaaaacacaacaacgatacccagcacatctgggagtctgactccaatgaattttctgtaattgctgacccaagaggaaacactctaggacggggaacgacaattacccttgtcttaaaagaagaagcatctgattaccttgaattggatacaattaaaaatctcgtcaaaaaatattcacagttcataaactttcctatttatgtatggagcagcaagactgaaactgttgaggagcccatggaggaagaagaagcagccaaagaagagaaagaagaatctgatgatgaagctgcagtagaggaagaagaagaagaaaagaaaccaaagacctaaaaaagttgaaaaaactgtctgggactgggaacttatgaatgatatcaaaccaatatggcagagaccatcaaaagaagtagaagaagatgaatacaaagctttctacaaatcattttcaaaggaaagtgatgaccccatggcttatattcactttactgctgaaggggaagttaccttcaaaatcaattttatttgtacccacatctgctccacgtgggtctgtttgacggattatggatctaaaaaagagcgattacattaagctctatgtgccgccgtggtattcatcacagaccgacttccatgatatgatgcctaaatacctcaattttgtcaagggtgtggtggactcagatgatctccccttgaatgtttcccgcgagactcttcagcaacataaactgcttaaggtgattaggaagaagcttgttccgtaaaaccgctgggacatgatcaagaagatttgctggatgataaatacaatgatactttttgggaaagaatttgggtaccaacattcaagcttggttgtgattgaaggaccacttcgaattcgaacacgtcttgctaaacttcttagggttccagtcttctcatcatcccactgaccattactagcctagaccagtatgtggaaagaatgaaggaaaaacaagacaaaatctacttcatggctgggtccagcaaaaaagaggctgaatcttctccatttgttgagcgacttctgaaaaagggctatgaagttatttacctcacagaacctgtggatgaatactgtattcaggcccttcccgaatttgatgggaagaggttccagaatgttgccaaggaaggagtgaagttcgatgaaagtgagaaaactaaggagagtcgtgaagcagttgagaaagaatttgagcctctgctgaattggatgaaagataaagcccttaaggacaagattgaaaaggctgtggtgtctcagcgcctgacagaatctccgtgtgctttggtggccagccagtacggatggtctggcaacatggagagaatcatgaaagcacaagcgtaccaaacgggcaaggacatctctacaaattactatgcgagtcagaagaaaacatttgaaattaatcccagacacccgctgatcagagacatgcttcgacgaattaaggaagatgaagatgataaaacagttttggatcttgctgtggttttgtttgaaacagcaacgcttcggtcagggtatcttttaccagacactaaagcatatggagatagaatagaaagaatgcttcgcctcagtttgaacattgaccctgatgcaaaggtggaagaagagcccgaagaagaacctgaagagacagcagaagacacaacagaagacacagagcaagacgaagatgaagaaatggatgtgggaacagatgaagaagaagaaacagcaaaggaatctacagctgaaaaagatgaattgtaaattatactctcaccatttggatcctgtgtggagagggaatgtgaaatttacatcatttctttttgggagagacttgttttggatgccccctaatccccttctcccctgcactgtaaaatgtgggattatgggtcacaggaaaaagtgggttttttagttgaattttttttaacattcctcatgaatgtaaatttgtactatttaactgactattcttgatgtaaaatcttgtcatgtgtataaaaataaaaaagatcccaaat

SEQ ID NO: 118481 - DNA, 622 bp, Homo sapiens
cccggctcgagcagctcttggaattctgacatctcatcaaagtggctttttgaaaacatctacaagcaaaattaccttcaactgcgtggaaaaatataagacattaccatgcagtccaccaagcagtatgcctgtttgcacgatttaactaacaagggcattggagaagaaatagataatgaacacccctggactaagcctgtttcttctgagaatttcactttctccattatgtgtggatgttagatgctgaagatttggctgatattgaagatactgtggaatggagacatagaaatgttgaaagtctttgtgtaatggaaacagcatccaactttagttgttcccacctctggttgttttagtaaggacattgttggacctaaggactagtggcctgttggcagcagcattgtgcttctccagcctttgcgtattgtgggtcactcattttgttgtacaggaacagctttaagaactatgtcatcactcccagaatcttctgcaatgtggtagaaaaagccagcaaggactagattgcctaggggaaaagacttaatttactttgggagtgaaaaatctgatcaagaaactgggacgttgttacttcctgtttcctcca

SEQ ID NO: 118482 - DNA, 1421 bp, Homo sapiens
acaacactgctctcagaaggatactgcagaactccttagaggtcttagcctatggaatcatgctgaagagcgacagaagttttttaaatattccgtggatgaaaagtcagataaagaagcagaagtgtcagaacactccacaggtataacccatcttcctcctgaggtaatgctgtcaattttcagctatcttaatcctcaagagttatgtcgatgcagtcaagtaagcatgaaatggtctcagctgacaaaaacgggatcgctttggaaacatctttaccctgttcattgggccagaggtgactggtatagtggtcccgcaactgaacttggatacttgaacctgatgatgaatgggtgaaaaatagggaaagatgaaagtcgtgcttttcatgagtgggatgaagatgctgacattgatgaatctgaagagtctgcggaggaatcaattgctatcagcattgcacaaatggaaaaacgtttactccatggcttaattcatgaacgttctaccatatgttggtacttctgtaaaaaccttagtattagcatacagctctgcagtttccagcaaaatggttaggcagattttagagctttgtcctaacctggagcatctggatcttacccagactgacatttcagattctgcatttgacagttggtcttggcttggttgctgccagagtcttcggcatcttgatctgtctggttgtgagaaaatcacagatgtggccctagagaagatttccagagctcttgggaattctggacatcttcatcaaagtggctttttgaaaacatctacaagcaaaattacttcaactgcgtggaaaaataaagacattaccatgcagtccaccaagcagtatgcctgtttgcacgatttaactaacaagggcattggagaagaaatagataatgaacacccctggactaagcctgtttcttctgagaatttcacttctccttatgtgtggatgttagatgctgaagatttggctgatattgaagatactgtggaatggagacatagaaatgttgaaagtctttgtgtaatggaaacagcatccaactttagttgttccacctctggttgttttaatcacagaccatggtctcagaatgaatatgaacagttaaattatgcaaaacaactgaaagagagattggaggcttttacaagagattttcttcctcacatgaaagaggaagaggaggtttttcagcccatgttaatggaatattttacctatgaagagcttaaggatattaaaaagaaagtgattgcacaacactgctctcagaaggatactgcagaactccttagaggtcttagcctatggaatcatgctgaagagcgacagaagttttttaaatattccgtggatgaaaagtcagataaagaagcagaagtgtca

SEQ ID NO: 118483 - DNA, 386 bp, Homo sapiens
aacctcccgacgcggccaggccccggcacacccagctgcagaaaggagagaaaatcccttggctctaaaatgacatctggagaagtgaagacaagcctcaagaatgcctactcatctgccaagaggctgtcgccgaagatggaggaggaaggggaggaggaggactactgcacccctggagcctttgagctggagcggctcttctggaagggcagtccccagtacacccacgtcaacgaggtctggcccaagctctacattggcgatgaggcgacggcgctggaccgctataggctgcagaaggcggggttcacgcacgtgctgaacgcggcccacggccgctggaacgtggacactgggcccgactactaccgcgacatggacac

SEQ ID NO: 118484 - DNA, 371 bp, Homo sapiens
ccttttttatgtccttacaaaaaatgatgaaaagggctgtcatctggttggatacttctctaaggaaaagctttgccagcagaagtataatgtctcctgcataatgatcatgccccagcaccaaaggcaaggatttggacggtttctcattgatttcagctatttgctttctagaagagaaggccaagcagggtctcctgaaaagcctctctccgatctgggccgtctctcctacctggcatattggaagagcgtcatcttggagtatctctaccaccaccatgagaggcacatcagcatcaaggcaattagcagagcgacgggcatgtgcccacatgacattgccaccactctgcagcacctccacatgg

SEQ ID NO: 118485 - DNA, 2241 bp, Homo sapiens
atgggacatagaattaacattgtatgtaagattgatgcgccgtgcgcgcgccagacgcgtaccttccaccccgtggtgaagacggtggaagactgtggccggtacccttctgtgattgaatttggtaaatatgaaatccaaacctggtactcctcgccttacccacaggaatatgcaagaaatttagcaaaagaaggaaaaatgggagaaagagaaatgagctttgttcagcagctccagccaatgtctggcaggtgctcactcttccagggaattgagcagctgtacatatctcctcaatacacaaccacctgtgtttccatccacttcttggcagtgtggataatccttttggttgatgggaatatgagcaaaatttattgccaaaacctttgcttgttagccaagctcttcctggaccacaaaacgttgtattatgatgtcgagccattccttttttatgtccttacaaaaaatgatgaaaagggctgtcatctggttggatacttctctaagtggacagttttacaaggacagtggcaggtgcagggaattgcccacttcagcagggctctgacatacttgatctgtttctccttccctcaggaaaagctttgccagcagaagtataatgtctcctgcataatgatcatgccccagcaccaaaggcaaggatttggacggtttctcattgatttcatctcctttcccaggctgaccataggtgcatcatttactcagctcaggaaacaatcaatgtccaattccactgcaaattcctctccttggggacaatggaaagtcctctcccacattccactggcagagcctaacaagctctccaaatgcacatttcagtctcgaggcacagctttctatcttggggcatctcttccaatccccttgacactgagagggccacaggcctggaatgtcaggaatcttctgggccttcctattttgggtcccaaatggcccaaaccagtaggtttcagtcagataaaggaaaaagtaggaaccaaaggagtaaagtctaaagaaagctgcagaaaggagagaaaatcccttggctctaaaatgacatctggagaagtgaagacaagcctcaagaatgcctactcatctgccaagaggctgtcgccgaagatggaggaggaaggggaggaggaggactactgcacccctggagcctttgagctggagcggctcttctggaagggcagtccccagtacacccacgtcaacgaggtctggcccaagctctacattggcgatgagggtctgaatctgccacaagtggaactgcaggctcagcgtggagcggagggctcaggcatgactcggcacagcgtcccagtccccactacccacagcctcagaagccagaggcatcgccacagctggcctggcgttgagagcctgggaagtgaagtgaaggcaagtcagtcagctgagacagctccttctccccgaaaaggaggaactaattccgccttaaggcaccgagcacgaatgaaattaacctgcttcttcgaggtgtgcctcaacacggaggagcttcaccctcaagtaacaagaacacccaagacaccggaaggccggttcatttcactttcccatcaggcacaaccaacgtcagcctgggcgacggcgctggaccgctataggctgcagaaggcggggttcacgcacgtgctgaacgcggcccacggccgctggaacgtggacactgggcccgactactaccgcgacatggacatccagtaccacggcgtggaggccgacgacctgcccaccttcgacctcagtgtcttcttctacccggcggcagccttcatcgacagagcgctaagcgacgaccacagtaagatcctggttcactgcgtcatgggccgcagccggtcagccaccctggtcctggcctacctgatgatccacaaggacatgaccctggtggacgccatccagcaagtggccaagaaccgctgcgtcctcccgaaccggggctttttgaagcagctccgggagctggacaagcagctggtgcagcagaggcgacggtcccagcgccaggacggagaaaacggcagcagacatgaagcgggtagtgacagcttccagggccaggaatcccaaaccagacagaaaccaaagagagttgctgctgttggagatgccggccgtcaaggaccaggcatggaaatggcctggagaaaccagaatgtgataaaggccttctag

SEQ ID NO: 118486 - DNA, 3471 bp, Homo sapiens
atggggaaaaaacagaacagaaaaactggaaactctaaaaatcagagcgcctctcctcctccaaaggaacgcagctcctcaccagcaacggaacaaagctggatggagaatgactttgacgagctgagagaagaaggcttcagactatcaaattactctgagctaccggaggacattcaaaccaaaggcaaagaagttgaaaactttgaaaaaaatttagaagaatgtataactagaataaccaataagagaaactttaaaccaacaaagatcaaaagagacaaagaaggccattacataatggtaaagggatcaattcaacaagaagagctaactatcctaaatatatatgcacctacaggagcacccagattcataaagcaagtcctgagtgaccgacaaagagacttagacttccacacattaataatgggagactttaacaccccactgtcaacattagacagatctacaagacagaaagtcaacaaggatacccaggaattgaactcagctctgcaccaagcggacctaatagacatctacagaactctccactccaaatcaacagaatatagatttttttcagcaccacaccacacctattccaaaattgaccacttacttggaagtaaagctttcctcagcaaatgcaaaagaacagaaattataacaaactatctctcagaccacagtgcaatcaaactagaactcaggattaagaatctcactcaaaaccgctcaactacatggaaactgaacaacctgctcctgaatgactactgggtacataacgaaatgaaggcagaaatgaagatgttctttgaaaccaacgagaacaaagacacaacataccagaatctctgggacgcattcaaagcagtgtgtagagggaaatttatagcactaaatgcccacaagagaaagcaggaaagatccaaaattgacaccctaacatcacaattaaaagaactagaaaagcaagagcaaacacattcaaaagctagcagaagactaaaccaggaagaagttgaatctctgaatagaccaataacaggatctgaaattgtggcaataatcaatagcttaccaacaaaaagagtccaggaccagatggattcacagccaaattctaccagagtgttggaagttctggccagggcaattaggcaggagaaggaaatcaggggtattcaattaggaaaagaggaagtcaaattgtccctgtttgcagatgacatgattgtatatctagaaaaccccattgtctcagcccaaaatctccttaagctgataagcaacttcagcaaagtctcaggatacaaaatcaatgtacaaaaatcacaagcattcttatacaccaacaacagacaaacagagagccaaatcatgagtgaactcccattcacaattgcttcaaagagaataaaatacctaggaatccaacttacaagggatgtgaaggacctcttcaaggagaactacaaaccactgctcaaggaaataaaagaggatacaaacaaatggaagaacattccatgctcatgggtaggaagaatcaatatcgtgaaaatggccatactgcccaaggtaatttacagattcaatgccatccccatcaagctaccaatgactttcttcacagaattggaaaaaactactttaaagttcatatggaaccaaaaaagagcccgcatcgccaagtcaatcctaagccaaaagaacaaagctggaggcatcacgctacctgacttcaaactatactacaaggctacagtaaccaaaacagcatggtactggtaccaaaacagagaaatagatcaatggaacagaacagagccctcagaaataacgccgcatatctacaactatctgatctttgacaaacctgagaaaaacaagcaatggggaaaggattccctatttaataaatggtgctgggaaaactggctagccatatgtagaaagctgaaactggatcccttccttacaccttatacaaaaatcaattcaagatggattaaagacttaaacgttagacctaaaaccataaaaaccctagaagaaaacctaggcattaccattcaggacataggcatgggcaaggacttcatgtctaaaacaccaaaagcaatggcaacaaaatccaaaattgataaatgggatctaattaaactaaagagcttctgcacagcaaaaaaaactaacatcagagtgaacagacaacctacaaaatgggagaaaattttcgcaacctacttatctgacaaagggctaatatccagaatctacaatgaactcaaacaaatttacaagaaaaaaacaaacaaccccatcaaaaagtgggcgaaggacatgaacagacacttctcaaaagaagacatttatgcagccaaaaaacacatgaaaaaatgctcaccatcactggccatcagagaaatgcaaatcaaaaccacaatgagataccatctcacaccagttagaatggtgatcattcaaaagtcaggaaacaacaggtccctcatgtatccaaggagattacgcattcagccacgacaatgtactgacaataatgaaaaaagcacatggaacaaccacaggcagaaagattacaaactctgcaataaatataaaggtattggttttataaggtggcctgcaggctacggaccagcacagagctctggcaaatgtggaatgccaggagatgtacaaaaaaatcaagtttcttggtataaagttcaaaatgctttgagtagagttgttcaggaggtcctcagtggcactgccactcactggttgggacgtttttgttctctgtcctcctgtgtggaagatgacaaggacggctttgtgcaacttctgttgtatgcgctgcttttcaaccccttggatgagatactcatacaaggaacgaaaaacctaaaaaagttctcagatgaccccaaaaggctcatagagggcttccccaaattggctcttacatttagattaatttggaaggacataaatgtactcctgggacaagcccttttacaagaggaaagacagaccatctgcggagcagcaatccactgtcgaaatgacttacacctggaaaatgccaactaccctggaggggctacagctgttccccagctggaccccaatcaggactacaatgccaaagcgggaatatgggccaggaaccataggctcttgtgtctaatagagatgttcaccagagtggcagaggcaatgcagcttacagaggtgggcaggaggcccttgctggagcctgtgtgcacagtcacactggaggtggtgttggctggggatggtcctggcaccgtggctcccagaggatcccaaacaaaagccatttttaaggacgatgccaagatccccaggaaccacgagaagtcagagctggtgcggggctctggggccctgaggccccgcacggagcaggaggcacttgtagctgagtga

SEQ ID NO: 118487 - DNA, 1900 bp, Homo sapiens
atttcaataagtgtatgactcttaaattccggttaaaaaatttttcaaggatcaacaaaattgatacaccgctagcaagactaataaagaagaaaagagagaagaatcgaatagacacaataaaaaatgataaaggggatatcaccagtaatcccacagaaatacaaagtaccatcagagaatactacaaacacctctacacaaataaactagaaaatctagaagaaatggataaattcctcgacacatacaccctcccaagactaaaccaggaagaagttgaatctctgaatagaccaataacaggctctgaaattatggcaataatcaatagcttaccaaccaaaaagagtccaggaccagatggattcacagccaaattctaccagaggtacaaggaggaactggtaccattccttctgaaactattccaatcaatagaaaaagagggaatcctccctaactcattttatgaggccagcatcatcctgataccaaagccgggcagagacacaaccaaaaatgagaattttagaccaatatctttgatgaacattgatgcaaaaatcctcaataaaatactggcaaaccgaatccagcaacacatcaaaaagcttatccaccatgatcaagtgggcttcatccctgggatgcaaggctggttcaatatacgcaaatcaataaatgtaatccagcatataagcagaaccaaagacaaaaaccacatgattatctcaatagatgcagaaaaggcctttgacaaaattcaacaacccttcatgctaaaaactctcaataaattagggaataaaatacctaggaatccaacttacaagggatgtgaaggacctcttcaaggagaggtccttgaaccactgctcaatgaaataaaagaggatacaaacaaatggaagaacattccatgctcatgggtaggaagaatcaatatcgtgaaaatggccatactgcccaaggtaatttatagattcaatgccatccccatcaagctaccaatgactttcttcacagaattggaaaaaactactttaaagttcatatggaaccaaaaaagagccctcatcgccaagtcaatcctaagccaaaagaacaaagctggaggcatcacgctacctgacttcaaactatactacaaggctacagtaaccaaaacagcatggtactggtaccaaaacagagatatagatcaatggaacagaacagagccctcagaaataacgctgcatatctacaactatctcatctttgacaaacctgagaaaaacaagcaatggggaaaggattccctatttaataaatggtgctgggaaaactggctagccatatgtagaaagctgaaactggatcccttccttacaccttatacaaaaattaattcgagatggattaaagacttaaacgttagacctaaaaccataaaaaccctagaagaaaacctaggcattaccattcaggacataggcatgggcaaggactacatgtctaaaacaccaaaagcaatggcaacaaaagccaaaattgacaaatgggatctaattaaactcaagagcttctgcacagcaaaagaaactaccatcagagtgaacaggcaacctacaaaatgggagaaaattttcgcaacctactcatctgacaaagggctaatatccagaatctacaatgaactcaaacaaatttacaagaaaaaaacaaacaaccccatcaaaaagtgggtgaaggacatgaacagacacttctcaaaagaagacatttatgcagccaaaaaacacatgaaaaaatgctcaccatcactggccatcagagaaatgcaaatcaaaaccacaatgagataccatctcacaccagttagaatggcaatcattaaaaagtcaggaaacaacag

SEQ ID NO: 118488 - DNA, 1932 bp, Homo sapiens
gagctggttttttgaaaagatcaacaaaattgatagactgctagcaagactaataaagaagaaaagagagaagaatcaaatagatgcaataaaaaatggtaaaggggatatcaccactgatcccacagaaatacaaactaccatcagagaatactataaacacctctatgcaaataaactagaaaatctagaagaaatggataaattcctcgacacatacaccctcccaagactaaaccaggaagaagctgaatctctgaatagaccaataacaggctctgaaattgaggcaataattaatagcttatcaaccaaaaaaagtccaggaccagatggattcacagccgaattctaccagaggtacaaggaggagctggtaccattccttctgaaactattccaatcaacagaaaaagagggaatcctccctaactcattttatgaggccagcatcatcctgataccaaagcctggcagagacacaacaaaaaaagagaattttagaccaatatccttgatgaacattgatgcaaaaatcctcaataaaatactggcaaaccgaatccagcagcacatcaaaaagcttatccaccatgatcaagtgggcttcatccctgggatgcaaggctggttcaacatacgaaaatcaataaacgtaatccagcatataaacagaaccaaacacaaaaaccacatgattatctcaatagatgcagaaaaggcctctgacaaaattcaacaacccttcatgctaaaaactctccgtaaattaggtattgatgagacacaaacagagagccaaatcatgagtgaactcccattcacaattgcttcaaagagaataaaatacctaggaatccaacttacaagggacgtgaaggacctcttcaaggagaactacaaaccactgctcaatgaaataaaagaggatacaaacaaatggaagaactttccatgctcatgggtaggaagaatcaatattgtgaaaatggccatagtgcccaaggtaatttatagattcaatgccagccccatcaagctaccaatgactttcttcacagaattggaaaaaactactttaaagttcatatggaaccaaaaaagagcctgcattgccaagtcaatcctaagccaaaagaacaaagctggaggcatcatgctacctgacttcaaactatactacaaggctacagtaaccaaaacagcatggtactggtaccaaaacagagatatagaccaatggaacagaacagagccctcagaaataacgccgcatatctacaactatctgttctttgacaaacctgacaaaaacaagcaatggggaaaggattccctatttaataaatggtgctgggaaaactggctagccatatgtagaaagctgaaattggatcctgtacttacaccttatacaaaaattaattcaagatggattaaagacttacatgttagacctaaaaccataaaaaccctagaagaaaacctaggcattaccattcaggacataggcatgggcaaggacttcatgtctaaaacaccaaaagcaatggcaacaaaagccaaaattgacaaatgggatctaattaaactaaagagcttctgcacagcaaaagaaactaccatcagagtgaacaggcaacctacagaatgggagaaaatttttgcaacctactcatctgacaaagggctaatatccagaatctacaatgaactcaaacaaatttacaagaaaaaaacaaacaaccccatcaaaaagtgggcgaaggacatgaacagacacttctcaaaagaagacatttatgcagacaaaaagcacatgaaaaaatgctcatcatcactgatcatcagagaaatgcaagtcaaaaccacaatgagataccatctcacaccagttagaatggcgatcattaaaaagtcaggaaacaacag

SEQ ID NO: 118489 - DNA, 2574 bp, Homo sapiens
atgaaggcagaaataaagatgttctttgaaaccaatgagaacaaagacacaacataccagaatctctggaacacattcaaagcaatgtgtagagggaaatttatagcactaaatgcccacaagagaaagcaggaaagatctaatacggacaccctaacatcacaattaaaagaactgaagaagcaagagcaaacacattcaaaacctagcagaaggcaagaaataactaagatcagagcagaaatgaaggaaatagagacacaaaaaacccttcaaaaaatcaaggaatccaggacctggttttttgaaaagatcaacaaaattgatagactgctagcaagactaacaaagaagaaaagagagaagaatcaaatagacgcaataaaaaatgataaaggggatatcaccaccgatcccacagaaatacaaactaccatcagagaatactataaacacctctatgcaaataaactagaaaatctagaagaaatggataaattcctcgacacatacaccctcccaagactaaaccaggaagaagttgaatctctgaatagaccaataacaggatctgaaattgaggcaataattaatagcttaccaaccaaaaatgtccaggaccagatggattcacagccgaattctaccggagaaaaagggggaatcctccctaactcattttatgaggccagcatcatcctgataccaaagcctggtacagacacaacaaaaaaagagaattttagaccaatatccttgatgaacattgatgtaaaaatccttaataaaatactggcaaaccgaatccagcagcacatcaaaaagcttattcaccatgatcaagtgggcttcatccctgggatgcaaggctggttcaacatacgaaaatcaataaacatcatccagcatataaacagagccaaagacaaaaaccacatgattatctcaatagatgcagaaaaggcctttgacaaaattcaacaatgcttcatgctaaaaactctcaataaattaggtattgatgggacatatctcaaaataataagagctatctatgacaaacccacagccaatatcatactgaatggacaaaaactggaagtgttccctttgaaaactggcacaagacagggatgccctctctcaccactcctattcaacatagtgttggaagttctggccagggcaatcaggcaggagaaggaaataaagggcattcaattaggaaatgaggaagtcaaattgtccctgtttgcagatgacatgattgtatatctagaaaaccccatcatctcagccccaaatctccttaagctgataaacaacttcagcaaaggctcagcatataaaatcaaagtgcaaaaatcacaagcattcttatacactaataacagacaaacagaaagccaaatcatgagtgaactcccattcacaattgcttcaaagagaataaaatacctaggaatccaacttacaagggatgtgaaggacctcttcaaggagaactacaaaccactgctcaaggaaataaaagaggatacaaacaaatggaagaacattccatgctcatgggtaggaagaatcaatatcatgaaaatggccatactgcccaaggtaatttatagattcaatgccatcctcatcaagctaccaatgacttttttcacagaattggaaaaatctactttaaagttcatatggaaccaaaaaagagcccgcattgccaagtcaatcctaagtcaaaagaacaaagctggaggcatcacgctacctgacttcaaactatactacaaggctacagtaaccaaaacagcatggtactggtaccaaaacagagatatagaccaatggaatggaacagagccctcagaaataatgccacatatctacaactatctgatctttgacaaacctgagaaaaacaagcaatggggaaaggattccctatttaataaatggtgctgggaaaactggctagccatatgtagaaagctgaaactggatcccttccttacaccttacacaaaaattaattcaagatggattaaagacttacatgttagacctaaaaccataaaaaccctagaaaacctaggcaataccattcaggacataggcatgggcaaggacttcatgtctaaaacaccaaaagcaatggcaacaaaagccaaaattgacaaatgggatctaataaaactaaagagcttctgcacagcaaaagaaactaccatcagagtgaacaggcaacctacaaaatgggagaaaatttttgcaacctactcatctgacaaagggctaatatccagaatctacaatgaactcaaacaaatttacaagaaaaaaacaaacaaccccatcaaaaagtgggcaaaggatatgaacagacacttctcaaaagaagacatttatgcagccaaaaaacacatgaaaaaatgctcaacatcactggccatcagagaaatgcaaatcaaaaccacaatgagataccatctcacaccagttagaatggcgatcattaaaaagtcagggaacaacaagtgctggagaggatgtggagaaataggaacactttaa

SEQ ID NO: 118490 - DNA, 1965 bp, Homo sapiens
atgaccttagagagtgagcagacatttgtgtatgctgtaactgcaacacagactggggctaaagaggggacgaggatgagcaagagcaatgtggcaggacagcagggtgatagtggggagaaggcacttcaaaaaacgtatcagaagatacttcgagaaaaagaaagtgctttagaagcgaaataccaagcaatggagagagcagcaacatttgaacatgacagagataaagttaaaaggcaattcaagatttttagggagaccaaagaaaatgaaattcaggacttactgagggccaagagggagttggagagcaaacttcagaggctacaggctcagggtatccaagtatttgatcctggggagtctgattcagatgacaactgtacagatgtcactgctgctggaacccaatgtgaatattggactggcggagccttgggaagtgaaccttccataggaagcatgatccagcttcagcagtccttcagaggccctgagtttgcccatagttctatagatgtggaaggaccctttgcaaatgttaatagagatgactgggatattgctgtagctagtttattacaagttactcctctgttttcacattctctgtggagtaacactgtcagatgttacctcatttatacagatgaaacccagcctgagatggatcttttccttaaggactattcacctaaacttaagagaatgtgcgagacaatgggatattttttccatgctgtttattttccaatagatgttgaaaatcaatacctcactgtaagaaaatgggaaattgagaaaagttctttagttattttatttattcacttaacattaccaagaataaaatacctaggaatccaacttacaagggatgtgaaggacctcttcaaggagaactacaaaccactgctcaacgaaataaaagaggacacaaacaaatggaagaacattctatgctcatggacaggaagaaacaacgtcatgaaaatggccacactgcccaaggtaatttatagattcaatgccatccccatcaagctaccaatgactttcttcacagaattggagaaaactactttgaagttcatatggaaccaaaaaagagcccacattgccaagacaatcctaagcgaaaagaacaaagctggaggcatcatgctacctgacttcaaactatactttaaggctacagtaaccaaagcagcatggtactggtgccaaaacagagatatagaccaatggaacagaacagaggcctcagaaataacaccacacatctacaaccatctgatctttgacaaacctgacaaaaacaagaaatggggaaaggattccctctttaataaatggtgctgggaaaactggctagccatatgtagaaagctgaaactggatcccttccttacaccttacacaaaaattaattcaagatggattaaagacttaaatgttagacctaaaaccataaaaaccctagaagaaaacctaggcaatgccattcaggacataggcatgggcaaggacttcatgactaaaacaccaaaagcaatggcaacaaaagccaaaattgacaaatgggatctaattaaactaaagagcttctgcatggcaaaagaaactcccatcggagtgaacaggcaacttacagaatgggagaaaatttttgcaatctacccatctgacaaagggctaatatccagaatctacaaagaacttaaacaaacgtacaagaaaaaaacaaacaaccccatcgaaaagttggcaaaggaaatgaacagacacctctcaaaagaagacatttatgcagccaacagacacaagaaaaaatgctcatcatcactggtcatcagagaaatgcaaatcaaaaccacaagagatatcatctcacaccagtcagaatggcaatcattaaaaagtcaggaaacaacagatgctggagaggatgtggagaaatag

SEQ ID NO: 118491 - DNA, 636 bp, Homo sapiens
ttacaatttgccatgtttttgtagtggctggtaccggttgttcctttccatgtttactgtttccttcaaggtctcttgtagggcaggccttgtggtgacacaatctctcagcatttgcttgtctgtaaaggattttatttctccttcacttatgaagcttagtttggctggatatgaaattctgggttgaaaattcttttctttaagaatgttgaatattggcccccactctcttctggcttgtagagtttcttctgagagatccgctgttagtctgatgggtttccctttgtgggtaacctgacctttctctctggctgcccttaacattttttccttcatttcaactttggtgaatctgacaattatgtgtcttggagttgctcttctcaaggagtatctttgtggcattctctgtatttcctgaatttgaaagttggcctgccttgctaggttggggaagttctcctggataataccctgaatagtgttttccaacttggttccattctccccgtcactttcagttacaatgatcagacacagatttgatattttcacatagtcccatatttcttggaggctttgttcattactttttactcttttttctctaaacttctcttctcgcttcat

SEQ ID NO: 118492 - DNA, 1692 bp, Homo sapiens
atggggagaaaccagagcagaaaagctgaaaattctaaaaaccagagcacctcttctcttccaaaggatcgcagctcctcaccagcaacggaacaaagctggacgaagaatgactttgacgagctgacagaagtaggcttcagaagtgacaaggagaatggaaccaagttggaaaacactcttcagggtattatccaagagaacttccccaacctagcaaggcaggccaacattcaaattcaggaaatacaaagaacaccacaaagatactccttgagaagagcaatcccaggacacataaatgtcagattcaccaaggttgaaatgaaggaaaaaatgttaagggcagccagagagaaaggtcgggttacccataaagggaagcccatcagactaacagcagatctcttagcagaaactctacaagccagaaagaataaaatacctgggaatccaacttacaagggatgtgaaggacctcttcaaggagaactacaactcaacgaaataaaagaggacacaaacaaaaggaagaacattccatgctcatgggtaggaagaatcaatatcttgaaaatggccatactgcaaaaagtaatttatagattcaatgccatacccatcgagctaccaattactttcttcacaaaattggaaaaaactactttaaggttcatatggaacaaaaaaagagtccacattgccaagtcaatcccaagcaaaaagaacaaagctggaggcatcatgctacctgacttcaaactatactacaaggctacaataaccaaaacagcatggtacttgtaccaaaacagagatatagaccaatggaacagaacagaagccttaggaataacaccacacatctacaaccatctgatctttgacaaacctgacaaaaacaagcaacggggaaaggattccctatttaataaatggtgctgggaaaactggctagtcatatgtagaaagctgaaactggatgccttccttacaccttatacaaaaattaattcaagatggattaaagacttaaatattagacctaaaaccataaaaaccctagaagaaaacctaggcaataccatccagggcataggcatgggcaaggacttcatgactaaaacaccaaaagcaatggcaacaaaagccaaaatagacaaacgggatctaattaaactgaagagcttctgcacagcaaaagaaactaacatcagagtgaacaggcaacctatagaatgggagaaaatttttgcaatctaccgatctgacaaagggctaatatccagaatctacaaagaacttaaacaaatttacaagaaaaaaacaaacaactccatcaaaaagtgggcaaaggatatgaacagacacttctcaaaagaagacatttatgcagccaacagacatgagaaaaaatggtcaccatcactggtcaccagagaaatgcaaatcaaaaccataatgagataccatctcacaccagttagaattatgaccattaaaatgtcagggaacaacagatgctggagaggatatggagaaataggaatgcttttacactgttggtgggaatgtaaactagttcaagcattatggaagacagtgtggcgattcctcaaggatctagagctagaaataccatttgacccagtgatcccattactgggtatatacccaaaggattatacataa

SEQ ID NO: 118493 - DNA, 2405 bp, Homo sapiens
agtttatgtggatcaggaatctgaatgcagcttacctgggtgcctctggctcagagtctctcatgagcctcaatcaaggtgtcagctgtggccacagtcatctcaaggctctactggaggaagagccaattccaaattcacacatgtggttgctgtcaggactcagttccaggaaaaccacacgctaccccagaaggaaagatctatctggttctgtgttaggcacagagatatacccgctagattctccttcaaggaaggatttattacccagctgtgagaagtatagtcagcaggcagtttccggctgtcagtccttcagaatctgcctcatctgcagagagcagccctgttggaggttgagtccttccaagcaggggctatccatcaacaagtggcttatggttgctgctggcctgttggaccaagtgagttcctccctggtgccttcagctgccaggacaggctctggtcaactgattccaaactggaataagcagctgcgttcccttggcctctacaaaggtgatttctggctggatttgaccaataggagacaagggtcagagatcagattggagggtggggagaagttaggatctctctccatcgccttcttagccttaggaaaagaggaagtcaaattgtccctgtttgcagacgacatgattgtatatctagaaaaccccatcatctcagcccaaaatctcctcaagctgataagcaacttcagcaaagtctcaggacacaaaatcaatgtgcaaaaatcacaagaattcttatacaacaataacagacaaacagagagccaaatcatgagtgaactcccattcacaattgcttcaaagagaataaaatacctaggaatccaacttacaagggatgtgagggacctcttcaaggagaactacaaaccactgctcaacaaaataaaagaggatacaaacaaatggaagaacattccatgctcatgggtagaaagaatcaatatcgtgaaaatggccatactgcccaaggtaatttatagattcaatgccatccccatcaagctaccaatgactttcttcacagaactggaaaaaactactttaaagttcatatggaaccaaaaaagagcccgcattgccaagtcaatcctaagccaaaagaacaaagctggaggcatcacgctacctgacttcaaactatactacaaggctacagtaaccaaaacagcatggtactggtaccaaaacagagatatagaccaatggaacagaacagagccctcagaaataacgccacatatctacaactatctgatctttgacaaacctgacaaaaacaagcaatggggaaaggattccctatttaataaatggtgctgggaaaactggctagccatatgtagaaagctgaaactggatcccttctttaccccttatacaaaaattaattcaagatggattaaagacttaaatgttagacctaaaaccataaaaaccctagaagaaaacctaggcaatatcattcaggacataggcatgggcaaggatttcatgtctaaaacaccaaaagcaatggcaacaaaagccaaaattgacaaatgggatctaattaaactaaagagcttctgcacagcaaaagaaactaccgtcagagtgaacaggcaacctacagaatgggagaaaatttttgcaacctactcatctgacaaagggctaatatccagaatctacaatgaactcaaacaaatttacaagaaaaaaacaaacaaccccatcaaaaagtgggcaaaggatatgaacaaacacttctcaaaagaagacatttatgcagccaacagacacatgaataaatgctcttcatcactggccatcagagaaatgcaaatcaaaaccacaatgagataccatctcacaccagttagaatggcaatcattaaaaagtcaggaaacaacgggtgctggagaggatgtggagaaataggaacacttttatactgttggtgggactgtaaactagctcaaccattgtggaagtcagtgtggcgattcctcagggatctagaactagaaataccatttgacccagccatcccattactgggtatatacccaaaggaatataaatcatgctgctacaaagacacatgcacacgtaatgcatcatttctctctggctgctttcaagactttctcttcgcctttaggtttcaagagtttaattataatgtatcttggtgtttcactgggtttatcctgtaccaagttcgcatagcttcttgggtccttaggtttgtttcttttgccaaaggtggagagaaaaggctcaggcccacatggccaaagatctctcagaccaggccatttgctgtggctatgtcctttttgcaagcagtgcccaccctggtgtctctgggctga

SEQ ID NO: 118494 - DNA, 1572 bp, Homo sapiens
atgctggtgagctttgtctctctgggttccctgtgccttcaaccaggtagccagactctgctggagaaaaatcgcacagtcaagccgcatgtctccttcacactgctgccagctttatctcatgtttctgagaaaaatgaagccgaaagcatgaactcccttatccctcccccgccaaatctacacacccctgcacaggcgcctttccctctgcccacaaaggagcaagatcgcagctcctcaccagcaacggaacaaagctggacagagaatgactttgatgagttgacagaagtaggcttcagaaggtcggtaataacaaactcctccaagctaaaggaggatgttcgaacccattgcaaggaagctaaaaatcttgaaaaaagattacatgaatggctaactagaatcaacagtgtagagaagaccttaaatgacctgaagctgaaatccatggcacgagaacttcatgacacatgcacaagcttcaatagccgatttgatcaagtggaagaaagggtgtcagcgattgaggatcaaaccaatgaaataaataatggggagaatggaaccaagttggaaaacactctgcaggatattatccaggagaacttccccaacctagcaaggcaggccaacattcaaattcaggaaatacggagaacaccacaaagatactcctcgagaaaagcaaccccaagacacataattgtcagattcaccaaggttgaaatgaaggaaaaagtgttaagggcagccagagagaaagtattggaagttctggccagggccatcagtcaagagaaagaaataaaatgtactcagttaggaaaagaggaagtcaaattgtccttgtttgcagatgacatgattgtatgtttagaaaaccctgttgtctcagaccataatgtccttaagctgataagcaacttcagcaaagtctcagtatacaaaatcaacgtgcaaaaatcacatgcattcctatacaccaataacagacaaacagagagccaaatcatgagtgaactcccgttcacaattactacaaagagaataaaatacctaggaatccaacttacaagggctgtgaaggacttcttcaaggagaaatacaaaccactgctcaacgaaataaaaaaggacacaaacaaatggaagaacattccatgttcatgcataggaagaatcaatatcatgaaaatggccatagtgcccaaggtaatttatggattcaatgccatccccatcaagctaccaaggactttcttcacagaattggaaaaaactactctaaagttcatatggaagaaaaaaggagccaaaacaatcctaagcataaagaacaaagctggaggcatcatgctacctgacttcaaactatactacaaggctacagtaaccaaaatagcatggtactggtaccaaaacagatatataaaccaacggaacagaacagagacctcagaaataacatcacacatctacaaccatctgattttgacaaacctgacaaaaacaagaaatggggaaaggattccctatttaataaatggtgctgggaaaactggctag

SEQ ID NO: 118495 - DNA, 1730 bp, Homo sapiens
atgtctgctgttaccactcttactcaacagagtactgaaatttctagccaatgcaaaatacaaactaccatcagagaatactgtaaacacctctacacaaataaactagaaaatctagaagaaacggataaattcctgaacacatacaccctcccaagactaaaccaggaagaagttcaatccctgaatagaccaataacaggttctgaaattgaggcaataattaatagcctaccaaccaaaaaagtccaggaccagacagattcacagctgaattctactagagtattagaagttctggccagggcaatcaggcaagagaaagaaataaagggtattcaattaggaaaagaggaagtcaaattgtccctgtttgcagatgacatcattgtatatttagaaaaccccatcatctcagcccaaaatcttcttaagctgataagcaacttcagcaaagtctcaggatacaaaatcaatctgcaaaaatcacaagcattcctatacaccaataacaaacaaacagggagccaaatcatgagtgaactcccattcacaattgcttcaaagagaataaaatgcctaggaatccaacttacaagggatgtgaaggatctcttcaaggagaactacaaaccactgctcaatgaaataaaagaggacacaaacgaatggaagaacattccatgctcatggataggaagaatcagtatcgtgaaaatggccatactgcccaaggtaatttatagattcaatgccatccccatcaagctaccaatgacttttttcacagaattggaaaaaactactttaaagttcatatggaaccaaaaaagagcccacatcgccaagtcaatcctaagccaaaagaacaaagctggaggcatcacactacctgacttcaaactatactacaaggctacagtaaccaaaacagcatggtactggtaccaaaacagagacatagaccaatggaacagaatagagcccctggaaataataccatacatctacaactatctgatctttgacaaatctgacaaaaacaagaaatggggaaaggattccctatttaataaatggtgctgggaaaactggctaaccatatgtagaaagctgaaactggatcccttcctcacatcttatacaaaaattaattcaagatggattaaagacttaaatgttagacctaaaaccataaaaaccccagaagaaaacctaggcaataccattcaggacataggcatgggcaaggacttcatgactaaatcagcaaaaaggaatggcaacaaaagccaaaattgataaatgggatctaattcaactaaagagcttctgcacagcaaaagaaactaccatcagagtgaataggcaacctacagaatgggagaaaatttttggaatctactcatctgacaaagggctcatatacagaatctacaaagaacttaaacaaatttacaagaaaaaaacaaacaaccccatcaaaaagtgggcgaaggacatgaacagacacttctcaaaagaagacatttatgcagccaaaaaacacatgaaaaaatgctcaccatcactggccatcagagaaatgcaaatcaaaaccacaatgagataccatctcacaccagttagaatggcgatcattgaatcaagtcaggaaacaacaggtccctcatgtatccaaggagattacgcattcagccacgacaatgtactgacaataatgaaaaaag

SEQ ID NO: 118496 - DNA, 4329 bp, Homo sapiens
atggaccatctggccggggagggcgtcaaggccaagtacctcatgccgccccttgtcacaatgacctccccgttccacttcactgccatgccagagaagtccttaaaggacctgatggagctgaaaaccaaggcacgagaactacgtgacaaatgcacaagcctcagtagccgattcgatcaactggaagaaagggtatcagtgatggaagatgaaatcaatgaaatgaagcaagaagagaagtttagagaaaaaggaataaaaagaaatgaacaaagcctccaagaaatatgggactatgtgaaaagaccaaatctatgtctaattggtgtacctcaaagtgacagagagaatggaaccaagttggaaaacactctgcaggatattatgcaggagaacttccccaatctagcaaggcaggccaacattcaaattcaggaaatacagagaacaccacaaagatactcctcaagaagagcaactccaagacacataattgtcagattcaccaaagttaaaatgaaggaaaaaaatgttaagggcagccagagagaaaggtcgggttaccctcaaagggaagcccatcagactaacagcagatctctcggcagaaaccctacaagccagaagagagtgggggccaatattcaacattcttaaagaaaataattttcaaccatcagctagaattttcaacaatcagaatctcatatccagcccaaactaagcttcataagcgaaggagaaataaaatactttatagacaagcaaatgctgagagattttatgaggcgccaggcctgccttacaagagctcctgaaggaagaagcactaaacatggaaaggaacaaccgacagatcaacgagacagaaagtcaacaaggatacccaggaattgaattcagctctgcaccaagcggacctaatagacatctacagaactctccaccccaaatcaacagaatatacattttttcagcaccacaccacacctattccaaaattgaccacatagttggaagtaaagctctcctcagcaaatgtaaaagaacagaaattataacaaactatctctcagaccacagtgcaatcaaactagaactcaggattaagaatttcactcaaagccgctcaactacatggaaactgaacaacctgctcctgaatgactactgggtacataacgaaatgaatgcagaaataaagatgttctttgaaaccaacgagaacaaagacacaacataccagaatctctgggacgcattcaaagcagtgtgtagagggaaatttatagcactaaatgcccacaagagaaagcaggaaagatccaaaattgacaccctaacatcacaattaaaagaactagaaaagcaagagcaaacacattcaaaagctagcagaaggcaagaaataactaaaatcagagcagaactgaaggaaatagagacacaaaaaacccttcaaaaaattaatgaatccaggagctggttttttgaaaggatcaccaaaagtgataggccgctagcaagactaataaagaaaaaaagagagaagaatcaaatagacacaataaaaaatgataaaggggatatcaccactgatcccacagaaatacaaactaccatcagagaatactacaaacaactctatgcaaataaactagaaaatctagaagaaatgaataaattcctcgacacatacactctcccaagactaaaccaggaagaagttgaatctctgaatagaccaataacaggatctgaaattgtggcaataatcaatagtttaccaaccaaaaagagtccaggaccagatggattcacagccgaattctaccagaggtacaaggaggaactggtaccattccttctgaaactattccaatcaatagaaaaagagggaatcctccctaactcattttatgaggccagcatcattctgataccaaagccgggcagagacacaaccaaaaaagagaattttagaccaatatccttgatgaacattgatgcaaaaatcctcaataaaatactggcaaaccgaatccagcagcacatcaaaaagcttatccaccatgatcaagtgggcttcatccctgggatgcaaggctggttcaatatacgcaaatcaataaatgtaatccagcatataaacagagccaaagacaaaaaccacatgattatctcaatagatgcagaaaaagcctttgacaaaattcaacaacccttcatgctaaaaactctcaataaattaggtactgatgggacatatctcaaaataataagagctatctatgacaaacccacagccaatatcatactgaatgggcaaaaactggaagcattccctttgaaaactggcacaagacagggatgccctctctcaccgctcctattcaacatagtgttggaagttctggccagggcaatcaggcaggagaaggaaataaagggtattcaattaggaaaagaggaagtcaaattgtccctgtttgcagacgacatgattgtttatctagaaaaccccattgtctcagcccaaaatctccttaagctgataagcaacttcagcaaagtctcaggatacaaaatcaatgtacaaaaatcacaagcattcttatacaccaataacacagacaaacaagagagccaaatcatgagtgaactcccattcacaactgcttcaaagagaataaaatacctaggaatccaacttacaagggatgtgaaggacctcttcaaggagaactacaaaccactgctcaatgaaataaaagaggatacaaacaaatggaagaacgttccatgttcatgggtaggaagaatcagtatcgtgaaaatggccatactgcccaaggtaatttatagattcaatgccatccccatcaagctaccaatgactttcttcacagaattggaaaaaactactttaaagttcatatggaaccaaaaaagagcccccacattgccccaagtccaatccctaagcccaaaagaacaaagctgggaggcatcacggctacctgacttcaaactatacctacaaggcctacagtaacccaaaacagcatggtactggtacccaaaacagagatatatagaccaatggaacagaatagagccctcagaaataatgccacatatatctacaactatctaatctttgacaaaccctgggaaaaaccaagcaatgggggaaaggattcccatatttaataaatgggtgctgggaaaactgggctagccatatgtagaaagctgaaactggatccccttcccttacaccttatacaaaaaatcaaattcaagatggattaaagactttaaatgttaagcctaaaccccataaaaaactctagaaggaaaacctaggcaatacccatttcaggacataggcatgggcaaggacttcatgtctaataaaacaccaaaagccaatggccaacaaaagacaaaattgacaaatgggatctaattaaactaaagagcttcctgcacagcaaaagagaaactaccatcagagtgaacaggccaacctacaaaatgggagaaaaaatttttgcaagctacttatctgacaaagggctaatatccagaatctacaaagaactcaaacaaatttacaagaaaaaaacaaacaacccccatcaagaagtgggcgaaggatatgaacagatgcttctcaaaagaagacatttatgcagccaaaaaaacacatgaaaaaatgctcaaccatcactggccatcagagtaatgcaaatcaaaaccacaatgagataccgtctcacaccagttagaatggcgatcattaaaaagtcaggaaacaacaggtgctggagaggatgtggagaaataggaacacttttacactgttggtgggactgtaaactagttcaaccattgtggaagtcagtgtggcgattcctcagggatctagaactagaaataccatttgacccagccatcccattactgggtatatacccaaaggattataaatcatgctgctataaggacacatgcacaccttctaaactgaggcagagagccaccggaaatgttgcagcggcagctctcaagtccaaggggacctccacaagccttggaccctggaacagaggcaccagtgccatctccccagtagagactgcagtcacagtgcccaggagcagcaggattgttcccctccctccagccgccagccgcccctccaccctacacatgcacagggttcagcgccagcttccaggccagcagccccacgtatgcctgaacttagctggtgggcgcaaccacttgttccaggaaacatccctcagagagcagaca

SEQ ID NO: 118497 - DNA, 819 bp, Homo sapiens
atgaggagggattacccagtgaaggcttttacttctaggaagagagaacagcatgtacaaaaagtcccaagcaagaagagcaggcaggttcaaagaactgaacgaagatttttggagaccactccagatttactgtatcaaaaggaaaaagatctgttgttaatctcttcttctaaaaagcagcccagaccaggaatagagagacattacatgatgacacaagggtcaatccaccaagaagacgtagctatactgaaggttatacatcaaataaaagagcttcaaaatacattcagcaaaactgttagaaataaaaggaaaaatagacatccacaaatagttggagactttaatactcctacctcaacaattgataggactattagacagcaaatcagcatagaattttatgacaccatcaagcaatgggatctaactgacacttgtaggacaggccacccaataacagaatacatcttctgttcaggtgcccacttaacattcaccaagataaaccatatccagggccctaaaaggatcctcaagagatttaaaagaattgaaatcatagagtgtgttctagtcctaaaaggatgtcaagctaagaacaggaaaaaagaggaagatttgcagacctattggatgctaaatatttacggaccacattacagatctgggtcatatgctgcgatccacagacaagagaccatctgctctgggcagctttcccaagccttgagggaccgatttgcaatgaatgctaagcttctcctgtcccttgctgcccatctgtgggtaataaaactggacttcatgtaa

SEQ ID NO: 118498 - DNA, 497 bp, Homo sapiens
atgaatcactattccagagaggcggaattcctccactgagaacactcgggctgccctggccactctggagcgcgttgccaagatgaaccgctcggtcatgccggaggggaagctggtggagcccgtcctggaaaaaagaggaagatttgcagacctattggatgctaaatatttacggaccacattacagatctgggtcatatggcttggaatctcttttgcctactatggggttatcctggccagtgctgagctgctggagcgggacttggtctgtggttcaaagtcagactctgcggtggtggtgactgggggggactcaggggagagccagagcccctgctactgccacatgtttgcaccctctgactatcggaccatgatcatcagcaccatcggtgaaattgctttgaatcctttaaatatactgggcatcaatttcctgggaagacggctgagcctttctattaccatgggatgcacggctttattctgcc

SEQ ID NO: 118499 - DNA, 534 bp, Homo sapiens
atggaagaaagccggggcgcgaagccgccgcccgctcttctgcctggggacgcgactctgccgccaggctccctcgggtcagctcggcacccgcccgagcccccccagttccaggccctctcctcatcagacgtgccctgggccctcagcctgttcctctcgccgcccggaaccccgcagcagccccgggtccccagcccgcgcccctccggcgccgcctccgccagctgcccctgccccccgatgcgagccacccctctggctgctcctgcgggttccctgtccaggaagaagcggttggagttggatgacaacttagataccgagcgtcccgtccagaaacgagctcgaagtgggccccagcccagactgcccccctgcctgttgcccctgagcccacctactgctccagatcgtgcaactgctgtggccactgcctcccgtcttgggccctatgtcctcctggagcccgaggagggcgggcgggcctaccaggccctgcactgccctacaggcactgagtatacctgcaag

SEQ ID NO: 118500 - DNA, 660 bp, Homo sapiens
atgatggaacgaatgaccgtcctacagctggctgcaaaatataagactgctataaataaatccctgatgcctgaaaagaagaactgtgtggtaattacatcggcggtacgcgggcagcgcgtcaatcaagccggcgacggtgaatgcagttcgggagagctgatacccctcggggaggcggctccgggagcctgcggacgtggcggacgcctgggacgggatggaagaaagccggggcgcgaagccgccgcccgctcttctgcctggggacgcgactctgccgccaggctccctcgggtcagctcggcacccgcccgagcccccccagttccaggccctctcctcatcagacgtgccctgggccctcagcctgttcctctcgccgcccggaaccccgcagcagccccgggtccccagcccgcgcccctccggcgccgcctccgccagctgcccctgccccccgggccgccctcgcaggccgctcccggcgccccggtcggcttccgtacctgccttctccgcgccgccgtcccagtggccggaggtggggccgtcgccctgcgcactccggagggccatgccccggggccccgggcccccacccgagccccggctggtggcggagccgggagaagacgcggctccgaccgcgggacgtag

SEQ ID NO: 118501 - DNA, 585 bp, Homo sapiens
ggaaatatgatcgcctgtggaatatcgcacgacgatgaacttttcagttactcctgccccaagttcctgtcgcctgtagtgcccaactatgataatgtgcaccccaactaccacaaagagcccttcctgcagcagctgaaggtgttttctgatgaagtacagcagcaggcccagctttcaaccatccgcagcttcctgaagctctacaccaccatgcctgtggccaagctggctggcttcctggacctcacagagcaggagttccggatccagcttcttgtcttcaaacacaagatgaagaacctcgtgtggaccagcggtatctcagccctggatggtgaatttcagtcagcctcagaggttgacttctacattgataagcttaatcgaaccctgaagaagatgggacagagaccttgatgatattcacacacattcaggaacctgttttgatgtattataggcaggaagtgtttttgctaccgtgaaacctttacctagatcagccatcagcctgtcaactcagttaacaagttaaggaccgaagtgtttcaagtggatctcagtaaaggatctttggagcca

SEQ ID NO: 118502 - DNA, 1936 bp, Homo sapiens
atgtcttatcccgctgatgattatgagtctgaggcggcttatgacccctacgcttatcccagcgactatgatatgcacacaggagatccaaagcaggaccttgcttatgaacgtcagtatgaacagcaaacctatcaggtgatccctgaggtgatcaaaaacttcatccagtatttccacaaaactgtctcagatttgattgaccagaaagtgtatgagctacaggccagtcgtgtctccagtgatgtcattgaccagaaggtgtatgagatccaggacatctatgagaacagctggaccaagctgactgaaagattcttcaagaatacaccttggcccgaggctgaagccattgctccacaggttggcaatgatgctgtcttcctgattttatacaaagaattatactacaggcacatatatgccaaagtcagtgggggaccttccttggagcagaggtttgaatcctattacaactactgcaatctcttcaactacattcttaatgccgatggtcctgctccccttgaactacccaaccagtggctctgggatattatcgatgagttcatctaccagtttcagtcattcagtcagtaccgctgtaagactgccaagaagtcagaggaggagattgactttcttcgttccaatcccaaaatctggaatgttcatagtgtcctcaatgtccttcattccctggtagacaaatccaacatcaaccgacagttggaggtatacacaagcggaggtgaccctgagagtgtggctggggagtatgggcggcactccctctacaaaatgcttggttacttcagcctggtcgggcttctccgcctgcactccctgttaggagattactaccaggccatcaaggtgctggagaacatcgaactgaacaagaagagtatgtattcccgtgtgccagagtgccaggtcaccacatactattatgttgggtttgcatatttgatgatgcgtcgttaccaggatgccatccgggtcttcgccaacatcctcctctacatccagaggaccaagagcatgttccagaggaccacgtacaagtatgagatgattaacaagcagaatgagcagatgcatgcgctgctggccattgccctcacgatgtaccccatgcgtattgatgagagcattcacctccagctgcgggagaaatatgggggacaagatgttgcgcatgcagaaaggtgacccacaagtctatgaagaacttttcagttactcctgccccaagtttcttgtcgcctgtagtgcccaactatgataatgtgcaccccaactaccacaaagaagcccttcctgcaagcagctgaaaggtgttttctgatgaagttccagccagcaggcccagctttcaaaccaatccgcagcttcctgaagctctacacccaccatgcctggtggccaagctggctggcttccctggaccctcacagagccaggagttcccggatcccaggtttctttgtcttcaaacaacaagatgaaagaacctccgtgtggacccagcgggtattctcagcccctggatggtgaaatttcagtcaagcctcagaggttgacttcctacatttgataaggacatgattccacatcgcggacaccaaggtcgcacaggcgttatgggggatttcttcatccgtcagattccacaaatttggaggagcttaatcgaaccctgaaggaaggatggggacagagaccttggatgatatttcacacacatttcagggaacctggttttgaatgtattatagggcagggaagtgttttttgctaaccgtgaaaccttttacctagatcagccatcagccctggtcaactcagttaacaagtttaagggaccgaaagtgtttcaagtgggatcttcagttaaaggatctttggagccagaaaaaaaaaaaaaaaaaaa

SEQ ID NO: 118503 - DNA, 1722 bp, Homo sapiens
atgaacatcaaagcgaaaatccttaataaaatactggcaaaccgaatccagcagcacatcaaaaagcttatccaccacgatcatgtcagcttcatccctcggatgcaaggctggttcaacatacacaaaccaataaacgtcatccatcacataaacagaaccaatgacaaaaaccacatgattatctcaatagatgcagaaaaggccttcgataaaattcaacaccccttcacgctaaaaactctcaataaactagatgacatgactgtatatttagaaaaccccatcgtctcagcccaaaatctccttaagctgataagcaacttcagcaaagtctcaggatacaaaatcaatgtacaaaaatcacaagcattcttatacaccaacaacagacaaacagagagccaaatcatgagtgaactcccattcacaattgcttcaaagagaataaaatacctaggaatccaacttacaagggatgtgaaggacctcttcaaggagaactacaaaccactgctcaaggaaataaaagaggacacaaacaaatggaagaacattccatgctcatgggtaggaagaatcaatgtcgtgaaaatggccatactgcccaaggtaatttacagattcaatgccatccccatcaagctaccaatgactttcttcacagaattggaaaaaactactttaaagttcatatggaaccaaaaaagagcccgcatcgccaagtcaatccctaagccaaaagaacaaagctggaggcatcacactacctgacttcaaactatactacaaggctacagtaaccaaaacagcatggtactggtaccaaaacagagatatagatcaatggaacagaacagaggccctcagaaataatgccacacatctacaaccatctgacttttgacaaacctgacaaaaacaagcaatggggaaaggattccctatttaataagtggtgttgggaaaactggctagccatatgcagaaagctgaaactggaccccttccttacaccttatacaaaaattaactcaagatggattaaagacttaaatgtaagacctaaaaccataaaaaccctagaagaaaacctaggcaataccgttcaggacataggcatgtgcaaagacttcatgactaaaacaccaaaagcaatggcaacaaaagccaaaattgacaaatgggatctgattaaactaaagagtttctgcacatcaaaagaaactatcatcagagtgaacaggcaacctacagaatgggagaaaatgtttgcaatctatccatctgacgaagggctaatatccagaatctgcaaggaacttttaaacaaatttacaagaaaaaaaaccaccccatcaaaaagtgggcaaaggatatgaacagacacttctcaaaagaagacatttatgtggccaacaaacatatgaaaaaaagcttatcatcactggtcattagagaaatgcaaatcaaaaccacaatgagacaccatctcacaccagttagaatgacgatcattaaaaagtcaggaaacaacagattctggagaggatgtggagaaacaggaatgcttttacactgttggtgggagtgtaaattagttcaaccactgtagaagatagtgtggtgattcctcaaggatctagaatcagaaataccatctgactcagcaatcccattagggggtatacacccaaaggcttataaatcattctattataa

SEQ ID NO: 118504 - DNA, 2354 bp, Homo sapiens
gggtctacagtaattttattgtaacagagaaaaccaggccgcaataagtctacatggttagagcagatggtggttctttccagtgggtgaagcctgaacccagctagcagcacgcaagcctagaatatcctctttcctggtaccaccctgcgccgctggactcacagtgtgagatgagaggctgcacaccacattcaacaaagggaggaggtccaaccgggcagagacaacatcccaactggagaaacttgcactatcattcaagaggatgccgagataaagtacagtttcctactctccactattctttgctgaaaagggtgagggtacggcatcagcagaaaaattatgttcttcattcttaaataatctcgataggatggagttgatggtcaatcaagcagtagaatgggatgaaactgcaatagttaaaaatgttttgcgtgtaaggaaaagaacggcaatgacaagggagaaaagagagccttctctttttcttaaataagacaggaaactgcattatttcccttgctggagtggcagcagctcatggttttcataaaacatcatttctgcagtgcggcctgttgataaggttgttccaagatgggaggacagacacgaggccgactactcatgacagaactagctggccttctctcaaagcctctaaggtgtgcttgtttctcacgaggaacctgacacttcagttaaagcttctgaaatattgcaatggcataattgacaggttttttggtgcgatgactttcttgcacatgtaaactctttgagaaaagttggagaaaaaaggaccggggagagtttggtttaatattccagacgccagccatggatgcctctgccctgtgtcactacatgttcttttctgagaaacattcaaatgctgagtgttacacactgtggctgaaagaaatgatccactcaccaccatccaccctctctcattgtctgtgtgaagctctcaatagcagaggctgaagacagaaaggttgtctctgtttcctcgacccagggacattacttggtgacctggtgaatggcatgggcaaggtagcccacgttgctggaggtgacccctgccacagagatgcggccatcttttgtcatgtagatggagaactccttgatcagccgctccacctgttccagcttttaacccctgtgaaaacagaacatgcccaatttggtcggtgaatgtgttgcccaattggtgggtggaaaccctcccttccttgaaggttggagaccagttgaagtcccgcatgcccaatgaatgcggtcagccatgcctttcacttcttgcagccattgttttcgcaaatctggggtgttcagaatggcagcagcaatccgggccccattgaggggagggttggaatacatgggacggatcaagatcttcaactgtgactctacccttttggcttcatccgcatctttgcagaccatagtgaaggctcctacacgctcaccatataagcccatgttcttggcatatgattggcagaggcaaacattaatgccctgttcgatgaagtggcgcacagcccaggcatccttatcaccatcaccactggcaaagccttggtaggccatgtcaaagaacgcaaagagattccttttcttcaccactgttgctatttccttccactgttccggacgcgggtccactcccgtgggattgtgggcgcaggcatgcagaagaagaacactctgctctggtatttttgaaatatcctccacagcgcctgtgaagtcaaaaccgcaagtcttggggtcataataccgataaccttgtagctgcatgccagcatccctgaagatgggtgtgtggtttccccaggttggtttgggcagaaagacatctcggctgaacttaaaaaatctttgcagaaaactggctccgatccttaaggctccagttccagaaatggtctgcacagtgacaaaccggccactcttcaagacttcgctgttctcacccagggctagttctgcagatgccttgcaaaattcagccagtcccccaatgggcaggtattccttgtccaaattttttgcggcaatctgggcctctgccttgcggacgctaggcagaacgtaaggctttccattatcatcccggtaggcaccaactcccagattcatctttttgctattggtgtccctcttaaaggcttcagtgactcccagaatgggatctggaggtcccatttccacatgggtccaccaggagctggctctggcagaggccgcggcggcgaggcccgggtggaaggcggcggcgatcccggggaggacgcggccggagtgcagcagggccatggtggacc

SEQ ID NO: 118505 - DNA, 861 bp, Homo sapiens
atggaggagctggtggatgaggggctggtgaaagcccttggggtctccaatttcagccacttccagatcgagaagctcttgaacaaacctggactgaaatataaaccagtgactaaccagaactccctaggaacaatgcaaaacagagccggctttccccgtgatgaggattgtttgctgttgcaggttgagtgtcacccatacctcacacaggagaaactgatccagtactgccactccaagggcatcaccgttacggcctacagccccctgggctctccggatagaccttgggccaagccagaagacccttccctgctggaggatcccaagattaaggagattgctgcaaagcacaaaaaaaccgcagcccaggttctgatccgtttccatatccagaggaatgtgattgtcatccccaagtctgtgacaccagcacgcattgttgagaacattcagaacactgagcactacaaatactgtggtctttgtgtaggacctaatttagagaaaaatttgtatcccgtggacagaatgggaaaaactcctgtggccagtttgtgctgtgaatatcctctcatttggaagactatcccttcaatgcagaatattgaggttgaatctcctgcttgccttcaacaccattgtgccaaagagtcaatggcagagcctgcaaactccacaaagatgctagtgttcattgagagaggtgcggcattttcttgggaagtagaggtccctccggctgtggtttcaggttactccccagctgtttcaggccacgccccagcctgtgctgtcccttcagctgaggtttcaagttactccccagccgcttcaggccacaacccaccaagttaa

SEQ ID NO: 118506 - DNA, 243 bp, Homo sapiens
atggatggaactggagagcctaagccacttccagatcgagaagctcttgaacaacctggactgaaatataaaccagtgactaaccaggtaaattctattcagtttaagggtagtattctagaagaaggcattgttaacatgggagatgacagctccatgcatgttagtgcccctgaagaccctccagtgggacaagatgtggaggcggaagacagtgacactgatgatcctgatcctgtgtag

SEQ ID NO: 118507 - DNA, 1337 bp, Homo sapiens
caaaaacagcaacagaaagcaggacgtgagacttctacctgctcactcagaatcatttctgcaccaaccatggccacgtttgtggagctcagtaccaaagccaagatgcccattgtgggcctgggcacttggaagtctcctctcggcaaagtgaaagaagcagtgaaggtggccattgatgcaggatatcggcacattgactgtgcctatgtctatcagaatgaacatgaagtgggggaagccatccaagagaagatccaagagaaggctgtgaagcgggaggacctgttcatcgtcagcaagttgtggcccactttctttgagagaccccttgtgaggaaagcctttgagaagaccctcaaggacctgaagctgagctatctggacgtctatcttattcactggccacagggattcaagtctggggatgaccttttccccaaagatgataaaggtaatgccatcggtggaaaagcaacgttcttggatgcctgggaggccatggaggagctggtggatgaggggctggtgaaagcccttggggtctccaatttcagccacttccagatcgagaagctcttgaacaaacctggactgaaatataaaccagtgactaaccaggttgagtgtcacccatacctcacgcaggagaaactgatccagtactgccactccaagggcatcaccgttacggcctacagccccctgggctctccggatagaccttgggccaagccagaagacccttccctgctggaggatcccaagattaaggagattgctgcaaagcacaaaaaaaccgcagcccaggttctgatccgtttccatatccagaggaatgtgattgtcatccccaagtctgtgacaccagcacgcattgttgagaacattcaggtctttgactttaaattgagtgatgaggagatggcaaccatactcagcttcaacagaaactggagggcctgtaacgtgttgcaatcctctcatttggaagactatcccttcgatgcagaatattgaggttgaatctcctggtgagattatacaggagattctctttcttcgctgaagtgtgactacctccactcatgtcccattttagccaagcttatttaagatcacagtgaacttagtcctgttatagacgagaatcgaggtgctgttttagacatttatttctgtatgttcaactaggatcagaatatcacagaaaagcatggcttgaataaggaaatgacaattttttccacttatctgatcagaacaaatgtttattaagcatcagaaactctgccaacactgaggatgtaaagatcaataaaaaaaataataatcat

SEQ ID NO: 118508 - DNA, 2031 bp, Homo sapiens
atgaataacaaagaccctcctattgccggaaaacaccaaggatttaagactcgctcccagaaaccagggacagaggatcaccagtttgctccacaaagcacaatgtctcgatcacgacaacccccccttgtgaccggcatctctccaaatgaagggataccatggacgaaggtcacaatcaggggagaaaatctggggactggccccaccgacctcataggcttgaccatttgtggacataattgcctcctgacggcagaatggatgtctgcaagtaaaatagtatgtcgagtgggacaagccaaaaatgacaaaggagacattattgtcaccactaagtcaggtggcagaggaacctcaacagtctctttcaagctactcaaacctgagaaaatagcccagggccttggaggcctagctggcattttggatcagtctgctgtgtgggttgatgaaatgaattattatgatatgcgcactgacaggaacaaaggaattccgcccttgtccttacgtcctgctaacccgcttggcattgagattgaaaacataaaacacatttccttagcaattgtggttgaaactggacataatgatgttctcaggcagaaagatggtgtctcttcttggtttcccttcttgaaagtatggagacctttcccagatgtgctccaacagaccttcctccgacatcactgttcaaaaacaagtttatccaatcaagagcagggggaatatgacaagcgcggttggcttatggtggttgatctctccccagttaaggggcaattggggggctgtgtttcagcagagagggtccagggtgattggtgtgcaagcaccttgctagagagagtgggctccaggccattggaagttgtgcctatgggcactggtcacctgaacgtggaggggctccagcagggagtgtctgcggggacacatcttagagggggcggcaaatcagacgaacaaagtaaaccccaagatggtggagaccaacatgcgagacagtatagtccctttgaggctgccgaagcgtcaggtttcatgcctagagtggcagaaatgagccctgagggacaagcagattcagttcatagacatgcttggatttcatcctgcaaatggggcagggggcgccagcaaaggctgccacgttgtgagcctcgttttgagcagctcaaaatggcagtcaccaacctaaagagacaggctaacaagaagagtgagggcagcctggcctatgtgaaaggcggtctcagtacattcttcgaagcacaggatgccctctcagtgatgggttttgtcagcatcagaaaatgtggctacatgatttcctttaatgctaattttgacttagaaagcaacctgtggagcagggctactgtggggtgtgacatctcagcgcagtgtctgttcattgcagctgcagtgggtgcccactcggtgcagctgcagtgggtgccagccatccatcaaaaactagaagcagatggaacggaaaaagtagaaggatccatgacgcagaaactggagaatgttctgaacagtaagttttgtcctactacccagaactatttatggattttacaacatgctttaaaattagttcttggacctgatatcgcgggacaaggcaaaacattttttaacaacatgatgttgattgctgtcttaggatatgtttttcctaattcaggtcaacttgacagacgtttatttaactctggttgtgtcaagccccgtgctaagccagcctgggagcaaagccggaggggatgcagctctggccccgagagagtcccgcccaggcgggtgctctggatgatcagccacactgcctccttcaaggccaccagcgatagtcactgtacgtctgttaccagttctcagcagacagcaaagtgtgcagttgtgctacctccttatctcccagtgacaaaccctcctgacattttacaaaaatggatgatcgggaagggattggtcgataaagatgaaagtgcatcaaaaaccaggaagctctaa

SEQ ID NO: 118509 - DNA, 1046 bp, Homo sapiens
ctgattttacaagtgagaatttctcagcagcctggtatcttatagagaatcactcaaacaccagttttgagcagctcaaaatggcagtcaccaacctaaagagacaggctaacaagaagagtgagggcagcctggcctatgtgaaaggcggtctcagtacattcttagaagcacaggatgccctctcagccatccatcaaaaactagaagcagatggaacggaaaaagtagaaggatccatgacgcagaaactggagaatgttctgaacagagcaagtaatactgcagacacattgtttcaaggaaagtattaggtcggaaagacaaggcagattccactaagaaatgcactcaatgtgcttccagcgatttaagtttcttttcaaccttcctctaaatattgaaaggaatattcaaaagggtgattatgatgtggttattaatgattatgaaaagggccaagtcactttttggggaaaacggaggtgcaagttttccaagaaatattatgctgaagtaggaaccaagggttgaagctttaagagaattacttctgggataaattgcttgagacaccatcaactttacatgaccaaaaacgttacataaggtacctgtctgaccttcatgcgtctggtgaccctgcttggcaatgcattggagcccaacacaagtggatccttcagctcatgcacagttgcaaagagggctacgtgaaagatctgaaaggcaaggatttctcttccaatgtgtttcagttctccggatcggcattgagacgcgttccagacaccgtgcgggtgctggacagtcagttctctagatcagcattgagaagcgttccagacaccgtgcaggtgctcgacagtcagttctctggatcggcattgagacgcgttccagacaccgtgcgggtgctcgacggtcagttctctagatcggcattgagaagcgttccagacaccgtgcgggtgctcgacaaatgtcactgctctccagcaaaggtggtgatgaatgcagtcaccatattcactggatacagatag

SEQ ID NO: 118510 - DNA, 442 bp, Homo sapiens
atgcagcgtaatctggctcgagccttctcgcccggcattaaaaagataaaaatgatgtgtctgggaaactccgagaaggactggccaaagttcagaggagttggagaagatgccggcctccttgcagcacgagagtgtggggcattgttggtcattagacatcttataaatgcggtacgtgcaatagttcctaataagagcaacaatgaaattatcctggttttgcagcactttgataactgtgtggacaaaaacagtacaagcattcatggaaggtagtgccagtgaagtactcaaagaatggacagtaacaggcaagaaaaagcttttactgcagggagaggaggagctagccagattacccttcatcactggtggcagtggctcgtgttactcgagttccacgttggcggtggaagaggagtgccgtgtactcgcctaa

SEQ ID NO: 118511 - DNA, 276 bp, Homo sapiens
atggaggatgagatggaaggattgacagaagcaggtttcagaaggtgggtaacaacaaattctgctgaactaaaggagcatgttctaacccaatgcaaagaagctaagaaccttgataaaaggttagaggagctgctaagtagaataaccagtttagagagggacataagtgaccagatggagctgaactttgtgaagcatacacaagtatcaatagccaaatcaatcaagcagaagaaagaatatcagagtttgaagaccatcttgctgagataa

SEQ ID NO: 118512 - DNA, 361 bp, Homo sapiens
aagaaatggttcacagaaagaagaaggcggttcatagaacagccacagcagatgataaaaaacttcagttctccttaaagaagttagaggtaaacaatgtctctggtattgaagaggtgaatatgtttacaaaccaaggaacagtgatccactttaacagcagagatgccagcaaactctttcaccattacaggccatgctgagacaaagcagctgatggaaatgctacccagcatcttaaaccagcttggggcacactgtctgactagtttaaggagactggctgaagctctgcccaaacagtctgtgaatggaaaagcaccacttgctactggagaggatgacgatgaagttccagctc

SEQ ID NO: 118513 - DNA, 487 bp, Homo sapiens
atgcgacggacaggcgcacccgctcaggctgactctcgggggcgaggtcgagccaggggcggctgccctgggggcgaggcgacgctgtctcaacctccacctcgcggcggaacccgaggagaggagcctcagatgaaagaaacaatcatgaaccaggaaaaactcgccaaactgcaggcacaagtgcgcattggtgggaaagtgaatatgtttacaaaccaaggaacagtgatccactttaacaaccctaaagttcaggcatctctggcagcgaacactttcaccattacaggccatgctgagacaaagcagctgacagaaatgctacccagcatcttaaaccagcttggtgcggatagtctgactagtttaaggagactggccgaagctctgcccaaacaatctgtggatggaaaagcaccacttgctactggagaggatgatgatgatgaagttccaggaggcttccaagaatgaggcaaactga

SEQ ID NO: 118514 - DNA, 1072 bp, Homo sapiens
cggccccttattcgctccgacaaggtacaaaaaggctctggacggcggcgtggtaggaggacgggagcgggggcgggaagttccctgaaggagcgagacagggagggacagggcagaggaggagaaggaaggcgatgcgacggacaggcgcacccgctcaggctgactctcgggggcgaggtcgagccaggggcggctgccctgggggcgaggcgacgctgtctcaacctccacctcgcggcggaacccgaggacaggagcctcagatgaaagaaacaatcatgaaccaggaaaaaactcgccatacctgcagggcacaaagtgcgcattggtgggaaaggaactgctcgcagaaagaagaaggtggttcatagaggagccgcgagccagatgacaaaaaacttcagtttctccttaaagaagtttaggggtaaacaatatctctggtattgaaagaggtgaatatgtcttacaaacccaaggaaccagtggatccacttttaacaacccctaaaagtttcaaggcatctcttggccagcgaacacttttcaccatttacagggccatgctgaggacaaaggcagctgacaagaaatgctagcccagcatcttaaacccagcttgggggcggatagtctgactagtttaaggagactggccgaagctctgcccaaacaatctgtggatggaaaagcaccacttgctactggagaggatgatgatgatgaaggttccagatcttgtgggagaatttttgatgaaggcttccaaggaatgaggcaaacttgaatttgagtcaacttctgaagataaaaccttgaagaagttacttgggagctgctattttaatattaatggacttgctttttaagaaattttttgtttatggatctgataaaatctagatctctaatatttttaagccccaagcccccttggacactgcagcccttttccagtttttgccttatcccaattcattctttgcagctaattaaggccgaagaagcctgggaatcaagtttgaaacaaagattaataaagttctttgcctagtaaaaaaaaaaaaaa

SEQ ID NO: 118515 - DNA, 1530 bp, Homo sapiens
atggcaataaccttgcgggagctgaatggcctgagctatgaagagatagccgctatcatggattgtccggcgttgacgatagcgggatactggataagggtattaggcatgcagaaagaacaactttccgctttaatggatggcgaaacgctggatagtgagctgcttaacgaactggctcataacccagaaatgcagaaaacctgggaaagctatcacttaatccgtgactcaatgcggggtgatactcccgaggtgctccatttcgatatctcttcacgcgtgatggccgccattgaagaagagccagtgttcttgcgtgatattatatgcgagtataactgcgcgtcgatcccatatgaacgtgatcgcataatgcaaagtgtcacaaagatcgttaatgctcaactcatccggatcgagcttgcgggaaagcataccattgatgtactgatggaacggctatctgttcgaattgcgctgataaaaaaattactgcgtctttttttcccgctctcgctgcgggtacgttttctgttggcaacggcagcggtagtactggtgctttcgcttgcatacggaatggtcgcgctgatcggttatagcgtcagtttcgataaaactacgtttcggctgttacgtggcgagagcaatctgttctatacccttgcgaagtgggaaaacaataagttgcatgtcgagttacccgaaaatatcgacaagcaaagccccaccatgacgctaatttatgatgagaacgggcagcttttatgggcgcaacgtgacatgaaaggatggacgaacgaatgcatcctcgtactgagtggagatcattcgatacagcaacagttgcaggaagtgcgggaagatgatgacgacgcggagatgacccactcggtggcagtaaacgtctacccggcaacatcgcggatgccaaaattaaccattgtggtggtggataccattccggtggagctaaaaagttcctatatgggtttgtgtgggcagcccacaaataaagacgtccttcgccggatgaagaagcgctaccccacgacgttcgttatggtggtcatgttggcgagctatttccttatctccatgtttggaggagtcatggtctttgtgtttggcattacttttcctttgctgtgtatggaaaaaattgtatctacaaaggcaattcttgacaaaaacacaaatcagtgcaaaggtatgtgtaagggcatccgtaccctgaaatcttgcctatgctatctgattaatggttcttccattgtggaggtccaggactcctggctgatgggtgctatcaagttccaacaggaaagcagacttttacaccacagacttttaagtgctattagaattaaacagaaggaggaggaagaaaggaacaagaaggagaagaaagacaaagagctggagagcatatttcccagctatggcccttttcactactttaaaagcaaaaccatcaaagaatgggcacctttctatgggtatgacttttatccccttgtcctctag

SEQ ID NO: 118516 - DNA, 330 bp, Homo sapiens
atggtgactcatctggcagctgacattcaccaaaacgatcaagagctggaagagtatggaaaaattgtatctacaaaggcaattcttgacaaaaacacaaatcagtgcaaaggtatgtgtaagggcatccgtaccctgaaatcttgcctatgctatctgattaatggttcttccattgtggaggtccagaaaaggttagcatatgcaggaactttggaaccttcattagtgcatcaagtttactcagaattgtcctattataaactccctgggacccaggtagttaggattattgccgaagtattgaggatgcaggacagttctgagtag

SEQ ID NO: 118517 - DNA, 576 bp, Homo sapiens
atggatggaagggagagagaaatggagggggagaaggaaagatggaaggaaggagggaaggaaggaaggaaggaaagagagaaggagagaaagagagaaaggaagggaaaggaaagaaaggaaaggaaaggaaaggaaaggaaaggaaaggaaaggaaaggaaaggaaaggaaaggaagggaaaggaaaggaacggaagggaaaggaacggaagggaaaggaaaggaaaggaagggaaaggaagggaaaggaaaggaaaggaaaggaaaggaaaggaaaggaaaggaaaggaaaggaaaggaagggaaaggaaaggaacagaagggaaaggaaaggaagggaaaggaaaggaaaggaaaggaaaggaaaggaaaggaaaggaaaggaaaggaaaggaaaggaaaggaagagaaaggaagagaaaggaagggaaaggaagggaaaggaagggaaaggaagggaaaggagggagggaaggaggaaggaaggaaggaaagaaggaaagaaggaaggaaggaaggaaagaagtttagtaataatggaatggttgaagagatgcaaggccagtgtatatga

SEQ ID NO: 118518 - DNA, 1344 bp, Homo sapiens
atgggcaaatacttcatgactaaaacaccaaaagcaatggcaacaaaagccaaaattgacaaatgggatctaattaaactaaagaacttgtgtgcagttttatttgggagtgtgcgtggggtacctctgagttttaaaaatgaagaaatgtcttctcagaaacaagcagccttgaaggatacaagtgacaagaaagattctgttttgaacatagccacagaaataaaagatgaacaaaaatctgggacagactatttcaaaactatacatcccagagagaaggattatttctctatgatcgatagaagatggtgtcgctacctactggatagtgttgcacagcctgtgacaaaggataagtttgctttggaatctgaaactatttcagaaccatactttacgaacagaaggactatttctcaacaatctgcagaaaagttgtctcctgagcaaccgcctttattcacgcttactctgaaagaggcagatcccagttcaaaagtagccatgagaaggaaggattcaccacctccaggaaaagtgtcttctcagaaacaaccagctgagaaggctacaagtaatgagaaatattctgtttcaaatacagccacagaaataaaggggggaccaatatctgggacagtgtcttctcagaaacaaccagctgagaaggctacaagtgacaagacagattctgttttgaatatagctacagaaataaaggatgctttaaagttcatatggaaccaaaaaagagcctgcatcaccaagtcaatcctaagccaaaagaacaaagctgcaggcatcacactacctgacttcaaactatactacaaggctacagtaaccaaaacagcatggtactggtaccaaaacagagatatagatcaatggaacagaacagagccctcagaaataacaccgcatatctacaactatctgatctttgacaaacctgagaaaaacaagcaatggggaaaggattccctatttaataaatggtgctgggaaaactggctagccatatggagaaagctgaaactggatcctttccttacaccttatacaaaaatcaattcaagatggattaaagacttaaacattagacctaaaagcataaaaaccctagaagaaaacctaggcaataccattcaggacataggcatgggcaaggacttcatgtctaaaacacaaaaagcaatggcaacaaaagacaaaattgacaaatgggatctaattaaactaaagagcttctgcacagcaagagaaactaccatcagagtgaacaggcaacctacaaaatgggagaaaattttcgcaacctactcattgacaaagggctaa

SEQ ID NO: 118519 - DNA, 374 bp, Homo sapiens
ctcttaacctggacacatttcttccacacaatgaagaaaagatagaacataactgtcaacaagtaattgctcaaacctatgccactcgaggggaccatttagaggttcccttgactgatcccaaccctaacttgtatactgatggaagatcctttgtagaaaaaggacttcaaaaagtgggaattaaagctgtaaaactacaaatcattcttcaaatggagccccagatgcagtccatgactaagatctaccgcggacccctggaccaccctgacagcccatgctccaatgttaacgacatcgaaggcacccctcctgaggaaatctcaactgcacaacccctactacaccccaggccagcaggaagcagttag

SEQ ID NO: 118520 - DNA, 3867 bp, Homo sapiens
atgcagtgggaagaggctgagaaagacccttctggcagttgtgtgttccagcggcctcctgtggcccttgtcttccccctacactccaagtggacgttggtgaacagcccaccaagctcaggcgatccctacgtgccaggacgaccagcacagtcaggacagctttccctcagccctgcacctccatatgttcttcctggccccgggaaaataaagcaagcaggcaacaacccatcactgacaagcatctaccgttcagaagtcttctgtgcccaccgccacctccaccccccgcagctggtgtgtgcccgtggacacattggatcagcgcatctcagtgtggacaggggcagcctcatctgggaagtgttagaaagcacagtctgggcgcgcaccaatgagtggagtccagtgacccggacggttctcatttcagctttggcatctacacacattccacagccctgcgagtctcgtccacccgtccctccagaatatgaggtgacagtccttcggagtcaaggcactgctcagctcccgccctggtcctcttccaccagctggaggctgacagatccttcctgcccaaaacatgctgcctggctgactgaccttgcctccagcaaaggcccagcggctggtggaactggctccttctcccagccaggcaccttgacatccacaagaacaaatcctcttaagaaagaaaaaagtcccgaggacttaaagcaaattaaaatagacctaggtaaattctcagataaccctgatggctatattgatgttttacaagggttaggacaatcctttgatctgacatggagagatataatgttactgctaaatcagacactaaccccaaatgaaaaagtgccaccattactgcagcctgagagtttggcgatctctggtatctcagtcagagatcaggaggagcaggcagaacaggacaaacaggataaaaaaaaggccatcactttagtcatggccctcaggcaagtggactttggaggctctgtaaaagggaaaagctgggcaaatcgaatgcctaatagggcttacttccagtgcggtctacaaggacactttaaaaaagattgtccaagtagaaagccccaggtatgcttgaccattgagagccaagaggttaactgtctcctggacgccggtgcggccttctcagtcttactctcctgtcccggacaactgtcctccagatctgtcactatccgaggggtcctaggacagccagtcactagatacttcttccagccactaagttgtgactggggagctttacccttttcacatgctttcctaattatgcctgaaagcctcactcccttgttagagagagagattctagtaaaagcaggggccattatacacctgaacataggagaaggaacacccatttgtcgtctcctgtttgaggaaggaattagtcctgaagtctgggcaacagaaggacaatatggacaagcaaagaatgcccattttgtccaagttaaactaaaggattccacctcctttccctatcaaaggcagtaccccctcagacccgaggcccaacaaagactccaaaagattgttaaggacctaaaagcccaaggcctagtaaaaccatacagtagcccctgcaatactccaattttaggagtacagaaacccaaaagacagtggaggttagtgcaagatctcaggattatcaatgaggctgtttttcctctatacccagctatacctagcccttatactctgctttcccaaataccagaggaagcagagtggtttacagtcctggatcttaaggatgcctttttctgcatccctgtacatcctgactctcaattcttgtttgcatttgaagatccttcaaacccaacatctcaactcacctggactgttttaccccaagggttcagggatagtccccatctatttggccaggcattagcccaagacttgagccagttctcatacctggacactcctgtccttcagtgcatggatgatttacttttagctgcccgttcagaaaccttgtgccatcaagccacccaagcgctcttaaatttcctcactacctgtggctacaaggtttccaaaccaaaggctcagctctgctcacagcaggttaaatgcttagggctaaaattatccaaagtcaccagggccctcagtgaggaacgtatccagcctatactggcttatccttatcccaaaaccctaaagcaactaagagggttccttggcataacaggtttctgccgaatatggattcccaggtacggcaaaatagccagaccgttatatacgctaattaaggaaactcagaaagccaatacccatttagtaagatggacacctgaagcagaagcagctttccatgccctaaagaaggccctaatgcaagccccagtgctaagcttgctaacggggcaagacttttcctcatatgtcacaaaaaacaaacaaacaaagaaaaaaaaaaacatgaatagctctaagagtccttgcgctggtctgagggacgagtttgcaacccgtggcatacctgataaggaaattgatgtagtggcaaagggtcagcctcattgtttacgggtagtggtggcagtagcagtcttagtatctgaagcagttaaaataatacagggaagaaatcttactgtgtggacatctcatgatgtgaatggcatactcactgctaaaggagacttgtggctgtcagacaaccatttacttaaatatcaggctctattacttgaagggccaatgctgcgactgtgcacttgtgcagctcttaacctggacacatttcttccacacaatgaagaaaagatagaacataactgtcaacaagtaattgctcaaacctatgccactcgaggggaccatttagaggttcccttgactgatcccaaccctaacttgtatactgatggaagatcctttgtagaaaaaggacttcaaaaagtggggtatgcagtagtcagtgataatggaatacttgaaagtaatcccctcactccaggaactagtgctcagctggcaaaactcactcgggcactagaattaggagaaggaaaaagggtaaatatatatacagactctaagtatgcttacctagtcctccatgcccatgcagtaatatggagagaaagggaattcctaacttctgagggaacacctatcaaacatcaggaagccattagggaattattattggccgtacagaaacctaaagaggtggcagtcttacactgccggggtcatcagaaaggaaaggaaagggaaatagaaaggaaccgccaagcagatattgaagccaaaagagctgcaaggcaggaccctccattagaaatgcttatagaaggacccctagtatggggtaatcccctctgggaaaccaagccccagtattcagaagaagaaatagaatggggaatctcacgaggacatagttttctcccctcaggatggcaagccaccgaacaaggaaaaatacctttgcctgcagctaaccaatggaaattacttaaaaccactcaccaaaactttcacttatgcattgatagcacccatcagatggccaaattgttatttactggaccaggacttttcaaaactctcaagcagatagttggggcctgtaaatttgtctcttccagaattaaagctgtaaaactacaaatcattcttcaaatggagccccagatgcagtccatgactaagatctaccgcggacccctggaccaccctgacagcccatgctccaatgttaacgacatcgaaggcacccctcctgaggaaatctcaactgcacaacccctactacaccccaggccagcaggaagcagttag

SEQ ID NO: 118521 - DNA, 415 bp, Homo sapiens
tccttcggagtcaaggcactgctcagctcccgccctggtcctcttccaccagctggaggctgacagatccttcctgcccaaaacatgctgcctggctgactgaccttgcctccagcaaaggcccagcggctggtggaactggctccttctcccagccaggcaccttgacatccacaagaacaaatcctcttaagaaagaaaaaagtcccgaggacttaaagcaaattaaaatagacctaggtaaattctcagataaccctgatggctatattgatgttttacaagggttaggacaatcctttgatctgacatggagagatataatgttactgctaaatcagacactaaccccaaatgaaaaagtgccaccattactgcagcctgagagtttggcgatctctggtatctcagtcag

SEQ ID NO: 118522 - DNA, 676 bp, Homo sapiens
tcatccttttttattgctgcatattattccacagtgcatataggccatattttctttatccaatccactggtgacaagcacctggaatgattctgttaccgggggtccttgctcacagagctcccaagatggtggtgagccgcttccaagatgatggcaagcctcgtgttctctgacctggggttcttggcctgacggattccaaggaatggaatcttgggccatgtggtgagtgttatagctctcttcctcactaaatccattcagcacaatatcatcaatgtaatggaccagtgtgctatcttgtggaagggaaaggtgatcaagatccctgttaactaaattctgacatcgggctagggagttgatataacctagccaaaattttaaagtaactgtgtttcccttatgctgaaagacctgacctacaatttctgtgctgagatctttgtgcaagaagtccttatctgcttcaggcccaaaagtatctccaggaattttgagcaatccctcatctagatcagcagactgagccacctgacccttctgtaagtttttacctactggattgtacgttgaactgcacagcccaacataaaacctgctgaaagaagagcatagggctgtaggagcaaaaccaacaaaccctatccagcattccttacagtcacacaca

SEQ ID NO: 118523 - DNA, 861 bp, Homo sapiens
atggagtgggaagataatcttcccctggagttgggccgcacagtggccaaactcctctctgaccactcccaaactcctcttggtattcagatgttcctcctcttctctctttctctgcggaagagtccgttggtctgcctgtcttacctcttcaacttccggttcactctggagtctgaggttcagcatttatctggagctataacacttaccgcatggcccaagattccattcctcggaatccgtgaggccaagagccccaggtcagagaacacaaggcttgccaccatcttggaagcgggtcaccgccatcttgggacctctgtgagcaaggaccacccggtaacattttggcgaccacgaagggacctccaaagtgacttaaagcaaattaaaatagacctaggtaaattctcagataaccctgatggctatattgatgttttacaagagttagggcaatcctttgatctgacatggagagatataatgttactgctaaatcagacactaaccccaaatgagagaagtgccaccataactgcagcccgagagtttggtgatctctggtatatcagtcaggtagtggcagcagtagcaggcttagtatctgaagcagttaaaataatacagggatcttactgtgtggacatccatgatgtgaatggcatactaactgctaaaggagacttgtggctgtcagacaaccatttacttaaatatcaggctctattacttgaagggccagtgctgcgactgcgcacttgtgcaactcttaacccagccacatttcttccagacaatgaagaaaagatagaacataactgtcaacaagtaattgctcaaacatacgccacttga

SEQ ID NO: 118524 - DNA, 1940 bp, Homo sapiens
gattttgttgaggctgatggctttttgtgttgaaaagcttgatctgggctttgtattgagaagcttgatctataaagaaatgcagaaacataacaattcgaagataacaattcaaaatattccagtaaagaataaatttgtcagtgcttttgctagaaacaaacaacaaatgaaggtgactttgttacccccacgacctggtgttggatctgattaccccaacattcctggctgcccgatgtggggcaacaaagaccctggtgaaggaacactagagcgtgggaaagtggaggatgcatcgcaaaggacatcgaggactctaaaagaaaccagcgggaaagctgagcatcggaagaaacaggatgggaaatgttccccccaaggcaaaaacgcccttaagatgtattctggagaattcgacccagtcagagtgtgtgtacctttttccctctcagatttgaagcaacttaaaatagacctaggtagattctcagataaccctgatggctatattgatgttttacaagggttaggacaatcctttgatctgacatggagagatataatgttactgctagatcagacactaaccccaaatgagagaaatgccaccataactgcagcccgagagtttggtgatctctggtgtctcagtcagggattttgccgatttcggaaccaccatcaaacaggattttcgcttgctggggcaaaccagcgtggaccgcttgctgcaactctctcagggccaggcggtgaagggcaatcagctgttgcccgtctcactggtgaaaagaaaaaccaccctggcgcccaatacgcaaaccgcctctccccgcgcgttggccgattcattaatgcagctggcacgacaggtttcccgactggaaagcgggcagtgagcgcaacgcaattaatacccaagtttggggcgacaccaacaagttatgtttgccgatttcggaaccaccctcaaacaggattttcgcctgctggggcaaaccagcgtggaccgcttgctgcaactctctcagggccaggcggtgaagggcaatcagctgttgcccgtctcactggtgaaaagaaaaaccaccctggcgcccaatacgcaaaccgcctctccccgcgcgttggccgattcattaatgcagctggcacgacaggtttcccgactggaaagcgggcacaactttaaggatgatgagtaccctcagagaccatgtcctttgcctatgtctgagtaccgtctaggcagcacccccccgcaaaacatgatagagactgaaggaaacaataaggaatgtggcactattttatactcaacttgtggaataaaattgattcctgctagaagaattaccaatgttctccgcatcctgtcttcacagcatgattttctgccgacacgtcccttccgttccctgcaaggccatttccagggaggcttacgaagacagcagatgatggtgatggaaggagtctgggtgctgagctgtgccatggacctgctgtgccgctcagctgtgtgtcctctggcacccacaaaatcaaacacctgccttccagatgtttgcacctataggccggcaaagctgactgcagcaagtccttcagaagggagacagtctctattacttgaagggccagtgctgcgactgcgcacttgtgcaactcttaacccagacacatttcttccagacaatgaagaaaagatagaacataactgtcaacaagtaattgctcaaacaatcaaagctataaaactacaaattgttcctcaaatggaaccccagatgcattccatgactaagatctaccgcagacccctggatcagcctgctagcccatgctctgatgttaacgacattggagccacccctcctgaggatatctcaattgcacgacccctactatgccccaattcagcaggaagcagttag

SEQ ID NO: 118525 - DNA, 7466 bp, Homo sapiens
agccccaggtatgcttgaccattgagagccaagaggttaactgtctcctggacgccggtgcggccttctcagtcttactctcctgtcccggacaactgtcctccagatctgtcactatccgaggggtcctaggacagccagtcactagatacttcttccagccactaagttgtgactggggagctttacccttttcacatgctttcctaattatgcctgaaagcctcactcccttgttagagagagagattctagtaaaagcaggggccattatacacctgaacataggagaaggaacacccatttgtcgtctcctgtttgaggaaggaattagtcctgaagtctgggcaacagaaggacaatatggacaagcaaagaatgcccattttgtccaagttaaactaaaggattccacctcctttccctatcaaaggcagtaccccctcagacccgaggcccaacaaagactccaaaagattgttaaggacctaaaagcccaaggcctagtaaaaccatacagtagcccctgcaatactccaattttaggagtacagaaacccaaaagacagtggaggttagtgcaagatctcaggattatcaatgaggctgtttttcctctatacccagctatacctagcccttatactctgctttcccaaataccagaggaagcagagtggtttacagtcctggatcttaaggatgcctttttctgcatccctgtacatcctgactctcaattcttgtttgcatttgaagatccttcaaacccaacatctcaactcacctggactgttttaccccaagggttcagggatagtccccatctatttggccaggcattagcccaagacttgagccagttctcatacctggacactcctgtccttcagtgcatggatgatttacttttagctgcccgttcagaaaccttgtgccatcaagccacccaagcgctcttaaatttcctcactacctgtggctacaaggtttccaaaccaaaggctcagctctgctcacagcaggttaaatgcttagggctaaaattatccaaagtcaccagggccctcagtgaggaacgtatccagcctatactggcttatccttatcccaaaaccctaaagcaactaagagggttccttggcataacaggtttctgccgaatatggattcccaggtacggcaaaatagccagaccgttatatacgctaattaaggaaactcagaaagccaatacccatttagtaagatggacacctgaagcagaagcagctttccatgccctaaagaaggccctaatgcaagccccagtgctaagcttgctaacggggcaagacttttcctcatatgtcacaaaaaacaaacaaacaaagaaaaaaaaaaacatgaatagctctaagagtccttgcgctggtctgagggacgagtttgcaacccgtggcatacctgagtaagaaaactgatgtagtggcaaagggttggcctcattgtttatgggtaatggcagcaatagcagtcttaatatctaaagcagttaaaatgatacagtgaagagatcttactgtgtggacatctcatgatgtgaatggcatactcactgctaaaggagacttgtggctgtcagacaaccatttacttaaatatcaggctctattacttgaagggccaatgctgcgactgtgcacttgtgcagctcttaacctggacacatttcttccacacaatgaagaaaagatagaacataactgtcaacaagtaattgctcaaacctatgccactcgaggggaccatttagaggttcccttgactgatcccaaccctaacttgtatactgatggaagatcctttgtagaaaaaggacttcaaaaagtggggtatgcagtagtcagtgataatggaatacttgaaagtaatcccctcactccaggaactagtgctcagctagcagaactaatagccctcacttgggcactagaattaggagaaggaaaaagggtaaatatatatacagactctaagtatgcttacctagtcctccatgcccatgcagtaatatggagagaaagggaattcctaacttctgagggaacacctatcaaacatcaggaagccattagggaattattattggccgtacagaaacctaaagaggtggcagtcttacactgccggggtcatcagaaaggaaaggaaagggaaatagaaaggaaccgccaagcagatattgaagccaaaagagctgcaaggcaggaccctccattagaaatgcttatagaaggacccctagtatggggtaatcccctctgggaaaccaagccccagtattcagaagaagaaatagaatggggaatctcacgaggacatagttttctcccctcaggatggcaagccaccgaacaaggaaaaatacctttgcctgcagctaaccaatggaaattacttaaaaccactcaccaaaactttcacttatgcattgatagcacccatcagatggccaaattgttatttactggaccaggacttttcaaaactctcaagcagatagttggggcctgtgaagtgtgccagagaaataatcccctgccttatcgccaagctccttcaggagaacaaagaacaggccattaccctggagaagactggcaactgattttacccacaagcccaaacctcagggatttcagtatctactagtctgggtagatactttcacgggttgggcagaggccttcccctgtaggacagaaaaggcccaagaggtaataaaggcactagttcatgaaataattcccagattcggacttccccgaggcttacagagtgacaatagccctgctttccaggccacagtaacccagggagtatcccaggcgttaggtatacgatatcacttacactgcgcctgaaggccacagtcctcagggaaggtcgagaaaatgaatgaaacactcaaaggacatctaaaaaagcaaacccaggaaacccacctcacatggcctgttctgttgcctatagccttaaaaagaatctgcaactttccccaaaaagcaggacttagcccatacgaaatgctgtatggaaggcccttcataaccaatgaccttgtgcttgacccaagacagccaacttagttgcagacatcacctccttagccaaatatcaacaagttcttaaaacattacaaggaacctatccctgagaagaggaaaagaatattccacccaagtgacatggtattagtcaagtcccttccctctaattccccatccctagatacatcctgggaaggaccctacccagtcattttatctaccccaactgcggttaaagtggctggagtggagtcttggatacatcacacttgagtcaaatcctggatactgccaaaggaacctgaaaatccaggagacaacgctagctattcctgtgaacctctagaggatttgcgcctgctcttcaaacaacaaccaggaggaaaaatcgaagctgtaaaactacaaatggagcccaagatgcagtccaagactaagatctaccgcagacccctggaccggcctgttagcccacgatctgatgttaatgacatcaaaggcacccctcctgaggaaatctcagctgcacaacctctactacgccccaattcagcaggaagcagttagagcggtcgtcggccaacctccccaacagcacttaggttttcctgttgagatgggggactgagagacaggactagctggatttcctaggctgattaagaatccctaagcctagctgggaaggtgaccacatccacctttaaacacggggcttgcaacttagctcacacctgaccaatcagagagctcactaaaatgctaattaggcaaagacaggaggtaaagaaatagccaatcatttattgcctgagagcacagcaggagggacaatgatcgggatataaacccaggcattcgagctggcaacagcagcccccctttgggtcccttccctttgtatgggagctctgttttcatgctatttcactctattaaatcttgcaactgcactcttctggtccatgtttcttacggctcgagctgagcttttgctcaccgtccaccactgctgtttgccaccaccgcagacctgccgctgactcccatccctctggatcctgcagggtgtccgctgtgctcctgatccagcgaagcgcccattgccgctcccaattgggctaaaggcttgccattgttcctgcacggctaagtgcctgggtttgttctaattgagctgaacactagtcactgggttccatggttctcttctgtgacccacggcttctaatagagctaacagagctataacactcaccgcatggcccaaggttccgttccttgtaatccgtgaggccaagaaccccaggtcagagaacaaaaggcttgccaccatcttggaagcggcctgctaccgtcttggaagtggttcaccaccatcttgggagctctgtgagcaaggaccccccggtaacattttggcaaccaacgacggacatccaaagtgatgggaaacgttccccgcaagacaaaaacgcccctaagacgtattctggagaattgggaccaatttgaccctcagacactaagaaagaaacgacttatattcttctgcagtgccgcctggcactcctgagggaagtataaattataacaccatcttacagctagacctcttttgtagaaaaggcaaatggagtgaagtgccataagtacaaactttcttttcattaagagacaactcacaattatgtaaaaagtgtgatttatgccctacaggaagccttcagagtctacctccctatcccagcatccccgactccttccccaactaataaggaccccccttcaacccaaatggtccaaaaggagatagacaaaagggtaaacagtgaaccaaagagtgccaatattccccaattatgacccctcccaagcagtgggaggaagagaattcggcccagccagagtgcatgtgcctttttctctcccagacttaaagcaaataaaaacagacttaggtaaattctcagataaccctgatggctatattggtgttttacaagggttaggacaattctttgatctgacatggagagatatatatgtcactgctaaatcagacactaaccccaaatgagagaagtgccaccataactgcagcctgagagtttggcgatctctggtatctcagtcaggtcaatggataggatgacaacagaaggaaagagatgattccccacaggccagcaggcagttcccagtctagaccctcattggggacacagaaatcagtaacatgggagattggtgctgcagacatttgctaacttgtgtgctacaaggactaaggaaaactacgaagaaaatctacgaattactcaatgatgtccaccataacacaggggaagggaagaaaatcctactgcctttctggagagactaagggaggcattgaggaagcgtgcctctctgtcacctgactcttctgaaggccaactaatcttaaagcgtaagtttatcactcagtcagctgcagacattagaaaaaacttcaaaagtctgccgtaggcccggagcaaaacttagaaaccctattgaacttggcaacytcggttttttataatagagatcaggaggagcaggcggaacaggacaaacgggattaaaaaaaaggccaccgctttagtcatgaccctcaggcaagtggactttggaggctctggaaaagggaaaagctgggcaaattgaatgcctaatagggcttgcttccagtgcggtctacaaggacactttaaaaaagattgtccaagtagaagtaagccgccccttcgtccatgccccttatttcaagggaatcactggaaggcccactgccccaggggacaaaggtcttttgagtcagaagccactaaccagatgatccagcagcaggactgagggtgcctggggcaagcgccatcccatgccatcaccctcacagagccctgggtatgcttgaccattgagggccaggaaggttgtctcctggacactggtgcggtcttcttagtcttactcttctgtcccggacaactgtcctccagatctgtcactattctgagggggtcctaagacgggcagtcactagatactttttcccagccactaagttatgaactggggagctttattcttttcacatgcttttctaattatgcttgaaagccccactaccttgttagggagagacattctagcaaaagcaggggccattatacacctgaacataggagaaggaacacccgtttgttgtcccctgcttgaggaaggaattaatcctgaagtctgggcaacagaaggacaatatggacgagccaaagaatgcccgtcctgttcaagttaaactaaaggattccacttcctttccctaccaaaggcagtaccccctcagacccaaggcccaacaaggattccaaaagattgttaaggacttaaaagcccaaggcttagtaaaaccatgcataactccctgcagtaattccgtagtggattgaggaggcacagaaacccagtggacagtggagggttagtgcaagatctcaggattatcaatggaggccgttgtccttttatacccagctgtacctagcccttatactgtgctttcccaaataccagaggaagcagagtggtttacactcctggaccttaaggatgccttcttctgcatccctgtacatcctgactctcaattcttgtttgcctttgaagatacttcaaacccaacatctcaactcacctggactgttttaccccaagggttcagggatagcccccatctatttggccaggcattagcccaagacttgagccaatcctcatacctggacacttgtccttcggtaggtggatgatttacttttggccgcccattcagaaaccttgtgccatcaagccacccaagcgctcttcaatttcctcgctacctgtggctacatggtttccaaaccaaaggctcaactctgctcacagcaggttacttagggctaaaattatccaaaggcaccagggccctcagtgaggaacacatccagcctatactggcttatcctcatcccaaaaccctaaagcaactaaggggattccttggcgtaataggtttctgccgaaaatggattcccaggtttggcgaaatagccaggtcattaaatacactaattaaggaaactcagaaagccaatacccatttagtaagatggacaactgaagtagaagtggctttccaggccctaacccaagccccagtgttaagtttgccaacagggcaagacttttcttcatatgtcacagaaaaaacaggaatagctctaggagtccttacacagatccgagggatgagcttgcaacctgtggcgtacctgactaaggaaattgatgtagtggcaaagggtt

SEQ ID NO: 118526 - DNA, 1639 bp, Homo sapiens
gagactgaatatgacttctatgacccctttaaagccacggatggggaccttcacggggaccaatgtgccccgttatccggtgaatacttctgacatcaagaacagcggggacaagcttaatggcggtgagcagcggtgcgtggccagggtagatccccagttcaccttcgctacccgttacctggattttctcgaccagaccagagaacatttgttgctctgcgctgacgacgtccaggtggcgttaaagttttttggctttttccacagcttcttcgatggaaccgaccatgtagaacgcctgctccggcaggtgatcgtattcgccttccatgatgcctttaaagccacggatggtgtctttcagggagacgtatttacccggagaaccggtgaatacttctgccacgaagaacggctgggacaggaagcgctggatcttacgagcacgcgctaccaccagtttgtcttcttcagacagttcatccatacccaggatggcgatgatgtctttcagttcctgataacgttgcaggatggactgaacgccacgcgcggtgtcgtagtgttcctgaccaaccaccagcgggtccagctgacggctggtggagtccagcgcgcgcacgctgttgcctacgccagcgccgaggttgtagatgtgtacgcctggcttgttcgccagtttttccatcgccacgacgtgaccgtccgccagatccattacgtggatgtaatcgcgtacgccagtaccatcttcggtcggataatcgttaccaaaaatcgccagcgagtcgcgacggcctacagcaacctgggcgattggcgagaagcacttacaacccgccaaaagctgattgcccaggattataaagtcagttattcattggccaaatcctgtaaaagtgacttgaagaaataccggtgcaatgtggataaccttccgcgatcgcgtgaagccaagtgtgagcgcaacatcatagttgacgaagctggtttcgaagctgcaatggaagagcagcgtcgtcgcgcgcgcgaagccagcggctttgtaatcatgcagtttcgccatcgtactattgccgcctacgccagtaatattgaaaacctgcctgcgctgctgccagcggtagaaaaaatcgcgcagaagcacaccagcttccagatcaaaccggaacagtacaacatcgtcggtgaacacctgttggcaacgctggacgaaatgttcagcccggggcaggaagtgctggacgcgtggggtaaagcctatggtgtactggctaatgtatttatcaatcgcgaggcggaaatctataacgaaaacgccagcaaagccggtggttgggaaggtactcgcgatttccgcattgtggctaaaacaccgcgcagcgcgcttatcaccagcttcgaactggagccggtcgacggtggcgcagtggcagaataccgtccggggcaatatctcggcgtctggctgaagccggaaggtttcccacatcaggaaattcgtcagtactctttgactcgcaaaccggatggcaaaggctatcgtattgcggtgaaacgcgaagagggtgggcaggtatccaactggttgcacaatcacgccaatgttggcgatgtcgtgaaactggtcgcttga

SEQ ID NO: 118527 - DNA, 2601 bp, Homo sapiens
tacgggcctgcaccgccaccgcacaaagacgcctcgggagccgccgcctgcacccgggccgcagcagccacgccagccggagcccgagccgtagcccgagcccgagcccgagccgcagccagagccagagccggagccgcagccagagccagagccggagccgcagccggaaccggagccggagccgcggggcaggaggcggcgcccgcgggcggccgggcccggcatggagaagcgcgcggccgcggggctggagggcgcgccgggcgcccgggcgcagctggccgtcgtctgtctggtgaacatctttctcaccgggagactcagcagtgcggttcctgccttagcggcctgcagtgggaagctggagcagcacacagagcggcgtggggtcatctacagcccggcctggcccctcaactacccgccaggcaccaactgcagctggtacatccagggcgaccgtggtgacatgattaccatcagcttccgcaactttgacgtggaggagtcccaccagtgctccctggactggctcctgctgggcccagcagccccaccccgccaggaggccttccgcctctgtggctccgccatcccacctgccttcatctctgcccgcgaccatgtctggattttcttccactcagacgcctccagctccggccaggcccagggcttccgtctgtcttacatccgagggaagctgggccaggcatcctgccaggcagatgagttccgctgtgacaacggcaagtgcctgcccggcccgtggcagtgcaacacggtggacgagtgtggagacggctctgatgagggcaactgctcggcgcccgcctccgagcctccaggcagcctgtgccccggggggaccttcccatgcagcggggcgcgctccacgcgttgcctgcctgtggagcggcgctgtgacggcttgcaggactgcggcgacggctcggatgaggcgggctgccccgacctggcgtgcggccggcggctgggcagcttctacggctcctttgcctccccagacctgttcggcgccgctcgcgggccctcagaccttcactgcacgtggctggtggacacacaggactcccggcgggtgctgctgcagctggaactgcggctgggctatgacgactacgtgcaggtatacgagggcctgggtgagcgcggggaccgcctgctgcagacgctgtcctaccgcagcaaccaccggcccgtgagcctggaggccgcccagggccgcctcactgtggcctaccacgcgcgcgcccgcagcgccggccacggcttcaatgccacctaccaggtgaagggctattgcctcccctgggagcagccgtgcgggagcagtagtgacagtgacgggggcagcctgggcgaccagggctgcttctcagagccacagcgctgtgatggctggtggcattgtgccagcggccgagacgagcagggctgccctgcctgcccgcccgaccagtacccctgcgagggtggcagtggtctgtgctacacgcctgccgaccgctgcaacaaccagaaaagctgtcccgacggcgccgacgagaagaactgcttctcctgccagcccggcaccttccactgcggtaccaacctgtgcatcttcgagacgtggcgctgtgacggccaggaagactgccaggacggcagcgatgagcatgggtgcctggccgccgtgccccgcaaggtcatcacggcggcgctcattggcagcctggtgtgtggcctgctgctggtcatcgcgctgggctgcgccttcaagctctactcactgcgcacgcaggaatacagggccttcgagacccagatgacgcgcctggaggctgagtttgtgcggcgggaggcacccccatcctatggtcagctcatcgcccagggcctcattccacccgtggaggactttcctgtctacagtgcgtcccaggcctctgtgctgcagaatcttcgcacagccatgcggagacagatgcgtcggcacgcctcccgccgggggccctcccgccgccgcctcggccgcctctggaaccggctctttcaccggccgcgggcgccccgaggccagatcccactgctgaccgcagcacgcccctcacagaccgtgctgggcgatggcttcctccagcctgctccaggggctgcccccgaccccccagcaccgctcatggacacaggcagcaccagggcggccggagacaggccccccagtgcccccggccgtgcaccggaggtgggaccttcagggccacccttgccctcgggcctgcgagacccagagtgcaggcccgtggacaaggacagaaaggtctgcagggagccactggcagacggcccagctcctgcagatgcacctcgggagccctgctcagcccaggacccgcacccccaggtctccactgccagcagcaccctgggcccccactcgccagagccactgggggtctgcaggaaccccccgcccccctgctccccaatgctggaggccagcgatgatgaggccctgttggtctgttgaccgctgggctcgctggtgaccgccacagccccgctttgtaaccagggaatacacagtcattt

SEQ ID NO: 118528 - DNA, 771 bp, Homo sapiens
atggaccgtccaggccagaatgttcccccccctaatggcgatcaacgtgaagccctgtttaacgctattgccgcctacgccagtaatattgaaaacctgcctgcgctgctgccagcggtagaaaaaatcgcgcagaagcacaccagcttccagatcaaaccggaacagtacaacatcgtcggtgaacacctgttggcaacgctggacgaaatgggcttgggactcagggcagtgcggtcgagcccctacccactccggagaacccccggccccgccagcgcggccgggctgctggctcccctggcgtccggtcgaggcgcacacccgcctcggtccgactgtgaccccgcggggcgcgctccacgcgctgcctgcctgtggagcggcgcatgtgacggcttgcaggactgcggcgacggctcggatgaggcgggctgccccgacttggcgtgcggccggcggctgggcagcttctacggctcctttgcctccccagacctgttcggcgccgctcgcgggccctcagacattcactgcacgtggctggtggacacacaggactcccggcgggtgctgctgcagctggaactgcggctgggctatgacgactacgtgcaggtatacgagggcctgggcgagcgcggggaccgcctgctgcagacgctgtcctaccgcagcaaccaccggcccgtgagcctggaggccgcccagggccgcctcactgtggcttaccacgcgcgcgcccgcagccaccccttgatgaatgaatga

SEQ ID NO: 118529 - DNA, 565 bp, Homo sapiens
ggagctgtacgcctcgtgcacgctgtgcagccggcggccggactagcgcctgcgcttcgccgtcttcactggcgccttccacgctctcagcttcctgctctccttcgtcgtgctctgctgcacgtacctcaaggggctcaaggtggcccgcttccattgcaagcgcatcgacgtgatcaccatgcagacgctcgtgctgctggtggacctgcaccccagtgtgcgggaacgctgtctggaggagcagaagcggaggcgacagcgagccaccaagaagatcagcaccttcatagggaccttccttgtgtgcttcgcgccctatgtgatcaccaggctagtggagctcttctccacggtgcccatcggctcccactggggggtgctgtccaagtgcttggcgtacagcaaggccgcatccgacccctttgtgtactccttactgcgacaccagtaccgcaaaagctgcaaggagattctgaacaggctcctgcacagacgctccatccactcctctggcctcacaggcgactctcacagccagaacattctgccggtgtctgagtga

SEQ ID NO: 118530 - DNA, 492 bp, Homo sapiens
gagcgaggtcgtcaggaaatgagtgccaagctgaggcctcctgcagagccgccctgtgtccctgccaggatctcaccttgaagacccagctagaggcagtaaatggaaagacgatgcccgccctggaggtgttcgcccatgccctgcgcttcttcagggagcacgcccttcaggtgcgctgcggccccacctctgccgactgtggcagggaccccctattttcccctcatccgaaaccgctcccccatcccgtccccgacattggatgggtagccaccgccggagctcagaggtcatcttctccagtaccctcctccctttttgtctggtagagcctgcaccaagccatactgatgggaggggggccgattcttccagctctgctgggaagtccttcctgtgatttgattagtacctccagttccgcagagggctgaagaccaccctccctccaagccagcctgggcaacaagagagactccatctcacaaa

SEQ ID NO: 118531 - DNA, 943 bp, Homo sapiens
gatctcaccttgaagacccagctagaggcagtaaatggaaagacgatgcccgccctggaggtgttcgcccatgccctgcgcttcttcagggagcacgcccttcaggtctcgaagccagacatggggctggtggccctggaggctgaaggccaggagctcctgcttgagctggagaagaaccagagtctccggagcccgcactcccagacatcactgccctccttcctgagggtgctgaggctcggaggctcagagatgctactggtccaaggtcatgcagcgaggagcggcaatgaacagggtcgtggggaggagggggcgctgaccagttacgccccgccctcactaccgcactcatgcccccggacaatcgcttcggcgaaaacaccccagctgcaccagctaacggtcactgcgccccgggaacctgacatcactctagttcaggaccactcggagctccccatcggcgccgcagccaccatggcccatgagatcggccacagcctcggcctcagccacgaccccgacggctgctgcgtggaggctgcggccgagtccggaggctgcgtcatggctgcggccaccgggtacgcgggcacccgtttccgcgcgtgttcagcgctgcagccgccgccagctgcgcgccttcttccgcaaggggggcggcgcttgcctctccaatgccccggaccccggactcccggtgccgccgcgctctgcgggaacggcttcgtggaagcgggcgaggagtgttactgcgtttcctggccaggagtgccgcgacctctgctgctttgctcacaactgctcgctgcgcccgggggcccagtgcgcccacggggactgctgcgtgcgctgcctggtgagggcatggaaggttcaggctcccaccagctcccgaggctggttccaggtggtgactctgcggagattctcatga

SEQ ID NO: 118532 - DNA, 838 bp, Homo sapiens
atgggaccactgacatttagggatgtgaaaatagaattctctctagaggaatggcaatgcttggacactgcgccaggaaatttatatagagatgtgatgttagagaactacagaaacctggtcttccttgttatgtgttctcattttgcccaagatgtttggccagagcacagcataaaagattctttccaaaaagtgatactgagaacatatggaaaatatggacatgagaatttacagctaagaaaagaccataaaagtgtggatgcatgtaaggtgtacaaaggaggttataatggacttaaccagtgtttgacaactactgacagcaagatatttcagtgtgataaatatgtgaaagtctttcataaatttccaaatgtaaatagaaataagataagacatactggaaagaaacctttcaaatgtaaaaaccgtggcaaatcattttgcatgctttcacaattaactcaacataagaaaattcatactagagagtattcttacaaatgtgaagaatgtggtaaagcctttaactggtcctcaacccttactaaacataagataattcatactggagaaaaaccctacaaatgtgaagaatgtggcaaagcttttaaccggtcctcaaatcttactaaacataaaataattcatactggagagaaaccctacaaatgtgaagaatgtgggcaaagcttttaaccggtcctcaacccttactaaacataaaagaattcatacagaagagaaaccctacaaatgtgaagaatgtggcaaggcctttaaccagttctcgattcttaataaacataagagaattcatatgggaagataa

SEQ ID NO: 118533 - DNA, 591 bp, Homo sapiens
atgttgggcaaggtccagcagcaggagcaaactatcgccaaggacctggtcgtgaccaagtataagatgtgtggggggaccacatcgccaaccgggtacttcggtcgttggtggaagcatctagctcagagaggccaggattatattctcaaggaaggtgacttggtaaaaattgaccttggggtccatgtggatggcttcatcgctaatgtaactcatacttttgtggttgatgtagctcaggggacccaagtaacagggaggaaaggagatgttattaaggcagctcaactttgtgttgaagctgccttatgcctggtcaaacctggaaatcagaacatacaagtgagagaagcctggagcaaagttgccctctcatttaactgcatgccaatagaaggtatgctgtcacaccagttgaagcagcatgtcatcgatggtgaaaaaaacattatccagaatcctacagaccagcagaagaaggaccatgaaaaagctgaatttgaggtacatgaagtatatgctgcggatgttctcgtcagctcaggagagggcaaggccaaggatgcaggacagagaaccactatttag

SEQ ID NO: 118534 - DNA, 699 bp, Homo sapiens
cttttgctcccttgaagatctatcctggctataacccagtctaagccagaaatctcagagccctgtgtttccataaccaggtagttgtctcactgcctaccacttcaaactactgaagtgggtggatttggaaaccttttgggatactggatagcttgttccataggttgtgtactatctacaggtatgctgtcacaccagttgaagcagcatgtcatcgatggagaaaaaaccattatccagaatcccacagaccagcagaagaaggaccatgaaaaagctgaatttgaggtacatgaagtatatgctgtggatgttctcgtcagctcaggagagggcaaggtgaggagagtaccagagttggcaaagaggggtgactgagagtgttcaccagaccaaatgttacttaaattactctttcaggccaaggatgcaggacagagaaccactatttacaaacgagacccctctaaacagtatggactgaaaatgaaaacttcacgtgccttcttcagtgaggtggaaaggcgttttgatgccatgccgtttactttaaggtactaagcaatgatagtacttggaaccagtctgactcacagaccatacacccaggaacactttttcctctcccttcctgcctagacttgtagcgtgcatgtgctcactccctccctctctctccccatctccttctcattg

SEQ ID NO: 118535 - DNA, 1827 bp, Homo sapiens
  misc_feature (1)...(1827): n = a,t,c or g
ggcacgagtgcgcctcagcccgcgcgctcgcagcttctcgctctcgcctgcctgcccgctcccttgcttgctcgcgctttcgctcgccctctcctcgaggatcgaggggactctgaccacagcctgtggctgggaagggagacagaggcggcggcggctcaggggaaacgaggctgcagtggtggtagtaggaagatgtcgggcgaggacgagcaacaggagcaaactatcgttgatgttctctggtcgtgaccaagtataagatggggggcgacatcgccaacagggtacttcggtccttggtggaagcatctagctcaggtgtgtcggtactgagcctgtgtgagaaaggtgatgccatgattatggaagaaacagggaaaatcttcaagaaagaaaaggaaatgaagaaaggtattgcttttcccaccagcatttccggtaaataactgtgtatgtcacttctccccttttgaaagagcgaccaggattatattctcaaggaaggtgacttggtaaaaattgaccttggggtccatggtggatggcttcatcgctaatgtagctcacacttttgtggttgatgtagctcaggggacccaagtaacagggaggaaaggcagatgttattaaggcagctcaccttttgtgctgaagctgcccctacgcctggtcaaacctggaaatcagaacacacaagtgaccagaagcctggaacaaagttgcccactcattttaactgcacgccaattagaaggtatgctgtcacacagtttgaagcagcatgtcatcgatggagaaaaaccataattccagaatcccacagacaagcagaaagagggcccatgaaaaagctgattttgaggtacatgtatgtatatgccgtggaaggtctcgtcaagcctcaggagagggcaaggcccaaggatgcaggacagagaaccactatttacaaacgagacccctctaaacagtatggactgaaaatgaaaacttcacgtgccttcttcagtgaggtggaaaggcgttttgatgccatgccgtttactttaagagcatttgaagatgagaagaaggctcggatgggtgtgggtggagtgcgccaaacatgaacttgctggcaaccatttaatgttctctattnaggaagggagggtgattttgtttgcccagttttaaattttacagttctggctcatgcccaatgggcccatgctgataaccagtggtcccttcgagcctgacctatacaagtcccagatggaggtccagtgatgcagagctaaaggccctcctccagagttctgcaagtcgaaaaacccagaaaaagaagaaaaagaaggcctccaagactgcagagaatgccaccagtggggaaacattagaagaaaatgaagctggggactgaggtgggtcccatctccccagcttgctgctcctgccctcatccccttcccaccaaaccccagactctgtgaagtgcagttcttcttctccacctaggaccgccagcagagcggggggatttccctgcccccaccccagttccccaacccactcccttccaacaacaaccagctccaactgaatttggttttgggaggtgaggcttcccaaccacggaagactactttaaatgaaaaaaagaaattgaataataaaatcaggagtcaaaattcatcgtcttcaaggcccctctttctagccttttctactactctctgcttggtcaaggtttgtgccccactacagaacagggctaaattagccaccaccactgaaaactcagccgaatttttttataccactctgacgtcagcatttttt

SEQ ID NO: 118536 - DNA, 431 bp, Homo sapiens
ggccctgcatcgcccgcaaacaagtggaaatcgcccagcgggagggggccaagtatgtgtcccacggcgccacaggaaaggggaacgtgcagggtgattatgagccaactgatgccaccgggttcatcaacatcaattccctcaggctgaaggaatatcatcgtctccagagcaaggtcactgccaaatagacccgtgtacaatgaggagctggggcctcctcaatttgcagatcccccaagtacaggcgctaattgttgtgataatttgtaattgtgacttgttctccccggctggcagcgtagtggggctgccaggccccagctttgttccctggtccccctgaagcctgcaaacgttgtcatcgaagggaagggtggggggcagctgcggtggggagctataaaaatgacaattaaaagagaaaaaaa

SEQ ID NO: 118537 - DNA, 588 bp, Homo sapiens
atgcccgaattctacaaccggttcaagggccacagtgacctgacggaatatgcaaagcaacgcgggattcccaccccggtcactcccaagaacccgtggagcatggacgagaacctcatgcacatcagctgcgaggctggaatcctggagaatcccgagaaccaagcgcctccagctctctacacgaagacccaggacccggccaaaacccccaacacccctgacattctcgagatcgagttcaaaaaaggggtccccgtgaagctcttcatgtacctgaacgaagtcgcgggcaagcacagcgtgggcaatattgccatcgtggagaaccgtttcattggaacgaagtcccgaggtatctaccgggccccagcaggcaccatcctttgctacgctcatttagacatcgaggccttcaccatgtaccgggaagtgcacaaaatcaaacaatgccggggcttgaaatttgctgagctgcatagtggggctgccaggccccagctttgttccctggtccccttgaagcctgcaaacgtcgtcatcgaagggaaggatggggggcagctgcggtggagagctgtaaaatga

SEQ ID NO: 118538 - DNA, 1871 bp, Homo sapiens
  misc_feature (1)...(1871): n = a,t,c or g
atgtccagcaaaggctccgtggttctggcctacagtggcggcctggacacctcgtgcatcctcgtgtggctgaaggaacaaggctatgacgtcattgcctatctggccaacattggccagaaggaagacttcgaggaagccaggaagaaggcactgaagcttggggccaaaaaggtgttcattgaggatgtcagcagggagtttgtggaggagttcatctggccggccatccagtccagcgcactgtatgaggaccgctacctcctgggcacctttttttgccaggccctgcatcgcccgcaaacaagtggaaattcgcccagcgggagggggccaagtatgtgtcccacggcgccacaggaaaggggaacgatcaggtccggtttgagctcagctgctactcactggcccccccagataaaggtcattgctccctggaggatgcctgaattctacaaccggttcaagggccgcaatgacctgatggagtacgcaaagctaacatgggattcccatcccggtcactcccaagaacccgtggagcatggatgagaacctcatgcacatcagctacgaggctggaatcctggagaaccccaagaaccaagcgcctccaggtctctacacgaagacccaggacccagccaaagcccccaacacccctgacattctcgagatcgagtttcaaaaaaggggtccctgtggaaggtggaccaacgttcaaggatgggcaccacccaccagacctttcttggagctctttcatgtacctgaacgaagtcgcgggcaagcatggcgttgggccgtatttgacatcgtgggagaaccgctttcattgggaattgaagtcccgaggtatcttacggagaccccaggcagggcaccatcctttaccatgctcatttagacatcgaggccttcaccatgggcggggatagggcgcaaataccaaaccagggtctgggctttgaatttgttgagcttggtgtataccggttttctggcacagcccctgagtgtgaattggtcggcccttgccttcgccaaagtccccaggagcgagtggaagggaaaagtgcaggtgtcccgtccctcaaagggcccaggtgtacatccctcggcccggaagtcccccactgttctctctacaatgaaggagctggtgaagcatggaacgtgccagggtgattatgaagcccaactgattgccacccgggttcatccaaacatcaatttccctcaaggctgaagggaattatcatcgtcttcccagagcaaaggtcactgcccaaattagaccccgtgtacaatgaggagcttggggcctccctcaatttgcaagatccccccaagtacaggcgcctaattgttgtgataatttgtaattgtgacttgttctccccggctggcagcgtaagtggggctgccaggccccagctttgttccctggtccccctgaagcctgcaaacgttgtcatcgaagggaagggtggggggcagctgcaggtggggagctataaaaatgacaattaaaagagacactagtcttttatttctannnnnnnnnnnnnnnnnnnnnnnnnnnnnnnnnnnnnnttaattatgggtttcttaggccaacctttgtgttttcggacctaagtgctgccgaaggccgccatttgccagacagcctgttaatccggctgtcgacccctctccagcaaaaactaggaatccagatgtgccgcctgggtccgatcctatccagcatcctgggaatctgtcaccaactgtggtcctgtggcaaatgtcaagaaaccaaataaaattcagggaatgccctttgggggcatcaacgcacagccctttctctggacatcacttttact

SEQ ID NO: 118539 - DNA, 501 bp, Homo sapiens; identical to SEQ ID NO: 118345

SEQ ID NO: 118540 - DNA, 3435 bp, Homo sapiens
gcaagaaaaggggctttgcctttgtaacctttgacgaccatgactccatggataagattgtcattccgaaataccatactgtgaatggccacaactgtgaagttaggaaagccctgtcaaagcaagagatggctagtgcttcttccagccaaagaggtcaaagtggttctggaaactttggtggtggttgtggaggtggtttctgtgggaatgacaactttggtcatggaggaaacgtcagtggtcgtggtggctttggtggcagccatggtggtggtggatatggtggcagtggggatggctataatggatttggtaatgatggaatctaagagaccaattataaaacaataaaatactcctctctcccacagttgccttttttctctcttcttgtaattttctcttgctctatttggcccttcttttcacttgtccttccagccagtcaagttctccccaaattcccaggaactcttggggtaggtgtgtgtttttcacatcttaaaggctcacagaccctgcgctggacaaatgttccattcctgaaggacctctccagaatccggattgctgaatcttccctgttgcctagaagggctccaaaccacctcttgaactcaaatttcactttattctttgcatgtttttttttctttctctaggttgtttggttagggctgaatgttttcctgtttgtggatgccttcctgatcctccctaactcattttatgaggccagcatcattctgataccaaagcctggcagagacacaaccaaaaaagagaattttagaccaatatccttgatgaacattgatgcaaaaatcctcaataaaatactggcaaaccgaatccagcagcacatcaaaaagcttatccaccatgatcaagtgggcttcatccctgggatgcaaggctggttcaatatacacaaatcaataaatgtaatccagcatataaacagagccaaagacaaaaaccacatgattatctcaatagatgcagaaaaggcctttgacaaaattcaacaacctttcatgctaaaaactctcaataaattaggtattgatgggacatatttcaaaataataagagctatctatgacaaacccacagccaatatcatactgaatgggcaaaaactggaagcattccctttgaaaactggcacaagacagggatgccctctctcaccgctcctattcaacatagtgttggaagttctggccagggcaattaggcaggagaaggaaataaagggtattcaattaggaaaagaggaagtcaaattgtccctgtttgcagatgacatgattgtatatctagaaaaccccatcgtctcagcccaaaatctccttaagctaataagcaacttcagcaaagtctcaggatacaaaatcaatgtacagaaatcacaagcattcttatacaccaacaacagacaaacagagagccaaatcatgagtgaactcccattcacaattgcttcaaagagaataaaatacctaggaatccaacttacaagggatgtgaaggacctcttcaaggagaactacaaaccgctgctcaaggaaataaaagaggatacaaacaaatggaagaacattccatactatggtgaaatgaagcagctgatggtctctttttctcctctgctgtagtcaacattggcctgtgcccgagcgtctgctctctgcttgaattttaacagcacgctgatcctgcataaagctggctggcgacatctgaccatgatcattctacatttgtagttttgcagccgcacactgagaaagcaattggatcacaaatgttgctgagatgcctcttaacatttcttttcatctttccatttagctattcacatcattgcacacctgtttaactttgactgctatagcagaagccgacaggccacagatggctcccttgcctccattctctccagcctatctcatgatgagtgcacaggtggacattgtgtcaggctgacatttctcctttcacagacagtggagtatgtgacattcaccagcattgctggtctcactggagtgatcatgacaatagccttgattctcatggtaacttcagctactgagttcatccggaggagttattttgaagtcttctggtatactcacccttgcataattctttgtcccaaaccatccttctttgtctatttcagtggaattgtccggggtcaaacagaggagagcatgaatgagagtcatcctcgcaagtgtgcagagtcttttgagatgtgggatgatcatggattaaagacttaaatgtaaaaccccaaactataaacaccgtagaagacaaccaccctggaagacaacctaggcaataccattcaggacataggccctggcaaagatttcatgatgaagataccaaaagcaaatgcaacaaaaataaaaattgatgaatgggatctaattaaactaaagagcttctgcacagcaaaagcaactaccaagagagtaaacaaacatgacgagagcctgaggagccattatgagtgatggggaatgctcacagactgtgtggtaatgagagatccaaacaccaagcgctccaggggctgtgggtttgtcacatacgccactgtggaggaggtggatgcagccacgaacgcaaggccacacaaggtggatggaaaagttgtggaaccaaagagaactgtctcaagagaagattctcaaagaccaggtgcccacttaactgtgaaaaagatatttgttggtggcattaaagaagacacggggggctttgcctttgtaacttttgacgaccatgactccgtggataagattgtcattccgaaataccatactgtgaatggccacaactgtgaagttaggaaagccctgtcaaagcaagagatggctagtgcttcatccagccaaagaggtcgaagtggtcgtggaggtggttttggtgggaatgaaaactttggttgtggaggaaacttcagtggtcatggtggctttggtggcagccatgatggtggtggatatggtggcagtggggatggctataatggatttggtaatgatggtggttatccaggaggcggccctggttactctggaggaagcagaggctatggaagtggtggacagggttgtggaaatcaggacagtggctatggcaggagtggcagctatgacagctgtaacaagggaggcagaggcggctttggcagtggtagtggaagcaattttggaggtggtggaagctacaatgattttggcaattacaacaatcagtattcaaattttggacccatgaagggaggaaactttggggcagacgctctggcccctagggtgatggaggccaatactttgccaaaccaccaaaccacagtggctatggcggttccagtagcagcagtagctatggcagtggcagaagatg

SEQ ID NO: 118541 - DNA, 765 bp, Homo sapiens; identical to SEQ ID NO: 118346

SEQ ID NO: 118542 - DNA, 397 bp, Homo sapiens
gcaagaaaaggggctttgcctttgtaacctttgacgaccatgactccatggataagattgtcattccgaaataccatactgtgaatggccacaactgtgaagttaggaaagccctgtcaaagcaagagatggctagtgcttcttccagccaaagaggtcaaagtggttctggaaactttggtggtggttgtggaggtggtttctgtgggaatgacaactttggtcatggaggaaacgtcagtggtcgtggtggctttggtggcagccatggtggtggtggatatggtggcagtggggatggctataatggatttggtaatgatggaatctaagagaccaattataaaacaataaaatactcctctctcccacagttgccttttttctctcttcttgt

SEQ ID NO: 118543 - DNA, 1678 bp, Homo sapiens
atgagagatccaaacaccaagcgctccaggggctttgggtttgtcacatatgccactgtggaggaggtggatgcagctatgaatacaacgccacacaaggtggatggaagagttgtggaaccaaagagagctgtctccagagaagattctcaaagaccaggtgcccacttaactgtgaaaaagatatttgttggtggcattaaagaagacactgaagaacatcacctaagagattattttgaacagtatggaaaaattgaagtaattgaaatcatgactgaccgaggcagtggcaagaaaaggggctttgcctttgtaacctttgacgaccatgactccgtggataagattgtcattcagaaataccatactgtgaagggccacaactgtgaagttagaaaagccctgccaaagcaagagatggctagtgcttcatccagccaaagaggtcgaaggggttctggaaactttggtggtggtcgtggagatggtttcggtgggaatgacaactttggtcgtggaggaaacttcagtggtcgtggtggctttggtggcagctgtggtggtggtggatatggtggcagtggggatggctataatggatttggtaatgatggaagcaatttttgagggtggtggaagctacaatgattctggcaattacaacaatcagtcttcaaaatttgaacccatgaagggaggaaattttggaggcagaagctctggcccctatggcggtggaggccaatactttgcaaaaccacaaaaccaagcagcacgctgcgtggctgctcgctggctatttaggacggaagctcggttggtgtttctccagaagtttcccccttgggcggtggtggaggtggtaaccgtgatagtagcagctccggcggcagcaacagcgactacgagggatggcggcggctgcagcaggaactgcaacatcccagaggtttttccagagcttctcggatgccctaatcgacgaggacccccaggcggcgttagagagaagcagcagcaaacaaattcaaaatctaccagaagacaagaaataactaagaccatagcagaactgaaggagatagagacacgaaaaacgcttcaaaaaatcaatgaatccaggagctggttttatgaaaagatcaacaaagtagatagactgctagacagactcataaagaagaaaagagagaagagtcaaatagatgcaataaaaaatgatataggggatattgtcactgatcccgcagaaatacaaactaccatcaaagaatactataaacgtctctatgcaaatgaactagaaaatctagaagaaatggataaattcctggcaacatacagcctccacagtctaaaccaggaagaagtcgaatccctgaataaaccagtaaccagttctgaagttgaggcagtaactaatagcctaccaaccaaaaaaagtccaggaccagatggattcacagtattattggaagttctggccccggcaatcaggcaagagaaagaaataaagcatattccaataggaagagaggaagtaaaattgtctctgtttgcagatgacgtgattgtatatttagaaaaccccatcgtctcagcccaaaatctccttaagctgataagcaacttcagcaaactctcagggtacaaaatcaatgtgcaaaaatcataa

SEQ ID NO: 118544 - DNA, 2165 bp, Homo sapiens
atgaagtgtttaaagtttataaatcacaaagaaatattggaggcttctgaaagaaaacaagcagagtcattagattttccctttaaaaaacttcgctggcatctctgtgaaggatggattgaagaggaaagagatgagtcaagaaaatcggaaaccatcttcaaagacctcttcaaagtccctgtgcttaaagaaaccatctattacaaattctatgggccccctgtctatcagattgaaactgtgtattttatggcactgagtccacctaagtcaaagcaatttgacaaaacaaaacaaaacaacaacaacaaaaaaacacatcagtttgtaattgttttctttaaaacagatgaacacctttctgcccgtggacgccgccgaagaagcatcgttaaagtctctcttctccctgccgtcattggtctaaagtcaaagtttcttaaaaagcccgaccagttgaggaagctttttcattggagggttgagctttgaaactactgatgagagcctgaggagccattttgagcaatggggaacgctcacggactgtgtggtaatgagagatccaaacaccaagcgctccaggggctttgggtttgtcacatatgccacttgtggaggaggtggatgcagctatgaatgcaaggccacacaaggtggattggaagagttgttggaaccaaagagagctgtctccagagaagattctcaaagaccaggtgcccacattaacttgtgaaaaagatatttgttggtggcattaaagaagacactgaagaacatcacctaagagatgattattttgaagagattattttgaacagtatggaaaaaattgaagtggattgaaatcatgacttgaccgaggcagtggcaagaaaaggggctttgccttttgtaacctttgacgaccatgactccgtggataagattgtcattccagaaataccatactgtggaaatggccacaactgtgaagttaagaaaagccctgtcaaagcaagaagatggctaggtgcttcatccagcccaaagggggtcgaagtggttctgggaaacttttggtggtgggtcgtgggaggtggttttcggtgggaatggacaacttcggtccgtggaggaaacttcagttggtccgtggtggcctttggtggcaccccgtggttggtggtggatatggttggcagtgggggatggcctataatggatttggtaatgatggaaagcaattttggaggtggtggaaagctacaatgattttggggaattacaacaatcaagtcttcaaattttggacccatgaagggaggaaattttggaaggcagaagctctggcccctatgggcggtggaggccaatacttttgctaaaccccgaaaaccaaggtggctatggcggttccagcagcagcaagtaactattggcagtggcagaagattttaatttaggaaaccaaagcttagcaggaagaggagagccagagaagttgacagggaagctacaggtttacaacagatttgtgaactcagcctaagcacagtggtggcagggcctagctgctacaaagaagacatgttttagacaaatactcatgtgtatgggcaaaaaactcgaggactgtatttgtgactaattgtataacaggttattttagtttctgttctgtggaaagtgtaaagcattccaacaaagggttttaatgtagattttttttttttgcaccccatgctgttgattgctaaatgtaacagtctgatcgtgacgctgaataaatgtcttttttttttaatgtgctgtataaagttagtctgctctgaagccatcttggtaaattttccccaagagtgtgaagttagaattccttcagggtgatgccaggttctttttggagtttatatacaacctgcttgggtggagaagccattgtcttcagaaaccttggtgtaggtgaactgatggttactgttgcgatctgaagttcaccattaaaagggattacccaagcaaaatcatggaattattggttataaaaatgattgttggcccatcctatgcaatatatctaaattgaataatggtaccagataaaattatagatgggaatgaagcttgtgtatcattcattatcatgtgtaatcaataaacgatttaattctcttgaa

SEQ ID NO: 118545 - DNA, 615 bp, Homo sapiens
atgcaagcagcctcaagaagctggaaaaagcaagcctacagcttagagcctagagcctccagaaaacaactcagttttgccaactgcatgattttggtccaggaagacccattttggacttttgatcttttgaactgttctgaattctatgtctgttattttagccatttcaaccttgttaaaaattattactggggagctattgcagtcatttggagatggccttttgtggaaccttgtgattggaatcagaggtatcgatggtctgagcccaaaggtccgaaaggtgttgcagcttcttcgtcttcgtcaaatcttcaatggacctttgtgaagctcatcaaggttacagttaacatgctgaggactgtagagccatatattgcctgtgggtacccaaatctgaagtcagtaaatgaactaatctacaagcatggttatggcaaaatcagtaagaagcgaattgctttgacagataatgttttgattgctcgatctcttggtaaatatggcatcatctgcatggaggatctgatttatgagatctatactgttggaaaacgcttcaaagaagcaaataacttcctgtggcccttcaaattatcttctccatga

SEQ ID NO: 118546 - DNA, 1986 bp, Homo sapiens
atgctctttgaaaccaaggagaacaaagacacaacataccagaatctccgggacgcattcaaagcagtgtgtagagggaaatttatagcactaaatgcccacaagagaaagcaggaaagatccaaaattgacaccctaacatcacaattcaaagaactagaaaagcaagagccaatacattcaaaagctagcagaaggcaagaaataactaaaatcagagcagaactgaagatcaacaaaattgatagactgctagcaagactaataaagaaaaagagagagaagaatcaaatagacgcaataaaaaatgataaaggggatatcaccaccgatcccacagaaatacaaactaccatcagagaatactacaaacacctctatgcaaataaactagaaaatctagaagaaatggataaattcctcaacacatacactctcccaagactaaaccaggaagaagttgaatctctgaatagaccaataacaggatctgaaattgtggcaataatcaatagcttaccaaccaaaaagagtccaggaccagatggattcacagccgaattctaccagaggtacaaggaggagctggtaccattccttctgaaactattccaatcaatagaaaaagagggaatcctgcctaactcattttatgaggccggcatcattctgataccaaagctgggcagagacacaaccaaaaaagagaattttagaccaatatccttgatgaacattgatgcaaaaatcctcaataaaatactggcaaaccgaatccagcagcacatcaaaaagcttatccaccatgatcaagtgggtttcatccctgggatgcaaggctggttcaatatactcaaatcaataaatgtaatccagcatataaacagagccaaagacaaaaaccacataagtatctcaatagatgcagaaaaggcctttgacaaaattcaacaacccttcatgctaaaaactctcaataaattaggtattgatgggacgtatttcaaaataataagagctatctatgacaaacccacagccaatatcatactgaatgggcaaaaactgggagcattccctttgaaaactggcacaagacagggatgccctctctcaccactcctattcaacatagtgttggaagttctggccagggcaattagacaggagaaggaaataaagggtattcaattaggaaaagaggaagtcaaattgtccctgtttgcagatgacatgattgtatatctagaaaaccccattgtctcagcccaaaatctccttaagctgataagcaacttcagcaaagtctcaggatataaaatcaatgtacaaaaatcacaagcattcttatgcaccaacaacagacaaacagagagccaaatcatgagtgaactcccattcacaattgcttcaaagagaataaaatacctaggaatccaacttacaagggatgtgaaggaccccttcaaggagaactacaaaccactgctcaaggaaataaaagaggagacaaacaaatggaagaacattccatgctcatgggtaggaagaatcaatattgtgaaaatggccatactgcccaagaaatacttacgactgggaaatttacaaagaaaagaggttttattggctcatggttctgcaggctatacaggaagaaaagcagcttccgctcggctgctggggaagcctcagaaaacttttactcaaggcgaaggcaaagccagagcagtcacatcacatggcccaagcaggaaagagaaaaagtcgggaggctgcacaggaagtgtggtatctccttctcatgagggcctcaggaagcttacaatcattcaagaagccaaaggtggagccagtgtgttagatggtgagagtgggagcaagagagagaagaggagcagccagggttgtttcaacaaccagctctcctgtgaactgaggaagaacccacttgtcactaaggagatagtgctaaatgattcatga

SEQ ID NO: 118547 - DNA, 1530 bp, Homo sapiens
atgcagctgaaagccaaggctcgagaactacgtgaagaatgcagaagcctcaggagccgatggaatcaactggaagaaagggtatcagtgatggaagatgaaatgaatgaaatgaagcgagaagggaagtttagagaaaaaagaataaaaagaaacgaacaaagcctccaagaaatatgggactatgtgaaaagaccaaatctacgtctgattggtgtacctgaaagtgacggtgagaatgcaaccaggttggaaaacactctgcaggatatcatccaggagaacttccccaatctagcaaggcaggccaacattcagattcaggaaatacagagaatgccacaaagatactcctcaagaagagcatctccaagacacataattgtcagattcaccaaagttgaaatgaaggaaaaaatgttaagggcagccagagagaaagtgttggaagttctggccagggcaatcaggcaggagaaggaaataaagggtattcaattaggaaaagaggaagtcaaattgtccctgtttgcagatgacatgattgtatatctagaaaaccccatcatctcagcccaaaatctccttaagctgataagcaacttcagcaaactctcaggatacaaaatcaatgtgcaaaaatcacaagcattcttatacaccaataacagacaaacagagagtcaaatcatgagtgaactcccattcacaattgcttcaaagagaataaaatacctaggaatccaacttacaagggacgtgaaggacctcttcaaggagaactacaaaccactgctcaatgaaataaaagaggatacaaacaaatggaagaacagtccatgctcatgggtaggaagaatcaatatcatgaaaatggccatactgcccaagagggaaagagttgagctgctaaccctgaagggagagctagccatgcagctgtacatgggagtggccggaggaagcagccgagatagtaaaaacagtgtaaaagagctgctgaataaagccatatttcatctacatacattctttcagctatctgccacccatccacccactccctgtggacctcagcatgggctgaaacctgaccctagacctgaaaattggcatagtcggcaggatgagatgagtaggtcttcagccactgagggctcccagaacccaaaagaaccatgggaagctgataagctgtggtaccatcgcacagggcagaagcccttggcagccgcattgttatccagagatgaaaacttaggctgtattttgcctgagggacataatttatccttgttagtacctgtgactgctttgtcatttcggctgttgacatgccccaacagcatcatggactgggcccacacttacgccaaggtgatcaatgtctccagctgttggatctgcaccactcttccagcggcagctgcagacagcttgccctggtacatgaattcagcttctgtgaagaactggacatggctggaaacttggggtcccatggacaatggttgggatgtaacacggtga

SEQ ID NO: 118548 - DNA, 2211 bp, Homo sapiens
atggccatactgcccaaggtaatttatagattcaatgccatccccatcaagctatcaatgactttcttcacggaattggaaaaaactactttagagttcatatggaaccaaaaaagagcccgcattaccaagtcaatcctaagccaaaagaacaaagctgaaggcatcacgctacctgacttcaaactacagtacaaggctacagtaaccaaaacagcatggtactcgtaccaaaacagagatatagatcaatggaacagaacagagccctcagaaatagtgccatgcatctacaactatctgatctttgacaaacctgacaaaaacaagaaatggggaaaggattccctatttaataaatggtgctgggaaaactggctagtcatatgcagaaagctgaaactggatctcttccttacaccttatacaaaaattaattcaagatggatgaaagacctaaatgttagacctaaaaccataaaaaccctagaagaaaacctaggcaataccattcaggacataggcatgggcaaggacttgatgtctaaaacaccaaaagcaatggcaacaaaagccaaaattgacaaatgggatctaattaaactaaagagcttctgcacagcaaaagaaactaccatcagagtgatcaggcaacccacaaaatgggagaaaattttcacaacctactcatctgacaaagggctaatatccagaatctacagtgaactcaaagaaatttacaagaaaaaaacaaacaaccccatcaaaaagtgggcaaaagatatgaacagacacttctcaaaagaagacatttatgcagccaaaaaacacatgaaaaaatgctcatcatcactggccatcagagaaatgcaaatcaaaaccacaatgagataccatctcacaccagttagaatggcgatcattaaaaagtcaggaaacaacagggacatggatgaaactggaaaccatcattctcagcaaactacggcaaggacaaaaaaccaaacaccccatgttctcactcataggtgggaattgaacaatgagaacacatggacacaggaaggggaacatcacactctggagactgttgtgggggacatggatgaagccggaaaccatcattctcagcaaaatatcacaaggacagaaaaccaaacaccacatgttctcactcataagcgggagttgaacaatgagaacacatggacacagggaggggaacataacataccagggcctgttgtgggttcctggagagccttgaacactggactgagaagctttgactttatcccagggacagtaagagagcctgtaaagattttaggcagaaggttgacatcggatttgcagattaggaacagccctttagaggctgctgtacaagatgcagaaaaggcctttgacaaaattcaacagccctttatgctaaaaactctcaataaaatagctattgatgggacgtatctgaaaataataagagctatttatgacaaacccacagccaatatcatactgaatgggcaaaaactggaagcattccctttgaaaacgggcacaagacaggggtgccctctctcaccactcctatgcaacatagtgttggaagttctggccagggcaatcaggcaggagaaggaaataaagggtattcaattaggaaaagaggaagtcaaattgtccctgtttgcagatgacatgattgtatatctagaaaaccccattgtctcagcccaaaacctccttaagctgataagcaacttcagcaaagtctcaggatacaaaatcaatatgcaaaaatcacaagcattcttatacaccaataacagacaaacagagagccaaatcatgagtgaactcccagtcacaattgcttcaaagagaataaaacacctaggaatccaacttacaagggctgtgaaggacctcttcaaggagaactacaaaccactgctcaatgaaataaaagaggacacaaacaaatggaagaacattccatgctcatggataggaacaatcaatatggtgaaaatggccatactgcccaaggtaatttatagattcaatgccatccccatcaagctaccaaggactttcttcacagaattggaaacaactactttagagttcatatggaaccaaaaaagcctgcattgccaagtcaatcctaagccaaaagaacaaagctggaggcatcatgctacctga

SEQ ID NO: 118549 - DNA, 2481 bp, Homo sapiens
atgttctttgaaaccaatgagaacgaagatacatcataccagaatctcagggacacatttaaagtagtctttagatggaaaattatagctctaaatgcccacaagagaaagcaggaaagatctaaaattgataccctaacatcaaaattgaaagaactagagaagcaacagcaaacaaattcaaaagctagcagaagacatgaaataactaacatcagagcagaactgaaggagatagagacacaaaaaacccttcaaaaaatcaatgaatccgtgaactggttttttgaaaaaatcatcaaaatagatagactgctagccagactaataaagaagaaaagagagaagaatcaaatagattcaataaaaaatgatatagaggatatcaccactgatcctgtagaaacacaaactaccgtcagagaatattttaaacacctctacgcaaataaactagaaaatctagaagaaatggataaattcctggacacatacatcctcccaagtctaagccaggaagaagtagaacccctgaacagaccaataacaggttctgaaattgaggcaataattaatagcttaccaaccaaaaaaagtccaggaccagacagattcacagccaaattctaccagagaataaccaatacagagaagtgcttaaaggagctgatggagctgaaagccaaagctcgagaactacgtgaagaatgcagaagcctcaggagtcgatgcgatcaactggaagaaagggtttcagtgatggaagatgaaatgaatgaaatgaatgcaatcaaactagaactcaggattaagaatctcactcaaaaccgctcaactacatggaaactgaacaacctgctcctgaatgactactgggtacatagcgaaatgaaggcagaaataaagatgttctttgaaaccaacgagaacaaagacacaacataccagaatctctgggacacattcgaagcaaaaagcaagagcaaacaacattcaaaagctagcagaaggcaagaaataactaaaatcagagcagaactgaaggaaatagagatacaaaaaacccttcaaaaaattaatgaatccaggagctggttttttgaaaggatcaacaaaattgatagaccactagcaagactaataaagaaaaaaagagagaagaatctaatagacgcaataaaaactgataaaggggatatcaccaccaatcccacagaaatacaaactaccatcagagaatactacaaacacctctacgcaaataaactagaaaatcgagaagaaatggataaattcctcgacacatacactctcccaagactaaacgaggaagaagtcgaatctctgaatacaccaataacaggctcagaaattgtagcaataatcaatagcttaccaaccaaaaagagtccaggaccagatggattcacagccgaattgtaccagaggtacaaggaggaactggtaccattccttctgaaactattccaatcaatagaaaaagagggaatcctccctaactcattttatgaggccagcatcattctgataccaaagccaggcagagacacaaccaaaaaagagaattttagaccaatatcgttgatgaacattgatgcaaaaatcctcaataaaatactggcaaaaggaatccagcagcacatcaaaaagcttatccaccatgatcaagtgggcttcatccctgggatgcaaggccggttcaatatacgcaaatcaataaatgtaatccagcatataaacagaaccaaagacaaaaaccacatgattatctcaatagatgcagaaaaagcctttgacaaaattcaacaaccctttatgctaaaaactctcaataaattaggtattgatgggacgtatttcaaaataataagagctatctatgacaaacccacagccagtatcatactgaatgggcaaaaactagaagcattccgtttgaaaactggcacaagacagggatgccctctctcaccactcctattcaacatagtgtttgaaattctggcccgggcaattaggcaggagaaggaaataaagggtattcaattaggaaaagaggaagtcaaattgtccctgtttgcaggcgacatgattgtatatctagaaaaccccattgtctcagcccaaaatctccttaagctgataagcaacttcagcaaagtctcaggatacaaaatcaatgtgcaaaaatcacaagcattcttatacaccaataacagacaaacagagagccaaatcatgagtgaactcccattcacaattgcttcaaagagaataaaatacctaggaatccaacttacaagggatgtgaaggacctcttcaaggagaactacaaaccactgctcaaggaaataaaagaggatacaaacaaatggaagaacattccatgctcatgggtaggaagaatcaatatcgtgaaaatggccatactgcccaagaattggaaaaatctactttaa

SEQ ID NO: 118550 - DNA, 1544 bp, Homo sapiens
gatcaacaaaattgatagactgctagcaagactaataaagaaaaagagagagaagaatcaaatagacgcaataaaaaatgataaaggggatatcaccaccgatcccacagaaatacaaactaccatcagagaatactacaaacacctctatgcaaataaactagaaaatctagaagaaatggataaattcctcaacacatacactctcccaagactaaaccaggaagaagttgaatctctgaatagaccaataacaggatctgaaattgtggcaataatcaatagcttaccaaccaaaaagagtccaggaccagatggattcacagccgaattctaccagaggtacaaggaggagctggtaccattccttctgaaactattccaatcaatagaaaaagagggaatcctgcctaactcattttatgaggccggcatcattctgataccaaagctgggcagagacacaaccaaaaaagagaattttagaccaatatccttgatgaacattgatgcaaaaatcctcaataaaatactggcaaaccgaatccagcagcacatcaaaaagcttatccaccatgatcaagtgggtttcatccctgggatgcaaggctggttcaatatactcaaatcaataaatgtaatccagcatataaacagagccaaagacaaaaaccacataagtatctcaatagatgcagaaaaggcctttgacaaaattcaacaacccttcatgctaaaaactctcaataaattaggtattgatgggacgtatttcaaaataataagagctatctatgacaaacccacagccaatatcatactgaatgggcaaaaactgggagcattccctttgaaaactggcacaagacagggatgccctctctcaccactcctattcaacatagtgttggaagttctggccagggcaattagacaggagaaggaaataaagggtattcaattaggaaaagaggaagtcaaattgtccctgtttgcagatgacatgattgtatatctagaaaaccccattgtctcagcccaaaatctccttaagctgataagcaacttcagcaaagtctcaggatataaaatcaatgtacaaaaatcacaagcattcttatgcaccaacaacagacaaacagagagccaaatcatgagtgaactcccattcacaattgcttcaaagagaataaaatacctaggaatccaacttacaagggatgtgaaggaccccttcaaggagaactacaaaccactgctcaaggaaataaaagaggagacaaacaaatggaagaacattccatgctcatgggtaggaagaatcaatattgtgaaaatggccatactgcccaagaaatacttacgactgggaaatttacaaagaaaagaggttttattggctcatggttctgcaggctatacaggaagaaaagcagcttccgctcggctgctggggaagcctcagaaaacttttactcaaggcgaaggcaaagccagagcagtcacatcacatggcccaagcaggaaagagaaaaagtcgggag

SEQ ID NO: 118551 - DNA, 2151 bp, Homo sapiens
atggatacattcctcgacacatacactctcccaagactaaaccaggaagaagttgaatctctgaatcgaccaataacaggctctgaaattgtggcaataatcaatagtttaccaaccaaaaagagtccaggaccagatggattcacagccgaattctaccagaggtacaaggaggaactggtaccattccttctgaaactattccaatcaatagaaaaagagggaatcctccctaactcattttatgaggccagcatcattctgataccaaagccgggcagagacacaaccaaaaaagagaattttagaccaatatccttgatgaacattgatgcaaaaatcctcaataaaatactggcaaaccgaatccagcagcacatcaaaaagcttatccaccatgatcaagtgggcttcatccctgggatgcaaggctggttcaatatacgcaaatcaataaatgtaatccagcatataaacagagccaaagacaaaaaccacatgattatctcaatagatgcagaaaaagcctttgacaaaattcaacaacccttcatgctaaaaactctcaataaattaggtattgatgggacgtatttcaaaataataagagctatctatgacaaacccacagccaatatcatactgaatgggcaaaaactggaagcattccctttgaaaaccggcacaagacagggatgccctctctcaccgctcctattcaacatagtgttggaagttctggccagggcaatcaggcaggagaaggaaataaagggtattcaattaggaaaagaggaagtcaaattgtccctgtttgcagacgacatgattgtttatctagaaaaccccatcgtctcagcccaaaatctccttaagctgataagcaacttcagcaaagtctcaggatacaaaatcaatgtacaaaaatcacaagcattcttatacaccaacaacagacaaacagagagccaaatcatgggtgaactcccattcacaattgcttcaaagagaataaaatacctaggaatccaacttacaagggatgtgaaggacctcttcaaggagaactacaaaccactgctcaaggaaataaaagaggagacaaacaaatggaagaacattccatgctcatgggtaggaagaatcaatatcgtgaaaatggccatactgcccaagctgataggcaactgcagcaaaatctcaggatacaaaatcaatgtgcaaaaatcacaagcattcttatacaccaataacagacaaacagagagccaaatcatgagtgaactcgcattcacaattgcttcaaagaaaatcaaatacctaggaatccaacttacaagggatgtgaaggacctcttcaaggagaactacaaaccactgctcaatgaaataaaagaggatacaaacaaatggaagaacattccatgctcatgggtaggaagaatcaatatcgtgaaaatggccatactgcccaagagcagagtttgtgatcttcggtatttgcactggatctacggatctgtgtcctatggaaaaggcaatgcgtggatcacaagaaagagaagcaccacccaaaagtggacaggtgcagcactacagcccctttccaggacatccctgaaagacaccggagaaggggaatcttcccagtgggcagaacttcgagcagtgtacctgttggttcactttgcatggaaggagaaatggccacatgtgtggttatatactgattcatgggctgtatccagtggttcggctggatggtcaggaacttggaagaagcatgattggaaaattggtgacaaagaaatttggagaagagccagctacctggtggcagattatattggacctcttccatcatggaaagggcagagatttgtcctcactggaatagacacttactctggatatgggtttgcctatcctgcatgcaatgcttctgccaagactaccatccgtggattcatggaatgccttatccaccatcatggtattccacacagcattgcctctgaccaaggcactcacttcatggctaaagaagtgcagcagtgggctcattctcatggaattcaccggtcttatcatgttctccatcacccagaagcagctggattgatagaacgatggaatggccttttgaagtga

SEQ ID NO: 118552 - DNA, 744 bp, Homo sapiens
atgcgtaaggagaaaataccgcatcaggcgccattcgccattcaggctgcgcaactgttgggaagggcgatcggtgcgggcctcttcgctattacgccagctggcgaaagggggatgtgctgcaaggcgattaagttggtgttggaagttctggccagggcaattaggcaggagaaggaaataaagggtattcaattaggaaaagaggaagtcaaattgtccctgtttgcagatgacatgactgtatatctagaaaaccccattgtctcagctcaaaatctccttaagctgataagcaacttcagcaaagtctcaggatacaaaatcaatgtacaaaaatcacaagcattcttatacaccaataacagacaaacagagagccaaatcatgagtgaactcctattcacaattgcttcaaagagaataaaatacctaggaatccaacttacaagggatgtgaaggacctcttcaaggagaactacaaaccactgctcaatgaaataaaagaggatacaaagaaatggaagaacattccatgctcatggctaggaagaatcaatatcgtgaaaatggccatactgcccaagcggtgcctggacccagttcgcacgggaggaagtaggaggcagaatcccctttgggccacagaaagtaacgatctggactcggttcgggccgtgaaagggagggatgcagacctagttgggaccgcagaaaggaaggatcgagaaatccttcagacg

SEQ ID NO: 118553 - DNA, 2241 bp, Homo sapiens; identical to SEQ ID NO: 116379

SEQ ID NO: 118554 - DNA, 2629 bp, Homo sapiens
atgaaatctgggcaccctgaaaaagaacaggataacagcgatgttcaggaaacaagggagataaccataaggggcctgctgtgcactgctctgatgaggcattccactggggcaattgcctacctgggagtgctctcaggatctgcttcactcaagctggctggagtccccctcagatgctgtgagggtgacaaagatgcagggcacccactggaaacacagacggcactctgcgaaagaggaaggggcgccaggagcttggttggcaacaccatcatgacatcacaacctgttcccaatgagaccatcatagtgctcccatcaaatgtcatcaacttctcccaagcagagaaacccgaacccaccaaccaggggcaggatagcctgaagaaacatctacacgcagaaatcaaagttattggggtaaatctaattcagaacgtgttggagaggggttgggggaagtgccaagagatgatatatgtcttgggactggacatctgtcgacccttttttgtgagtagagtttctgaggagggcaggatggggcaaagaggggaggaagatgccaatagcttagacttcccacctgccagcttgctatgtttgatctgccaggagcaaggagtcaacggtgaatcttgttctcctgtcggaatgtatcacagagaaattgtgcctgtttatgaggttctttcggtgataactggccttcaaattcaggttttcagtggcaaggaagctgacagtgttataaagcggtctattggttggggtccattctttaagcccagaaccaaagacaaaaaccacatgattatctcaatagatgcagaaaaggcctttgacaaaattcaacaacacttcatgctaaaaactctcagtaaattaggtattgatgggacgtatctcaaaataataagagctatctatgacaaacccacagccaatatcatactgaatgggcaaaaactggaagcattccctttgaaaactggcacaagacaaggatgccccctctcaccactcctattcaacatagtgttggaagttctggccagggcaattaggcaggagaaggaaataaagggtattcaattaggaaaagaggaagtcaaattgtccctgtttgcagatgacatgattgtatatctagaaaaccccattgtctcagaccaaaatctccttaagctgatcagcaacttcagcaaagtctcaggatacaaaatcaatgtacaaaaatcacaagcattcttatacaccaataacagacaaacagagagccaaatcatgagtgaactcccattcacaattgcttcaaagagaataaaatacctaggaatccaacttacaagggatgtgaaggacctcttcaaggagaactacaaaccactgctcaatgaaataaaagaggatacaaacaaatggaagaacattccatgctcatgggtaggaagaatcaatatcgtgaaaatggccatactgcccaaggtaatttatagattcaatgccatccccatcaagctaccaatgactttcttcacagaactggaaaaaactaccttaaagttcatatggtaccaaaaaagagcccgcatcaccaagtcaatcctaagccaaaggaacaaagctggagacatcacgctacctgacttcaaactatactacaaggctacagtaaacaaaacagcatggtactggcaccaaaacagacatatagatcaatggaacagaacaaagccctcagaaataacgctgcatatctacaactatctgttctttgacaaccctgacaaaaacaagaaatggggaaaggattccctatttaataaatggtgctgggaaaactggctagccatatgtagaaagctgaaactggatcccttccttacaccttatacaaaaattaattcaagatggattaaagacttaaacattagacctaaaaccataaaaaccctagaagaaaacctaggcattaccattcaggacataggcatgggcaagtacttcatgactaaaacaccaaaagcaatggcaacaaaagccaaaattgacaaatgggatctaattaaactaaagagcttctgcacaggcaaagaaactaccatcagagtgaacaggcaacctacaaaatgggagaaaattttcgcaacctactcatctgacaaagggctaatatccagaatctacaatgaactcaaacaaatttacaagaaaaaaacaaacaaccccatcaaaaagtgggcgaaggacatgaacagacacttctcaaaagaagacatttatgcagccaaaaaacacatgaaaaaatgctcaccatcactggccatcagagaaatgcaaatcaaaaccacaatgagataccatctcacaccaacccacttattgtcattggaattgaagaatgtctcagaggaaaagaaaaacttgaaacattatactattggaattcagacacggaccaccaggtctgatggctggggtggccgtaatggaagtcagaccacaaaaaggagcaacccagcttctgagagaacatttcagctaaagcataagttgatagatgtcacaatccaagttcttttagatttccacgcaggaacttcagagttggtgacaagaattg

SEQ ID NO: 118555 - DNA, 1785 bp, Homo sapiens
atgaaggcagaaataaaaatgttctttgaaaccaacgagaacaaagacacaacataccagaatctctgggacgcattcaaagcagtgtgtagagggaaatttatagcactaaatgcccacaagagaaagcaggaaagatccaaaattgacaacctaacatcacaattaaaagaactagaaaagcaagagcaaacacattcaaaagctagcagaaggcaagaaataactaaaatcagagcagaactgaaggaaatagagacacaaaaaacccttcaaaaaatcaatgaatccaggagctggttttttgaaaggatcaacaaaattgatagaccgctagcaagactaataaagaaaaaaagagagaagaatcaaatagacacaataaaaaatgataaatgggatatcaccaccgatcccacagaaatacaaactaccatcagagaatactacaaacacctctacgcaaataaactagaaaatctagaagaaatggataaattcctcgacacatacactctcccaagactaaaccaggaagaagttgaatctctgaatagaccaataacaggatctgaaattgtggcaataatcaatagcttaccaaccaaaaagagtccaggaccagatggattcacagccgaattctaccagaggtacaaggaggaactggtaccattccttctgaaactattccaatcaataggaaaagagggaatcctccctaactcattttatgaggccagcatcattctgataccaaagccaggcagagacacaaccaaaaaagcaaattttagaccaatatccttgatgaacattgatgcaaaaatcctcaataaaatactggcaaaacgaatccagcagcacatcaaaaagcttatccaccatgatcaacatataaacaaagccaaagacaaaaaccacatgattatctcaatagatgcagaaaaagcctttgacaaaattcaacaacccttcatgctaaaaactctcaataaattaggtattgatgggacgtatttcaaaataataagagctatctatgacaaacccacagccaatatcatactgaatgggcaaaaactggaagcattccctttgaaaactggcacaagacagggatgccctctctcaccactcctattcaacatagtgttggaagttctggccagggcaattaggcaggagaaggaaataaagggtattcaattaggaaaagaggaagtcaaattgtccctgtttgcagatgacatgattgtatatctagaaaaccccattgtctcagcccaaaatctccttaagctgataagcaacttcagcaaagtctcaggatacaaaatcaatgtacaaaaatcacaagcattcttatacaccaacaacagacaaacagagagccaaatcatgagtgaactcccattcacaattgcttcaaagagaataaaatacctaggaatccaacttacaagggatgtgaaggacctcttcaaggagaactacaaaccactgctcaaggaaataaaagaggatacaaacaaatggaagaacattccatgctcatgggtaggaagaatcaatatcgtgaaaatggccatactgcccaaggtatttccagaaaacactgagggcaggagacaagagagccttctcaagggcacaggcagaaatgctgagaatcaagatacacgaggcttgaccaaaccgggagtggacaaagacaacaaagatggagaagagttgaacaaagtgaccttccggacccccaactatgagcctagattcaagtaa

SEQ ID NO: 118556 - DNA, 1415 bp, Homo sapiens
atggcagaagatgaagggaaagcaaagaccttcttcgcatggcagcttaaagaagggaagagcagagcgaagggggaagagcctcttatgaaaccatcagatcttccttgtagtataggctgcagtaaccaaaacagactaaaccaggaagaatttgaatctctgaatagaccaataacaggatctgaaattgtggcaataatcaatagcttaccaagcaaaaagagtccaggaccagatggattcacagccgaattctaccagaggtacaaggcggaactggtaccattccttctgaaactattccaatcaatagaaaaagaggaaatcctccctaactcgttttatgaggccagcatcatcctgataccaaagctggacagagacacaaccaaaaaagagaattttagaccaatatccttgatgaacattgatgcaaaaatcctcaataaaatactggcaaaccgaatccagcagcgcatcaaaaagcttatccaccatgatcgagtgggcttcatccctgggatgcaaggctggttcaatatatgcaaatcaatcaatgtaatccagcatataaacagaaccaaagacaaaaaccacatgattatctcaatagatgcagaaaaggcctttgacaaaattcaacagcccttcatgctaaaaactctcaataaattaggtattgatgggacgtatctcaaaataataagagctatctatgacaaacccacagccaatatcatactgaatgggcaaaaactggaagcattccctttgaaaactggcacaagacagggatgccctctctcaccactcctattcaacatagtgttggaagttctagccagggcaattaggcaggagaaggaaataaagggtattcaattaggaaaagaggaagtcaaattgtccctgtttgcagatgacatgattgtatatctagaaaaccccattgtctcagcccaaaatctccttcagctgataagcaacttcagcaaagtctcaggatacaaaatcaatgtacaaaaatcacaagcattcttatacaccaacaacagacaaacagagagccaaatcatgagtgaactcccagtcacaattgcttcaaagagaataaaatacttaggaatccaacttacaagggatgtgaaggacctcttcaaggagaactacaaaccactgctcaatgaaataaaagaggatacaaacaaatggaagaacattccatgctcatgggtaggaagaatcaatatcgtgaaaatggccacactgcccaaggtccttctatatgatccactctttgactggaccatgaatcctttgaaagctttgtatttacagcagaggccggaagatgaaactgagcttcaccctactctgaatgcagatgaccaagaatgcaaacgaaatctcag

SEQ ID NO: 118557 - DNA, 3328 bp, Homo sapiens
atgggagactttaacaccccactgtcaacattagacagatcaacgagacagaaagtcaacaaggatacccaggaattgaacttagctctgcaccaagcggacctaatagacatctacagaactctccaccccaaatcaacagaatatacatttttttcagcaccacaccacacctattccaaaattgaccgcatagttggaagtaaagctctcctcagcaaatgtaaaagaacagaaattataacaaactatctctcacaccacagtgcaatcaaactagaactcaggattaagaatctcactcaaaaccgctcaactacatggaaactgaacaacctgctcctgaatgactactgggtacatagcgaaatgaaggcagaaataaagatgttctttgaaaccaacgagaacaaagacacaacataccagaatctctgggacacattcgaagcagtgtgtagagggaaatttatagcactaaatggccacaagagaaagcaggaaagatccaaaattgacaccctaacatcacaattaaaagaactagaaaagcaagagcaaacaacattcaaaagctagcagaaggcaagaaataactaaaatcagagcagaactgaaggaaatagagatacaaaaaacccttcaaaaaattaatgaatccaggagctggttttttgaaaggatcaacaaaattgatagaccactagcaagactaataaagaaaaaaagagagaagaatctaatagacgcaataaaaactgataaaggggatatcaccaccaatcccacagaaatacaaactaccatcagagaatactacaaacacctctacgcaaataaactagaaaatcgagaagaaatggataaattcctcgacacatacactctcccaagactaaacgaggaagaagtcgaatctctgaatacaccaataacaggctcagaaattgtagcaataatcaatagcttaccaaccaaaaagagtccaggaccagatggattcacagccgaattgtaccagaggtacaaggaggaactggtaccattccttctgaaactattccaatcaatagaaaaagagggaatcctccctaactcattttatgaggccagcatcattctgataccaaagccaggcagagacacaaccaaaaaagagaattttagaccaatatcgttgatgaacattgatgcaaaaatcctcaataaaatactggcaaaaggaatccagcagcacatcaaaaagcttatccaccatgatcaagtgggcttcatccctgggatgcaaggccggttcaatatacgcaaatcaataaatgtaatccagcatataaacagaaccaaagacaaaaaccacatgattatctcaatagatgcagaaaaagcctttgacaaaattcaacaaccctttatgctaaaaactctcaataaattaggtattgatgggacgtatttcaaaataataagagctatctatgacaaacccacagccagtatcatactgaatgggcaaaaactagaagcattccgtttgaaaactggcacaagacagggatgccctctctcaccactcctattcaacatagtgtttgaaattctggcccgggcaattaggcaggagaaggaaataaagggtattcaattaggaaaagaggaagtcaaattgtccctgtttgcaggcgacatgattgtatatctagaaaaccccattgtctcagcccaaaatctcccttaagctgataagcaacgtcagccaaagtctgaggatacaaaatcaatgtgcaaaaatcacaagcattcttatacaccactaacagacaaacagagagccaaatcatgagtgaactcccattcacaattgcttcaaagagaataaaatacctaggaatccaacttacaagggatgtgaaggacctcttcaaggagaactacaaaccactgctcaaggaaataaaagaggatacaaacaaatggaagaacattccatgctcatgggtaggaagaatcaatatcgtgaaaatggccatactgcccaaggtaatttatagaatcaatgccatccccatcaagctaccaatgcctttcttcacagaattggaaaaatctactttaaagttcatatggaaccaaaaaagagcccgcatcgccaagtcaatcctaagccaaaagaacaaagctggaagcatcacactacctgacttcaaactatactacaaggctacagtaaccaaaacagcatggtactggtaccaaaacagagatatagatcaatggaacagaacagagccctcagaaataacaccgcatatctacaactatctgatctttgacaaacctgagaaaaacaagcaatggggaaaggattccctatttaataaatggtgctgggaaaactggctagccatatgtagaaagctgaaactggatcccttccttacaccttatacaaaaatcaattcaagatggattaaagacttaaacgttagacctaaaaccataaaaaccctagaagaaaacctagggattaccattcaggacataggcataggcgacgacttcatgtctaaaacaccaaaaacaatggcagcaaaagacaaaatcgacaaatgggatctaattaaactaaagagcttctgcacagcaaaagaaactaccatcagagtgaacaggcaacctacaaaatgggagaaaattttcgcaacctactcttctgacaaagggctaatatccagaatctacaatgaactcaaacaaatttttaagaaaaaaacaaacaaccccatcaaaaagtgggtgaaggacatgaacagacacttctcaaaaggagacatttatgctgccaaaaaacacatgaaaaaatgctcatcatcactggccatcagagaaatgcaaatcaaaaccacaatgagataccatctcacaccagttagaatggcaatcattaaaaagtcaggaaacaacaggtgctggaggggatgtggagaaataggaacacttttacactgttggtgggactgtaaactagttcaaccattgtggaagtcagtgtggcgattcctcagggatctagaactggaaataccatttgacccagccatcccattactgggtatatacccaaaggactataaatcatgctgctataaagacacatgcacactaacttggatggagctagaagccattattctaagtgaagtactcaggaatggaaaaaccaaaaaccgtatgttctcacttataagtgggaaccaagatacgggtatgcaaaggcatacagaattctatgatggactttggcgactcagaagagggagggttgaggggg

SEQ ID NO: 118558 - DNA, 593 bp, Homo sapiens
tttcgtgctcggaggaggccaaggtgcaacttccttcggtcgtcccgaatccgggttcatccgacaccagccgcctccaccatgccgccgaagttcgaccccaacgagatcaaagtcggtgcgtgctctggttgtggccggggctgcgggatggagcatccctcggccccgccgcgcgtgcaaagctttccccgtatggggctcttaaagccgctgcctcccagagaccttcccggtgttgcgccgccccggccaggcctcagcctttctgggccttagcttcttcacgtgtaggtggggagggaggactggaccacctgtggcggcttgggagcccgcacgccctaggtatacctgaggtgcaccggaggtgaagtcggtgccacttctgccctggcccccaagatcggccccctgggtctgtctccaaaaaaagttggtgatgacattgccaaggcaacgggtgactggaagggcctgaggattacagtgaaactgaccattcagaacagacaggcccagattgaggtggtgccttctgcctctgccctgatcatcaaagccctcaaggaaccaccaagagacagaaagaa

SEQ ID NO: 118559 - DNA, 2530 bp, Homo sapiens
atgagaacaaagacacaacataccagaatctctgggacgcattcaaagccagtgtgtagagggaaatttatagcactaaatgcccacaagagaaagcaggaaaaatccaaaattgacaccctaacatcacaattaaaagaactagaaaagcaagagcaaacacattcaaaagctagcagaaggcaagaaataactaaaatcagagcagaactgaaggaaatagacacacaaaaaacccttcaaaaaataaatgaatccaggagctggttttttgaaaggatcaacaaaattgatagaccactagcaagactaataaagaaaaaaagagagaagaatcaaacagacacaataaaaaattgtaaaggggatatcaccactgatcccacagaaatacaaactaccatcagagaatactacaaacacctctacgcaaataaactagaaaatctagaagaaatggataaattcctcaacacatacactctcccaagactaaaccaggaagaagttgaatctctgaatagaccaataacaggagctgaaattgtggcaataatcagtagtttaccaaccaaagagtccaggaccggatggattcacagccgaattctaccagaggtacaaggaggaactgaaaaagagggaatcctccctaactcattttatgaggccagcatcattctgataccaaagccgggcagagacgcaaccaaaaaagagaattttagaccaatatccttgatgaacattgatgcaaaaatcctcaataaaatactggcaaaacgaatccagcagcacatcaaaaagcttatccaccatgatcaagtgggcttcatccctgggatgcaaggctggttcaatatacgcaaatcaataaatgtaatccagcatataaacagaaccaaagacaaaaaccacatgattatctcaattgatgcagaaaaagcctttgacaaaattcaacaacgcttcctgctaaaaactctcaataaattaggtattgatgggacatatttcaaaataataagagctatctatgataaacccacagccaatatcatactgaatgggcaaaaactggaagcattccctttgaaaactggcacaagacagggatgccctctctcaccgctcctattcaacatagtgttggaagttctggccagggcaattaggcaggagaaggaaataaagggtattcaattaggaaaagaggaagtcaaattgtccctgtttgcagatgacatgattgtatatctagaaaaccccattgtctcagcccaaaatctccttaagctgataagcaatttcagcaaagtctcaggatacaaaatcaatgtacaaaaatcacaagcattcttatacaccaacaacacacaaacagagagccaaatcatgagtgaactcccattcacaattgcttcaaagagaataaaatacctaggaatccaacttacaagggatgtgaaggacctcttcaaggagaactacaaaccactgctcaaggaaataaaagacgatacaaacaaatggaagaacattccatgctcatgggtaggaagaatcaatatcgtgaaaatggccatactgcccaagctaccaatgactttcttcacagaattggaaaaaaactactttaaagttcatatggaaccaaaaaagagcctgcatcgccaagtcaatcctaagccaaaagaacaaagctggaggcatcacactacctgacttcaaactatactacaaggctacagtaaccaaaacagcatggtactggtaccaaaacagagatatagatcaatggaacagaacagagccctcagaaataatgccacctatctacaactatctgatctttgacaaacctgagaaaaacaagcaatggggaaaggattccctatttaataaatggtgctgggaaaactggctagccatatgtagaaagctgaaactggatcccttccttacaccttatacaaaaatcaattcaagatggattaaagacttaaatgttagacctaaaaccataaaaaccctagaagaaaacctaggcattaccattcaggacataggcttgggcaaggacttcatgtctaaaacaccaaaagcaatggcaacaaaagccaaaattgacaaatgggatctaattaaactaaagagcttctgtgcagaaaaagaaactaccatcagagtgaacaggcaacctacaaaatgggagaaaatttttgcaacttactcatctgacaaagggctaatatccagaatctacaatgaactcaaacagatttacaagaaaaaaacaaacaaccccatcaaaaagtgggtgaaggacatgaacagacacttctcaaaagaagacatttatgcagccaaaagacacatgaaaaaatgctcatcatcactggccatcagagaaatgcaaatcaaaaccacaatgagataccatctcacaccagttagaatggcaatcattaaaaagtcaggaaacaacagtttcaggtacgtctttatcagcagcatgaaaatgaactaa

SEQ ID NO: 118560 - DNA, 5401 bp, Homo sapiens
atggggaaaaaacagaacagaaaaactggaaactctaaaaagcagagcgcctctcctcctccaaaggaacgcagttcctcaccagcaacggaacaaagctggatggagaatgactttgacgagatgagagaagaaggcttcagacgatcaaattactctgagctacgggaggacattcaaaccaaaggcaaagaagttgaaaactttgaaaaaaatttagaagaatgtataactagaataaccaatacagagaagtgcttaaaggagctgatggagctgaaaaccaaggctcgagaactacgtgaagaatgcagaagcctcaggagccgatgcgatcaactggaagaaagggtatcagtgatggaagatgaaatgaatgaaatgaatgatggggagaatggaaccaagttggaaaacactctgcaggatattatccaggagaacttccccaatctagcaaggcaggccaacgttcagattcaggaaatacagagaacgccacaaagatactcctcgagaagagcaactccaagacacataattgtcagattcaccaaagtggaaatgaaggaaaaaatgttaagggcagccagagagaaagactttaaaccaacaaagatcaaaagagaaaaagaaggccattacataatggtaaagggatcaattcaacaagaagagctaactatcctaaaaatatatgcacccaatacaggagcaccaagattcacaaagcaagtcctgagtgacctacaaagagacttagactcccacacattaataatgggagactttaacaccccactgtcaacattagacacatcaacgagacagaaagtcaagaaggatacccaggaattgaactcagctctgcaccaagcggacctaatagacatctacagagctctccaccccaaatcaacagaatatacatttttttcagcaccacaccacacctattccaaaattgaccacatagttggaagtaaagctctcctcagcaaatgtaaaagaacagaaattataacaaactatctctcagaccacagtgcaatcaaactagaactcaggattaagaatctcactcaaaaccactcaactacatggaaactgaacaacctgctcctgaatgactactgggtacataacgaagtgaaggcagaaataaaggtgttctttgaaacgaaggagaacaaagacacaacataccagaatctctgggacgcattcaaagcagtgtgtagagggaaatttatagcactaaatgcccacaagagaaagcaggaaagatccaaaattgacaccctaacatcacaattaaaagaactagaaaagcaagagcaaacacattcaaaagctagcagaaggcaagaaataactaatatcagagcagaactgaaggaaatagagacacaaaaaacccttcaaaaaattaatgaatccaggagctgaaatacaaactaccatcagggaatactacaaacacctctatgcaaataaactagaaaatctagaagaaatggataaattcctggacacatacactctcccaagactaaaccaggaagaagttgaatccctgaatagaccaataacaggctctgaaattgtggcaataatcaatagcttaccaaccaaaaagattccaggaccagatggattcacagccgaattctaccagaggtacaaggaggaactggtaccattccttctgaaactattccaatcaatagaaaaagagggaatcctccctaactcattttatgaggccagcatcattctgataccaaagccaggcagagacacaacaaaaaaagagaattttagaccaatatccttgatgaacattgatgcaaaaatcctcaataaaatactagcaaaacgaatccagcagcacatcaaaaagcttatcccccatgatcaagtgggcttcatccctgggatgcaaggctggttcaatatacgcaaatcaataaatgtaatccagcatataaacagagcaaaagacaaaaaccacatgattatctcaatagatgcagaaaaagcctttgacaaaattcaacaacccttcatgctaaaaactctcaataaattaggtattgatgggacgtatttcaaaataataagagctatctatgacaaacccacagccaatatcatactgaatgggcaaaaactggaagcattccctttgaaaactggcacaagacagggatgccctctctcaccactcctattcaacatagtgttggaagttctggccagggcaattaggcaggagaaggaaataaagggtattcaattaggaaaagaggaagtcaaattgtccctgtttgcagatgacatgattatatatctagaaaaccccattgtctcagcccaaaatctccttaagctgataagcaacttcagcaaagtctcaggatacaaaatcaatgtacaaaaatcaccaagcattcctatacaccaacaacagacaaacagagagccaaatcatgagtgaactcccattcacacttactacaacaagaataaaatacctaggaatccaacttacaagggatgtgaaggacctcttcacggagaactacaaaccactgctcaatgaaataaaagaggatacaaacaaatggaagaacattccatgctcatgggtaggaagaatcaatatcgtgaaaatggccatactgcccaaggtaatttatagattcaatgccatccccatcaagctaccaatgactttcttcacagaattggaaaaaactactttaaagttcatatggaaccaaaaaagggcccgcattgccaaggcaatccgaagccaaaagaacaaatctggaggcatcacactacctgacttcaaactatactacaaggctacagtaaccaaaacagcatggtactggtaccaaaacagagatatagatcaatggaacagaacagagccctcagaaataacgccgcatatctacaactatctgatctttgacaaacctgagaaaaatgagcaatggggaaaggattccctatttaataaatggtgctgggaaaactggctagccatatgtagaaagctgaaactggatcctttccttacaccttatacaaaaatcaattcaagatggattaaagacttaatcgttagacctaaaaccataaaaaccctagaagaaaacctaggcattaccattcaggacataggcatgggcaaggacttcatgtctaaaacaccaaaagcaatggcaacaaaagccaaaattgacaaatgggatctaattaaactaaagagcttctgcacagcaaaagaaactaccatcagagtgaacaggcaacctacaaaatgggagaaaactttcgcaacctactcatctgacaaagggctaatatccagaatctacaatgaactcaaacaaatttacaagaaaaaaacaaacaaccccatcaaaaagtgggcgaaggacatgaacagacacttctcaaaagaagacatttatgcagccaaaaaacacatgaaaaaatgctcaccatcactggccatcagagaaatgcaaatcaaaaccacaatgagataccatctcacaccagttagaatggcaatcattaaaaagtcaggaaacaacaggtgctggagaggatgtggagaaataggaacacttttacactgttggtgggactgtaaactagttcaaccgttgtggaagtcagtgtggcgattcctcagggatctagaaccagaaataccatttgacccagccatcccattactgggtatatacccaaaggactctaaatcatgctgctataaagacacatgcacacgtatgtttattgcggcattattcacaatagcaaagacttggaaccaacccaaatgtccaacaatgatagactggattaagaaaatgtggcacatatacaccatggaatactatgcagccataaaaaatgatgagttcgtgtcctttgtagggacatggatgaaattggaaatcatcattcttagtaaactatcgcaagaacaaaaaaccaaacactgcatattctcactcatagtgaggaaactgtggctcaggaagatgatgtgcctttgacaaggtcatggttgctgaaagcactcaagccccaagaggttcagagcagagccaagtcccctgatggccagtacaaagaggaggagaaagagaaggacagcagagggtgctctctgctggatttccccagcatgccagcttcccactgtgcagataaagcaaaatctgataggagcggggaggaagtgggctcaggctccaggagtacaagttggtatgcaagcaagtcattccaaacgccgcctccacacaaaccctctgagctgcaaattattaacctgcttaactctattgcagaaacaagcgctgctggggtgttggaagttctggccagggcaattaggcaggagaaggaaataaagggtattcaattaggaaaagaggaattcaaattgtccctgtttgcagatgacatgattgtatatctagaaaaccccattgtctcagcccaaaatctccttaagctgataagcaacttcagcaaagtctcaggatacaaaatcaatgtacaaaaatcacaagcattcttatacaccaataacagacaaacagagagccaaatcatgagtgaactcccattcacaattgcttcaaagagaataaaatacctaggaatccaacttacaagggatctgaaggacctcttcaaggagaactacaaaccactgctcaatgaaataaaagaggatacaaacaaatggaagaacattccatgctcatgggtaggaagaatcaatatcgtgaaaatggccatactgcccaagagggacgtgactgcaaattgtccaggttcttggcgttttgaacaaagaattggacaaaacacgcagcaaagaaagaatgaagcaacaaaagaacgaaagcagctctctcggctttcggctcggaggaggccaaggtgcaactttcttcggtcgtctcgaatccgggttcatccgacaccagccgcctccaccatgccgccgaagttccaccccaatgagatcaaagtcgtatacttcacgtgcactggagttgaagtcggtgccacttctgctctggcccccaagattggccccgcgggtctgtctccaaaagaggttggtgatgacattgccaaggtaacgggtgactggaagggcctgaggattacagtgaaactgaccattcagaacagacaggcccagattgaagtggtaccttctgcctccgccctgatcatcaaaaggaactaccaagagacagaaagaaacagaaaaacattaaacacagggggaatatcactttttatgagatcgtcaacattgctcgacagatgcagcactgatccttag

SEQ ID NO: 118561 - DNA, 6029 bp, Homo sapiens
atgaacattgatgcaaaaatcctcaataaaatactgccaaaccaaatccagcagcacatcaaaaagcttatccaccatgatcaagtgggcttcatccctgggatgcaaggctggttcaatatacgcaaatcaataaatgtaatccagcatataaacagagccaaagacaaaaaccacatgattatcttaatagatgcagaaaagtcctttgacaaaattcaacaacccttcatgctaaaaactctcaataaattaggtattgatgggacgtatttcaaaataataagagctatctatgacaaacccacagccaatatcatactgaatgggcaaaaactggaagtattcactttgaaaactggcacaagacaaggatgccctctctcaccactcctattcaacatagtgttggaagttctggccagggcaattaggcaggagaaggaaataaagggtattcaattaggaaaagaggaagtcaaattgtccctgtttgcagacgacatgattgtatatctagaaaaccccattgtctcagcccaaaatctccttaagcagataagcaacttcagcaaaatctcaggatacaaaatcaatgtacaaaaatcacaagcattcttatacaccaacaacagacaaacagagagccaaatcatgagtgaaatcccattcacaattgctttaaagagaataaaatacctaggaatccaacttacaagggatgtgaaggacctcttcaaggagaactacaaaccactgctcaatgaaataaaagaggataaaaacaaatggaagaacattccatgctcatgggtaggaagaatcaatatcatgaaaatggccatactgcccaagaaagaagttcttcagatgcgaggtttcaacaaaaccactgtggttacacagttcatcctggtgggtttctccagcctgggggagctccagctgctgctttttgtcatctttcttctcctatacttgacaatcctggtggccaatgtgaccatcatggccgttattcgcttcagctggactctccacactcccatgtatggctttctattcatcctttcattttctgagtcctgctacacttttgtcatcatccctcagctgctggtccacctgctctcagacaccaagaccatctccttcatggcctgtgccacccagctgttctttttccttggctttgcttgcaccaactgcctcctcattgctgtgatgggatatgatcgctatgtagcaatttgtcaccctctgagggacatggatgaagctggaaaccatcattctcaggaaactattgcaaggacagaaaaccaaacactgcatgttctcactcataggtgggaattgaacattgagaacacatggacacaggaaggggaacatcacacactgggacctgttggaagtgttggaagttctggccagggcaatcaggcaagagaaagaaataaagatattcaattaggaaaagaggaagtcaaattggccctgtttgcagacaacatgattgtatatttagaaaaccccatcatctcagcccaaaatctccttaagctgataagcaacttcagcaaagtctcaggatacaaaatcaatgtacaaaaatcacaagcattcttatacatcaataagagacaaacagagatccaaatcatgagtgaactcccattcacaactgcttcaaagagaataaaatacctaggaacccaaattacaagggatgtgaaggacctcttcaaggaggactacaaacaactgctcaacaaaataaaagaggacacaaacaaattgaagaacattccatgctcatggataggaagaatcaatatcatgaaaatggccatactgcctaagcctaactgggaggcaccacccagtaggggcagactgacacctcacacggccaggtacccctctgagacaaagattccagaggaacaatcaggcagcaacatttgctgttcagcaatattcacggttctgcagcctccgctgctgatacccaggcaaacaaggtctcgagtggacctccagcaaactccaacagacctgcagctgaggctcctgactgttagaaggaaaactaacaaacagaaaggacaaccacaccaaaagcccatctgtacgtcaccatcatcaaagaccaaaggagaactacgtgatgaatgcacaagcttcagtagccgatttgatcaactggaagaaagggtatcagtgactgaagatcaaatgaatgaaatgaagcgagaagagaagtttagagaaaaaagaataaaaagaaacgaacaaagcctccaagaaatgtgggactatgtgaaaagaccaaatctacgtctcattgatgtacctgaaagtgacagggagaatggaaccaagttggaaaacactctgcaggacattatcctggagaacttccccaatctagcaaggcaggccaacattcaaattcaggaaatacagagaatgccacaaagatactcctcaagaagagcaactacaagaaacctaattgtcagattcaccaaagttgaaatgaaggaaaaaatgttaagggcagccagagagaaaggtcgggttacccacaaagggaagcccatcagactaacagcagatctcttggcagaaactctgcaagccagaagagagtgggggccaatattcaacattcttaaagaaaagaattttcaacccagaatttcatatccagcaaaactaagcttcataagtgaaggagaaataaaatactttacagagaagcaaatgctgagagattttgtcaccactagccctgccctagaagagctcctgaaggaagcactaaacatggaaaggaacaaccgaacaacaagacagaaagttaacaaggatatccaggaattgaattcagctctgcaccaagcagacctaatagacatctccagaactctccaccccaaatcaacagaatatacattcttctcagcaccacatcacacttattccaaaattgaccacatagttggaagtaaagcactcctcagcaaatgtaaaagaacagaaattataacaaagtgtctctcagaccacagtgcaatcaaactagaactcaggattaagaaactcactcaaaactgcacaactacatggaaactgaacaacctgctcctgaatgactactgggtacaaaatgaaatgaaggcagaaataaagatgttctttgaaaacaatgagaacaaagatacaacataccagaatctctgggacacatttaaagcagtgtgtagagggaaatttatagcactaaatgcccacaagagaaagcagaaaagatctaaaactgacaccctaacatcacaattaaaagaactagaaaagcaagagcaaacacattcaaaagctagcagaaggcaagaaataactaaaatcagagcagaactgaaggaaatagagacacaaaaaacccttcaaaaagttaatgaatccaggagctggtgttttgataggatcaacaaaattgatagaccgctagcaagactaataaagaagaaaagagagaagaatcaaatagacgcaataaaaaatggtaaaggggatgtcaccaccaatcccacagaaatacaaactaccatcagagaatactacaaacacctctacgcaaataaactagaaaatctagaagaaatggataaattcctcgacacatacaccctcccaagactaaaccaggaagaagttgaatctctgaatagaccaataacaggctctgaaattgtggcaataatcagtatagcataccaaccaaaaaaagtccaggaccagatggatccacagccgaattctaccagagtgttggaagttctggccagggcaattaggcaggagaaggaaataaagggtattcaattaggaaaagaggaagtcaaatttgtcccctctttgcagatgacatgattgtatatgtagaaaacccccttccgtctcagccccaaaatcttctttaaggctggttaagcaacttcagcaaaagtcttcaggttacaaaatcaatgtgcaaaaatcacaagcattcttatacaccaacaacagacaaagagagagccaactcatgagtgaactcccattctgttattgcttcaaagagaataaaatacctaggaatccaacttacaagggatgtgaaggacctcctcaaggagaactacaaaccactgctcaaccgaaataaaagaggacacaaacaaatggaagaacattccatgctcatggataggaagaatcaatattgtgaaaaatggccatactggccatactgcccaaggtaatttacagattcaatgccatccccatcaagctaccaatgactttcttcacagaattggaaaaaactactttaaagttaatatggaaccaaaaaagagcccgcatcgccaagtcaatcctaagccaaaagaacaaagctggaggcatcacactacctgacttcaaactatactacaaggctacagtaaccaaaacagcatgttacggtactggtaccaaaacagcatggtactggtaccaaaacagagatatagatcaatggaacagaacagagccctcagaaataacgccgcatgtctacaactatctgatctttgacaaacctgacaaaaacaagcaatggggaaaggattccctatttaataaacggtgctgggaaaactggcgtgccatatgtacaaagctgaaactggatcccttccttacaccttatacaaaaattaattcaagatggattaaagacttaaacgttagacctaaaaccgtaacaaccctagaagaaaacctaggcattaccattcaggacataggcatgggcaaggacttcatgtctaaaacaccaaaagcaatggcaacaaaagccaaaattgacaaatgggatctgattaaactaaagagcttctgcacagcaaaagaaactaccatcagagtgaatgggcaacctacaaaatgggagaaaatttttgcaacctactcatctgacaaagggctaatatccagaatctacaatgaactcaaagaaatttacaagaaaaaaacaaacaaccccatcaaaaagtgggtgaaggatatgaacagacacttctcaaaagaagacatttatgcagccaaaaaaacacatgaaaaaatgctcaccatcaatggccatcagagaaatgcaaatcaaaaccacaatgagttatcatctcacaccagttagaatggcgatcattaaaaagtcaggaaacaacagtacgtttgactttggacaacatgagtttgaactacacaggtccacttatacgcggattgttttcagtaaaattacaccaatattggaagttctggccagggcaattaggcaggagaaggaaataaagggtattcaattaggaaaagaggaagtcaaattgtccctgtttgcagatgacatgattgtatatctagaaaaccccattgtctcagcccaaaatctcctcaagctgataggcaacttcagcaaagtctcaggatacaaaatcaatgtacaaaaatcacaagcattcttatacaccaataacagacaaacagagagccaaatcatgagtgaactcccattcacaattgcttcaaagagaataaaatacctaggaatccaacttacaagggacgtgaaggacctcttcaaggagaactacaaaccactgctcaatgaaataaaagaggatacaaacaaatggaagaacattccatgctcatgggtaggaagaatcaatattgtgaaaatggccatactgcccaaggtctctgagtctctcagaagagagggtagctcctctctgcagctggtcatcccacagtctgtctgtcctctgctctggctgagccccaggcttattatggacctcacaggggaggaagtgcatgccaatcagtccctgggcagccataggcaggcctggaagaggaaccacatgtccccacttaggtcctcaggactggcagctcagcccccagcctttaggccctacctggcctga

SEQ ID NO: 118562 - DNA, 3423 bp, Homo sapiens
atggtaaagggatcaattcaacaagaagagctaactatcctaaatatacatgcacccaatacaggagcacccagattcataaagcaagtcctgagtgacctacaaagagacttagactcccacaccttaataatgggagattttaacaccccactgtcaacattagacagatcaacgagacagaaagtcaacaagtatacccaggaattgaactcagctctgcaccaagcggacctaatagacatctacagaactctccaccccaaatcaacagaatatacaattttttcagcaccccaccacacctattccaaaattgaccacatacttggaagtaaagctctcctcagcaaatgtaaaagaacagaaattataacaaactatctctcagaccacagtgcaatcaaactagaactcaggattaagaatctcactcaaaaccgctcaactacatggaaactgaacaacctgctcctgaatgactactgggtacataaggaaatgaaggcagaaataaagatgttctttgaaaccaatgagaacaaagacacaacataccagaatctctgggatgcattcaaagcagtgtgtagagggaaatttatagcactaactgcccacaagagaaagcaggaaagatccaaaactgacaccctaacatcacaattaaaggaactagaaaagcaagagcaaacacattcaaaagctagcagaaggcaagaaataactaaaatcagagcagaactgaaggaaatagagacacaaaaaactcttcaaaaaattaatgaatcaaggagctcgttttttgaaaggatcaacaaaattgatagaccgctagcaagactaataaagaaaaaaagagagaagaatcaaatagacacaataaaaattgataaaggggatatcaccaaccgatcccacagaaatacacactaccatcagagaatactataaaaacctctacgcaaagaaactagaaaatctagaagaaatggataaattcctggagacatacaccctcccaagaccaaaccaggaagaagttgaatctctgaatagaccaataacaggatctgaaattgtggcaataatcaatagcttaccaaccaaaaagagtccaggaccagatggattcacagccgaattctaccagaggtacaaggaggaactggtaccattccttctgaaactattccaatcaatagaaaaagaaggaatcctccctaactcatttgatgaggccagcatcatcctgataccaaagctgggcagagacacaaccaaaaaagagaattttagaccaatacccttgatgaacactgatgcaaaaatcctcaataaaatactggcaaaccgaatccagcagcacatcaaaaagcttatccaccatgatcaagtgggcttcatccctgggatgcaaggctggttcaatgtacgcaaatcgataaatgtaatccagcatataaacagaaccaacgacaaaaaccacatgattatctcaatagatggagaaaaggcctttgacaaaattcaacaacccttcatgctaaaaactctcaataaattcggtattgatgggacatatatttcaaaataataagagctatccatgacaaacccacagccaatatcatactgaatggggccaaaaactggaagcattcccctttgaaaaactggcacaagaacagggatgcccctctctcacccactccctattcaacatagtgttggaagttctggcccgggcaattaggcaggataaggaaataaagggtattcaattaggaaaagaggaagtcaaattgtccctgtttgcagacgacatgactgtatgtatagaaaaccccattgtctcagcccaaaatctccttaagctgataagcaacttcagcaaagtctcaggatacaaaatcaatgtacaaaaatcacaagcattcttatacaccgataacagacaaacagagagccaaatcatgagtgaactcccatttcacaattgcttccaagagaattaaatacctaggaatccaccttacaagggacgtgaaggacctcttcaaggagaactacaaactactcactgatcaaggaaataagagaggacacaaacaaatggaaaaacattccatgctcatggataggaagaatgaatatcatgaaaatggccatactgcccaaggtaaatttatagattcaatgccatccccatcaagctaccaatgactgttttcacagattcggaaagcactactttaaagttcatatggaaccaaaaaagagcccacatcgccaagtcaatcctaggccaaaagaacaaagctggaggcatcacactacctgacttcaaactatactacaaggctacagtaaccaaaacagcatggtactggtaccaaaacagagatatagatgaatggaacagaatagagccctcagaaataatgccgcatatctacaactatctgatctttgacaaacctgagaaaaacaagcaatggggaaaaggattccctatttaataaatggtgctgggaaaactggctagccatatgtagaaagctgaaactggatcccttccttacaccttatacaaaaatcaattcaagatggattaaagacctaaacgttagacctaaaaccataaaaaccctagaagataacctaggcattaccattcagtacacaggcatgggcaaggacttcgtgtctaaaacaccaaaaacaatggcaacaaaagccaaaattgacaaatgggatctaattaaactaaagagcttctgcacagcaaaagaaactaccatcagagtgaacaggcaacctacacaatgggagaaaatttttgcaacctactcatctgacaaagggctaatatccagaatctacaatgaactcaaacaaatttacaagaaaaaaacaaacaaccccatcaaaaagtgggcaaaggacatgaacagaaacttctcaaaagaagacatttatgcagccaaaaaacacatgaaaaaatgctcaccatcactggccatcagagaaatgcaaatcaaaaccacaatgagatatcatctcacaccagttagaatggcaatcattaaaaagtcaggaaacaacagaacttgggaatataacatactttgttctcttgtgcctctcctgtgttccctcttgtggctgcacctgactgaccatcacctaaaagaggacagaacaaaacacttgacagctagtgataaccttgaaaaaacagaactcagcagatggaaggagagagccctactgtatgagcatcgtgtgctgagacctgctattgactcccagcacagctgtgcccccagaagaatccagggtcatctggtatgcggaagtgatctcactggtttcatggatgatgtggctgtcatcctgattgatgtctcccctttctga

SEQ ID NO: 118563 - DNA, 721 bp, Homo sapiens
ccagagggcaaacccagtcttaagaatcaaattgctctcggctttcggctcggaggaggccaaggtgcaactttcttccggtcggtcccgaatccggtgtttattcgacaccagccgcctccaccatgccgccgaagttcgaccccaacgagatcaaagtcgtatacctgaggtgcaccggaggtgaagctcggtgccacttctgccctggcccccaagtatcggccccctgggtcctgtctccaaaaaaagttggtgatgacattgccaaggcaacggtgtgactggaagggcctgatgattacagtgaaactgaccattcagaacagacaggcccagattgaggtggttgctttctgcctctgccctgatcatcaaagccctcaagggaaccaccaagagacagaaagaaacagaaaaacattaaacacagtgggaatatcacttttgatgagattgtcaacattgctcgacagatgcggcaccgatccttagccagaagaactcttttgggaaccatttaaagagattcctgggggacttgcccagtcagtggggctggtaaggttgattggccgccatcctcatgacatcatcgatgacatcaacagtggtgctgtggaatgccccaccagttaagcacaaaggaaaacatttcaataaaggatcatttgacaaaggaaaaaagaaaggggggggccgtttaaaggatccctccttc

SEQ ID NO: 118564 - DNA, 1768 bp, Homo sapiens
aaaagggggcgggaagggctgtagggtacttgtcaattcgccgccatgaacgtggtttttgctgtgaagcagtacatttccaaaatgatagaggacagcgggcctggtatgaaagtacttctcatggataaagagacgactggcatagtgagtatggtatacacacaatcggagattctacagaaggaagtgtacctctttgaacgcattgattctcaaaatcgagagatcatgaaacacctgaaggcaatttgttttcttcgacctacaaaggagaatgtggattatattattcaggagctccgaagacccaaatacactatatatttcatttatttcagtaatgtgatccagcaagagtgacgtggaagtcattgggctgaagctgattgaacaggaagttgtggctgaggttcaggaattttatggtgattacattgctgtgaacccacatttgttttccctcaatattttgggttgctgccagggtcgaaattgggatccagcccagctatctagaacaactcaagggcttacagctctccttttatctctgaagaagtgtcccatgattcgttatcagctctcatcagaggcagcaaagagacttgcagagtgcgttaagcaagtgataactaaagaatatgaactgtttgaattccgtcggacagaggttcctccattgctccttattttagatcgcttggatgatgccatcaccccattgctaaaccagtggacatatcaggccatggtccacgaactactaggcataaacaacaatcggattgatctttccagagtgccgggaatcagtaaagacttaagagaagtggtcctatctgctgaaaatgatgaattctatgctaataatatgtacctgaactttgctgagattggtagcaatataaagaatctcatggaagattttcagaagaagaaaccaaaagaacagcaaaaactagaatcaataggaagccatgaaggcggtttgttgagaattatccacagttcaagaaaatgtctgggactgtttcaaagcatgtgacagtggttggagaactgtctcgattggtcagtgaacggaatctgctggaggtttcagaggttgagcaagaactggcctgtcaaaatgaccattctagtgctctccagaatataaaaaggcttctgcagaaccccaaagtgacagagtttgatgctgcccgcctgggtgatgctttatgctttacattatgagcgacacagcagcaatagcctgccaggactaatgatggacctcaggaataaaggtgtttctgagaagtatcgaaagctcgtgtctgcagttgttgaatatggtggtaaacgagtcagaggaagtgacctcttcagccccaaagatgctgtggctatcaccaaacaattcctcaaaggactgaagggagtaggaaatgttttatacacagcttcaaccttttcctacatggaaaccctggatcatctcatcaaaggaaggcttaaggaaaacctatatccttatttaggccccagcacactcagagacagacctcaggatatcattgtgtttgtaattggaggagccacctatgaagaggctctaacagtttataacctgaaccgcaccactcctggagtgaggattgtcctgggaggcaccacagtgcacaacacgaaaagtttcctagaggaagttctggcttctggactgcacagccgaagcaaggagagctctcaagtcacatcaaggtcagcgagcagaagatga

SEQ ID NO: 118565 - DNA, 1338 bp, Homo sapiens
atggcccctgttacaatgatgggctataggtcaggtaaaatggggattctggctgatgtccagcttcaagtgggtccaccggggccgtggctccacctggtggtcattgccccagtccctgagtgtataactgggattggtatattcagcagttggggaagccccgatgtggggcccctgctttatgatataagagctatcatgtggggaagcctggcccctgcagaaaacacatggatcctgggaaataaccatagacgattcctagctcagctcaagccccgagtgatcatgcaggatttcagtaatgtgatcagcaagagtgacgtgaagtcattggctgaagctgatgaacaggaagttgtggctgaggttcagcaagtgataactaaagaatatgaactgtttgaattccgtcggacagaggttcctccattgctccttattttagatcgctgtgatgatgccatcaccccattgctaaaccagtggacatatcaggccatggtccacgaactactaggcataaacaacaatcggattgatctttccagagtgccgggaatcagtaaagacttaagagaagtgggtctcatctgctgaaattgatgaattctatgctaataatatgtacctgaactttgctgagattggtagcaatataaagaatctcatggaagattttcagaagaagaaaccaaaagaacagcaaaaactagaatcaatagcagacatgaaggcgtttgttgagaattatccacagttcaagaaaatgtctggggactgtttcaaaggcatgtgacagtggttgggagaactgtctcgattgggtcagtgaacggaatctggctgggaggttttcagaggttgaggcaaggaactgggcctgttcaaaatgaccattcttagtgctctccagaatattaaaaggcttctgcagaaccccaaagtgacagagtttgatgctgcccgcctggtgatgcttttatgcttttacattatgagcgacacagcagcaatagccttcccaggacttaatgatggacctcaggaattaaaggtgttttctggaggaagtattcgaaagctcgtgttctggcagttgttgaatatggtggtaaacgagtcagaggaagtgacctcttcagccccaaagatgctgtggctatcaccaaacaattcctcaaaggactgaagcagcaagaaatagtcaactgtgttctggctgctgccaatgtctacattaaacagctgcctctgagcatccaacctagtgccagcctaaatggctgcatatcactagagaagaagcctctagtttctacgcagagaaactga

SEQ ID NO: 118566 - DNA, 819 bp, Homo sapiens
atgaaaggctacatgcctcccccatattttgcccacagggaaattatggccaggccagcctatgggtcttggagagctcaaaccaatcaggagctgaagggatccccaacacagcacagctgctctaccaaaaagcagccagactgcttctttaagtgggcccctgatcctgttcctcctgactgggtgtgtttgggccagcaacaggtcagtacccatctgggatggaccttccagaggaaagggcaggctgccatctttgctgttttgcagccttcgctggtggtacctctaagtatggaaaaagttgagggcagggctcgggacctgcagcccgccatgcctgagcctacccccaccatgctgtgggctcctgtgccgcccgagcctccccaacaagtgccgccccctgctccacggcgcccagtcccattgaccacccaagggctgaggagtgcaggcacatggaaggtctgcagcttcactcctgaaaccagtgagaccatgaacccactgggaggaatgaacaactccagacgcaccgccttgagagctgtaacactcatcgcgaaggtccacagcttcactcctgagccagcgagaccgcaaacccaccagaaggaagaaactctgaacacatccgaacatcagaaggaacaaactccggacacgccgcctttaagaactgtaacactcatggcgagggtccgcggcttcattcttgaagtcagcgagaccaagaacccaccaattcaggacacaaaaccaagttggaaaacatatgttaggaccttatccaggagaactttcccaacctag

SEQ ID NO: 118567 - DNA, 481 bp, Homo sapiens
ctgtcggccagtggaaagcgactagcgcggccgctggactaaagacatgggtgtcaggctttccaggaaagggctctctaacaacccccaactctttggagttgggaccgttgatttgcctagaaacagcttcctcttttcctttacttctgggctgagccgagggttgacagagaggaaagccatgcagctctggggtcccaacaacatgttggttgacccttcctcggtcctccatgtggtctgggaggaaaactaatgtttctgctgctgcgtaggtgagtgcagctattccgatcagcagggtccagggaccgttgtgggttcttgggcaggggttgtttctgctgctgcgttggtgagcacaactattccgatcagcagggtccagggaccgttgtggattcttgggcagggggagaaacaaaataaaccaaaaccacgggcggttttgtctttcagatgggaaacactcaggcat

SEQ ID NO: 118568 - DNA, 478 bp, Homo sapiens
  misc_feature (1)...(478): n = a,t,c or g
tttctgggatttctgcaaccacatgatagtggctttctcttcttgaggccggcangaccacgagcccaccgggaggaaggaacaactccagacgcgtcgccttaagagctgtaacactcaccacggaacgtctgcagcttcactcctgagccagcgagaccacgaacccaccagaaggaagaaactccgaacacatccgaacatcagaaggaacaaactccggacacgccaccattaagaactgtaacactcaccgcgagggtccgaggcttcattcttgaagtcagtgagaccaagaacccaccaattccagacacacatatatgctaatcttagaaagacatggatactatctcccctctccactccatccttaaacatctcatgactattaagaatgagaaagggaccaagtggcaagagaacatcttcatatgcatacaactttctgagaaaataaaaatttgccaagttgtca

SEQ ID NO: 118569 - DNA, 373 bp, Homo sapiens
atgaacaacttgagacgcgctgccttaagagctgtaacactcaccgcgaaggtctgcagcttcactcctgagccagcgagaccacaaacccaccagaaggaagaaactccgaacacatctgaacatcagaaggaacaaactccggacacgccacctttaagaactgtaacactcaccgcgagggtccacggcttcattcttgaagtcagtgagaccaagaacccaccaattccggacacaccagctactagggaggctgagggcctacgttcaaggctagcagtgtactcaacaagggacagtccctgtgtggcctgttcaggatcctatacacaggctcagggctctttgggcaggaaattccaggatccgg

SEQ ID NO: 118570 - DNA, 358 bp, Homo sapiens
ctgccgtttcttccttctggccttcggggtcttgctgctgaaaataagataagacggccacattcagctgggagcttccttggtcctccatgtggtctgagaggaaaactagtgtttctgctgctgcgttgatgagcacaactattccgatcagcagggtacagggactgttgcagtttctcaactcgaaatcccccatcagccgggcagaaaggtcctggagcacttttggggcgtccgccgcgtttctcacgacgctagcttcgcttttatttcttttcccccctttggcgatatcgtcacttgccaatagcttcgctaaggtgttcccccccacaccctgcgcgggcagccccat

SEQ ID NO: 118571 - DNA, 2559 bp, Homo sapiens
atgaacatcgatgcaaaaatcctcaataaaatactggcaaaccgaatccagcagcacatcaaaaagcttatccaccaggatcaagtgggcttcatccctgggatgcaaggctggttcaacatacgcaaatcaagaaacgtaatccagcatataaacagaaccaatgacaaaaaccacatgattatctcaatagatgcagaaaaggcctttgacaaaattcaacaacacttcatgctaaaaactctcaataaattaggtattgacgggatgtatctcaaaataataagagctatctatgacaaacccacagccaatatcatactgaatgggcaaaaactggaagcattccctttgaaaactggcacaagacagggatgccctctctcaccactcctattcaacatagtgttggaagttctggccagggcaatcaggcaggagaaggaaataaagggtattcaattaggaaaagaggaagtcaaattgtccctgtttgcagatgacatgattgtatatctagaaaaccccactgtctcagcccaaaatctccttaagctgataagcaacttcagcaaagtctcaggatacaaaatcaatgtggaaaaatcacaagcattcttatacaccaataacacacaaacagagagccaaatcatgagtgaactcccattcacaattgcttcaaagagaataaaatacctaggaatccaacttacaagggacgtgaaggacctcttcaaggagaactacaaaccactgttcaatgaaataaaagaggatacaaacaaatggaagagaattccatgctcatgggtaggaagaatcaatattgtgaaaatgcccatactgcccaaggtaatttatagattcaatgccatccccatcaagctaccaatgagtttcttcacagaattggaaaaaactactttaaagttcatatggaaccaaaaaagagcccacattgccaagacaatcctaagccaaaagaacaaagctggaggcttcacgctacctcacttcaaactatactacaaggctacagtaaccaaaacagcatgcccgtctttcaaaacaaaagactataatttcatcaaagctgtttgctttgcccttggtcggcttctcagaataatcacctctacagtctgcaacgtgtcttggaaatgtgggctttcccggggttgtaaagcgttacagctactgctagaaggaggcttttcagggcatgccattctgcacatggtttctgagacttttaaatcggagagggagctcaaagaccacgaaatcatacctgttaactttacaggtgaggaaaggaaggctcagaggcactgtggggagccgctgaaagattttaaacagggatgggccaacggggctctctggtctgcggcttcattcctgaagtcagtgagaccacgaacctactggaaggaagaaactccagacacatctgaacatctgaagaaaccaactccagacacatcatctttaagaactgtaacactcactgtgaggttccgcggcttcattcttgaagtcagcgagaccaagaacccaccagaaggaaccaattccagacacattttggcaaccacaaagggactattgactatcgccaagtggaggaaaactagcgtttctgctgctgcgtcagtgagcgcaactattccgatcagcagggtccagggaccgttgcgggttcttgggcaagaggtgtttctgctgcttcatcgcctccctatagctccccttcctattaatgataagcctcctctaatcttccccacccagaaggaaataaacaaagacatctccaaaggaccacaaaaccctctgggctatcagttatgtccccttcatgctatagggggaggagaatttggcgcaacctggaattggaaaaaactacttaagttcatatggaaccaaaaaagagcctacattgccaagacaatcctaagccaaaagaacaaagctggaggcttcatgctacctgacttcaaactatactacaaggctacagtaaccaaaacagcattgtactggtaccaaaagagagatatagaccaatggaacagaacagagcccttagaaataataccacacatctacaaccttctgatctttgacaaacctgacaaaaacaagaaacggggaaaggattccctacttaataaatggtgctgggaaaactggctagccatatgtagaaagctgaaactggatcctttccttacaccttatacaaaaactaattcaagatggattaaagacttaaatgttagacttaaaaccataaaaaccctagaagaaaacctaggcaataccattcaggacataggcatgggcaaggacttcatgactaaaacaccaaaagcaatggcaccaaaagcaatggcaacaaaagccaaaattgacaaatgggatctaattaacctaaaaagcttctgcacagcaaaagaaactaccatcagagtgaacaggcaacctacagaatgggagaaaatttttaccatctacccatctgacaaagggctaatatccagaatctaa

SEQ ID NO: 118572 - DNA, 1056 bp, Homo sapiens
atggcctccgccgcgcggcgttcaagcggccgccatactttccggcccaccacgcccggcgccgcccaaaggcgctgcgtcccagcgactctgcgggggtttcgtcgaggcccggcaggcttgggtcgggagacgcggcggccggcggggtcccgtcggggagacgcagccgccgccatcagtcatccagccgccctcccgcggggcagggctcgggaccagcagcccgccatgcctgagcctcccaccccctccgtgggctcctgtgcggcccgagcctcccagattagcgcggccccctgctccacggcgcccagtcccatcgaccacccaagggctgaggagtgccggcgcaccgtgtgggactggcaggcagctccacctgcagcccaggtgcgggatccattgggtgaagccagctgggctcctgagtctggtggagatgtggagaacctttatgtcttgctcagggattgtaaatacaccagtcagcaccctgtgtctagctcagggtctgtgaatgcaccaatcgacactctgtatctagctactctgctcagggattgtaaatacaccaatcggcactctgtatctagctcaaggtttgtaaacacaccaatcagcaccgtgtctagctcagagtttgcgaatgcaccaatcgacactctgcatctagctactctgaaggaagaaactccgaacacatctgaacatcagaaggaacaaactccggacatgccgcctttaagaactgtaacagtcacggcgagggtccgcggcttcattcttgacgtcagtgagaccaagaacccaccaattccagacacattttggcgacccagatgggaccttcgccaatcaccaagcaatcaaaccctggcgtttaatgaaaagaatgcggctttagctgcagcccaagagtttggagatacctggtatcttagtcaagtaaatgacagaatgacagccgaagaaagggacaaattcccgactggtcagcaagccatccccagtatggatccccactgggaccttgactcagatcatggggactga

SEQ ID NO: 118573 - DNA, 687 bp, Homo sapiens
tacgcctagcttggcacgagggagaagatcagagctatttatgcagatctcaatcagaatgactttgccatcagcaaagaggacatgcaggagcttctctcctgtacaaacataatatttcactgtgcagccactgtacgctttgacgacactctcagacatgctgtgcaacttaacgtcactgccacccggcagctcttgcttatggctagtcagatgccaaagctggaagcctttatacatatctctactgcctattcaaattgtaacctgaagcacatcgatgaagttatctatccgtgccctgtggagccaaaaaaaatcattgattcccttgagtggttagacgatgctattattgacgagattacacccaagctgatcagagattggcccaatatttatacctacaccaaggccttgggagaaatggtggtgcagcacgagagcaggatcctgaacattgccatcataaggccctccattgtgggagcaacttggcaggagcctttcccaggttgggttgataatataaatggacctaatggaatcattattgcgactgggaaagggtttcttcgggccataaaagctactccaatggctgtggcagacgtaattccagttgatacagtcgtcaatctcatgctagctgtatgatggtatactgctgtctacagacctaag

SEQ ID NO: 118574 - DNA, 1095 bp, Homo sapiens
atgaaatatgaatgtgaaagtaaagatgtggtttctatgaagacaataaaaataagtttgctaaaaaaattgctgtcaaatgagtgggccttagctgccttcccgtggggcagggctcgggacccgcagcccaccatgcctgagcctccccgctgctccgtgggctcctgtgcggcccgagcctcccctacgagcgctgccccctgctccaaggcgcccagtcctatcaaccacccaagggctgaggagtgcgggcacatggcgcgggactggcaggcagctccacctgcggccccagtgcgggatccactggcttcactcctgagccagcgagaccacgaaccccaccagaaggaagaaactccgaacacatccgaacatcagaaggaaaaaactccggacacgccgcctttaagaactgtaacactcaccgtgagggtccacggcttcattcttgaagtcagtgagaccaagaacccaccaattccagacacaaaactgagaggcggaggttgcaagggttcggtctcgctggctttaggagtgaagctgcagaccttcgccgtgagtgttacagctcataaaggcagtgtggacccaaagagtgagcagcagcaagatttattgcaaagagcgaaagatcaaagcttccgcagtgtggaaggggacccgagcggcccttgggtggttgatgggactgggtgctgtggagtgggggcggcactcgttggggaggctcgggccacacaggagcccacggagcagcggggaggctcaggcatggcgggctgcaggtcccgagccctgccccatgcgaaggcagctaaggcctggcgagaaattgagcacagcagctgctggcccagagccatgtttccagatagacctctcatgctgggagtggacagtgccttatgtggcaaaagccctggtaccttgacaatcccagcccagtgcttgttgaaccaggacacccaggtgagagatgtgacacagtcttttaggtcttcctctttcacagtcactgggatccccagtcctgcagaaaaagctgtggtcacagagctaatgccggtacaaagccctgttcaatga

SEQ ID NO: 118575 - DNA, 536 bp, Homo sapiens
atcttcctgactcagcctctcaaatacctcaaaggactaccggagctccccatgcatcgcgcttttttctactttttcgtaagctattggtttcaccagaggtgtggtgttttttttttttcatcacttaagctttaggcccctgccaagcccttgtacctgattttataatttcctacctgtgtaattagagaaagctataaatgtgtaggcttcaaacccacaaaacctgtgtttgcctctgctcctaataaggctgtcctcaaggtaagcctttttatctcgttccaaatctctcatgtcccacgtcattaatcatacaattccctgtcagttctaattacctttgtataacacctcaagtatgttctgtgcctagaactctcaggaagtaagaaggcaaataattctgtgtctggaattggttccttctggtggattcttggtctcgctgacatcaagaatgaagccgcagaccctcgcagtgactgttacagttcttaatacagttctgaaaagtaaaaaaaaaaaaaaaa

SEQ ID NO: 118576 - DNA, 2754 bp, Homo sapiens
attggttgtcattatttattttatttttatttatttatttatttttagagacacggtctgactttgttaccccggctggagtgcagtggtgcaatcatggctcactgcagccttaacctcctgggctcaagtgatcctctcgccaaggctaggataagtagctaggactacagatgcgccccatcacgcccagctaattttacaacttctgtagagatggagtgttgctgggttgcccaggctggtcttgaattcctgggctcaagcgatcctcctgtgtccggaattggtgggttcttggtctcactgacttcaagaatgaagccgcggaccctcgcggtgagtgttacagttcttaaagacagcgtgtccagagtttgttccttctgatgttcagatgtgttcagagtttcttccttctggtgggttcgtggtctcgctggcttaggggtgaagctgcagaccttcgcggtgagtgttacagctcttaaggtggtgcgtctggagttgttcattcctcccggtgggttcatggtctcgatggcttcaggagtgaagctgcagaccttcgcggtgagtgttacagctcgtaaaagcagtgtggacccaaagagtgagcagcaacaagatttattgcaaagagcgaaaggacaaagcttccacaatgtggaagcggacctgagagggttgccactgctggctgggcagcctgcttttattctcttatccggcccgacccacatcctgctgactgactcaggagcccagctggcttcacccagtggatcccgcactggggctgcaggtggagctgcctgccagtcccacgccatgtgcccgcactcctcagccctttgggtggtcgatgggactgggctccgtggagcagggggcggcgctggtcagggaggctggggtcgcacaggagcccagggagggcatttgaagacacttcgtcacccttgcttgctaagatttttatcttgtactgtggaagcggatggcattcatcttgtcactgagcgagtacagcccctggaagtggctttggaaacattgtcttctgcagaggtctgtgctgggatctatgacatattgctggctcttatcttccttcatgacagaggacacctaacacacaataatgtctgtttatcatctgtgtttgtgagtgaagatggacactggaagctaggaggaatggaaactgtttgtaaagtttctcaggccacaccagagtctccagaattcacaactctcccagagtgtcatggacatgcccgggatgccttttcatttggaacattggtggaaagtttgctcacaatcttaaatgaacagggtgagttggagttatactactgcatctatagaataagtaggaaaatcatccatgacgtattctgtgtggaattcaaaggactacagtctttgagcacagtaaggaatcttttgcttaccagaaatgattttctggaagttgtgaatttcttgaaaagtttaacattgaagagtgaagaggagaaaacggaattctttaaatttctgctggacagagtcagctgcttgtcagaggaattgatagcttcaaggttggtgcctcttctgcttaatcagttggtgtttgcagagccagtggctgttaagagttttcttccttatctgcttggccccaaaaaagatcatgcgcagggagaaactccttgcttgctctcaccagccctgttccagtcacgggtgatccccgtgcttctccagttgtttgaagttcatgaagagcatgtgcggatggtgctgctgtctcacatcgaggcctacgtggagcacttcactcaggagcagctgaagaaagtcatcttgccacaggttttgctgggcctgcgtgatactagcgattccattgtggcaattactctgcatagcctagcagtgctggtctctctgcttggaccagaggtggttgtgggaggagaacgaaccaagatcttcaaacgcactgccccaagttttactaaaaatactgacctttctctagaaggcgatccattttctcagcctattaaatttcccataaatggactctcagatgtaaaaaatacttcggaggacagtgaaaacttcccatcaagttctaaaaagtctgaggagtggcctgactggagtgaacctgaggagcctgaaaatcaaactgtcaacatacagatttggcctagagaaccttgtgatgatgtcaagtcccagtgcactaccttggatgtggaagagtcatcttgggatgactgcgagcccagcagcttagatactaaagtaaacccaggaggtggaatcactgctacaaaacctgttacctcaggggagcagaagcctattcctgctttgctttcactcactgaagagtctatgccttggaaatcaagcttaccccaaaagattagccttgtacaaaggggggatgacgcagaccaaatcgagccgccaaaagtgtcatcacaagaaaggccccttaaggttccatcagaacttggtttaggagaggaattcaccattcaagtaaaaaagaagccagtaaaagatcctgagatggattggtttgctgatatgatcccagaaattaagccttctgctgcttttcttatattacctgaactgaggacagaaatggtcccaaaaaaggatgatgtctccccagtgatgcagttttcctcaaaatttgctgcagcagaaattactgaggtgagtacttttatggagtaa

SEQ ID NO: 118577 - DNA, 519 bp, Homo sapiens
atgccgcctttaagaactgtaacagtcacggcgagggtccgcggcttcattcttgacgtcagtgagaccaagaacccaccaattccagacacattttggcgacccagatgggaccttcgccaatcaccaagcagaggacaggcaagggtgcaggttttcgagaatgcgtcggtaaggaccgctaaatctgactttccttggtcctccatgtggtctgggaggaaaactagtgtttctgctgctgcgttggtgagcgcaactattccgatcagcagggtccagggactgttgcgggttcttgggcaggggttgtttctgctgctgtgttggtggttagacgatgctattattgacgagattacacccaagctgatcagagattggcccaatatttatacctacaccaaggccttgggagaaatggtggtgcagcaagagagcaggaacctgaacattgccatcataagccctccattgtgggagcaacttggcaggagcctttcccagatttatagctaa

SEQ ID NO: 118578 - DNA, 1489 bp, Homo sapiens
gagtcattgaccgatcgaatacaggtctggaagtctgaggtccaatataataaaaaatctagtcttcaccttctatcctagggatagacattaggaatatttgaggatgttgttcttggtcttcacgttcatgcattttccctctatttttataattggatcaatgaatcaataagcaaatatattttaactgcataaagataaaaataggcgttgtccaattatggaaatatatggtgaaataagaaatactattcacatttattaaaaacactgaggtcttctttctattaacaaataaatgactcagaggtattactcgcttgctgcaggatggcatatacagtaaaaaataataataacgtatgtgaggtcattttgggtcaggaccatgttcatggatgtttgttttctcaagaaaaaatagtttcacacatacttacatgactaatagaatgaaaggagaaatgcgcggataaatggacagaatatttccatctttttatcttttttgctttgtactctcacaatgaacaccctcaagttgacttaagcacccttccatggtcatgaggtttctggttgcctctgtgtgttagaagcttggagaccaatgccttctgctgtgatcgcgttctccacagttgcctctgggtaggagcctggacactaatagaaaatggatgcacttgagccgacctaagcattcatggtcatgagatttgtggttgccactgttggttaggagcatagagatcagtaatggacacacctgggctggcagaacatcttgccttgatctggagccccatgtctgcccctctgtagaggtgcacatgggccaatgatggatgcaatgagctgatcattttgctgtgatcaaggctatgttgcctctgtgttaggccaatggttgatgttcatgggtgattgatcatcctgtagcgacggtggtattgactgttccccagaggacaaggagtgtgttcttatgtaagtcatagttgacattcttgtttttgattgggtagtttgcctgttcattgatgttcatagtactatagaaggtagataaatggccacatacccttagaatggatacgctcaggtgatttaagcagtcttccatggccacgagctctgtggttgccttgtggttttgatttgtatttctctgatgatcagtgatgttgagccttttttcttgtttgttggctgcatgtatgtcttcttttgagaagtgtttgttcatgtcctttgcccattttttaatggggttgttggtttttttcttgtgaatttgcttaagttccttgtagattctggatattagacctttgtcagatggatagattgcaaaaattttctcccattctgtaggttgtctcttcactctgatgatagtttcttttgctgtgcagaaactcattagtttaattagattccacatgtcaatttttgcttttgttgcaattgcaaaggcatccat

SEQ ID NO: 118579 - DNA, 1587 bp, Homo sapiens
atgcaaaacactgacaacaccaaatgctgggaatttgccgatttcggaaccaccatcaaacaggattttcgcctgctggggcaaaccagcgtggaccgcttgctgcaactctctcagggccaggcggtgaagggcaatcagctgttgcccgtctcactggtgaaaagaaaaaccaccctggcgcccaatacgcaaaccgcctctccccgcgcgttggccgattcattaatgcagctggcacgacaggtttcccgactggaaagcgggcaggattttgccgatttcggaaccaccatcaaacaggattttcgcctgctggggcaaaccagcgtggaccgcttgctgcaactctctcagggccaggcggtgaagggcaatcagctgttgcccgtctcactggtgaaaagaaaaaccaccctggcgcccaatacgcaaaccgcctctccccgcgcgttggccgattcattaatgcagctggcacgacaggtttcccgactggaaagcgggcaggattttgccgatttcggaaccaccatcaaacaggattttcgcctgctggggcaaaccagcgtggaccgcttgctgcaactctctcagggccaggcggtgaagggcaatcagctgttgcccgtctcactggaaaaggcagcaaagtggaaaaaccccgacggccacatggatgggctcactactaatggcgtcctggtgatgcatccacgagggggcttcaccgaggagtcccagcccggggtctggcgcgagatctctgtctgtggagatgtgtacaccttgcgagaaaccaggtcggcccagcaacgaggaaagctggattttcgcctgctggggcaaaccagcgtggaccgcttgctgcaactctctcagggccaggcggtgaagggcaatcagctgttgcccgtctcactggtgaaaagaaaaaccaccctggcgcccaatacgcaaaccgcctctccccgcgcgttggccgattcattaatgcagctggcacgacaggtttcccgactggaaagcgggcaggattttgccgatttcggaaccaccatcaaacaggattttcgcctgctggggcaaaccagcgtggaccgcttgctgcaactctctcagggccaggcggtgaagggcaatcagctgttgcccgtctcactggtgaaaagaaaaaccaccctggcgcccaatacgcaaaccgcctctctccgcgcgttggccgattcattaatgcagctggcacgacaggtttcccgactggaaagcgggcatggattcttgctcccaaactggaacaacaatcaaaccctatctcgggcgtattcttttgatttaaaagggattttgcggaattcggaaccaccatcaaacaggaatttcggcctgctgcggcaaaccagcgtggaccgcttgctgcaattctctcagggccaggcggtgaagggcaatcagctgttgcccgtctcactggtgaaaagaaaaaccaccctggcgcccaatacgcaaaccgcctctccccgcgcgttggccgattcattaatgcagctggcacgacaggtttcccgactggaaagcgggcagtga

SEQ ID NO: 118580 - DNA, 723 bp, Homo sapiens
ggtgctttacccaatggagatagaggacggaggaaaagtagatttgccctctacaagcggcccaaggcaaatggtgtcaaacccagcaccgtccatgtgatatccacgccccaggcatccaaggctatcagctgcaaaggtcaacacagtatatcctacactttgtcaaggaatcagactgtggtggtggagtacacacatgataaggatacggatatgtttcaggtgggcagatcaacagaaagccctatcgacttcgttgtcacagacacgatttctggcagccagaacacggacgaagcccagatcacacagagcaccatatccaggttcgcctgcaggatcgtgtgcgacaggaatgaaccttacacagcacggatattcgccgccggatttgactcttccaaaaacatatttcttggagaaaaggcagcaaagtggaaaaaccccgacggccacatggatgggctcactactaatggcgtcctggtgatgcatccacgagggggcttcaccgaggagtcccagcccggggtctggcgcgagatctctgtctgtggagatgtgtacaccttgcgagaaaccaggtcggcccagcaacgaggaaagctggggttgcaaactggggatatggcagaaaacaccaagtccacgctctgccctctaattgcatggtctggaggaggtcacagactaggcagcagatcagcagatactgtgtga

SEQ ID NO: 118581 - DNA, 404 bp, Homo sapiens; identical to SEQ ID NO: 115258

SEQ ID NO: 118582 - DNA, 1604 bp, Homo sapiens; identical to SEQ ID NO: 115259

SEQ ID NO: 118583 - DNA, 693 bp, Homo sapiens
atggcggggcctgctgagtcttccccgcagggggctcatcctaacagtccatttgccttacagcatcacagctccttgacagtgaaacccctgcacaggcaaaatgtcatccaacaccaagtggcagggcaggaaaacaggagagggcaccaagcgggatcctcgacttctccccagcccttagaagccctcaaaaggccaaacctcagggcgcccttccactcacagagccgtcgaatcctcattccccctgcaggaaacccaacaccaggcgctgcagcccctgcagacccctccacccagaggcgcgaccgctggggctgcgcgttacccatgcccagagtggcggcgggctccgcacatcaccaacaggctggaccgaccgcagctgctcagcaccgcacccccgtggctctcttctcacctcccttatccctagtctatggccaacagcagaggaaggaatcagaaacgccgaccgtgccaacccctccagcccgggcaagagggtggacagagactggcgtagagcatgtgcccgcatataacaggactagagcacccgaaaaatgtgacattgcgtcccctccccccattcatctccggatgctgaaacctcgcatcctagacacatctcaccctgcccaggctgaaaaacactgcaaggacaatgcctttgcagccatgtattaa

SEQ ID NO: 118584 - DNA, 432 bp, Homo sapiens; identical to SEQ ID NO: 118340

SEQ ID NO: 118585 - DNA, 2076 bp, Homo sapiens
atgaagccatgtgctcattcttggaacgcagagctgtcaagaaacatcatcagacatagttttaacctggtaatggtggctgccagtcaggtggctgtcagtcagctccttggttcttatgaaattcttctgctggtttccatagagttgatgttctgttttggtctggggtatttctttataccaatgcaagaatggcctaacacatatggagaaagggtctttgtagatgtggaatcatcagtatttaaatggaatcataagtgtctacataagacagaggcagagagagattacacaaagaagagattaaagttatgtggccacaagccagggaatgctgttggccaacagaagctggaagaagcaagaaaccgattctttactagagcccctggagggagtgcagccctgccgacacttcgatttcagcccagtgataccgatttcagacttctagcctccagaactattttaacctttgagaccaagaacccgtcggaattagcagaacgtttgcgctctgtttgtgggaatcagagcaatgcctatgcccggctgctggaataccgcctgaatgccttgcgaggactgtggaatgcccagcgccagctggccttagaagaacagcatgaaagggaaagttcaggtgatgaggaaactttggccctgctcaaacgccagggcttgttgcagcaacctgagcaagcgcccttcacatcgaggatggggctcctgctggtcttcccccttattcagtcccagagtagaacagacccctctctctgtaacataactgctgaggtgctattgaactgccttcgtgactgccagcctttgagcttgaccaaggagcctgctgactgtctcaatggaattgaaactttgctgtgctcttggctagaggagacttctgacacaggccgacacatcccacataagcaaaaagaaaatgctgctgctgccctggtggctttggcttgtgccagaggttttgtgtactgccggaacgaggagttggaaccaggatgggtggcttttggcagcggcagtcttctccaccggcctgtctctttcgataataaacctcactcccttttccaggtcattgaccagaacacccttcaggtgtgccaggtggtgccaatgccagccaatcacctccccattggcagcaccatgagcactgtgcacctgtcttcagatggcacttacttctattggatctggtctcctgccagcctgaatgagaaaacaccgaagggacattctgtcttcatggacatttttgaacttgtgacgctgaaaggaaagaaggccaaggggaagaaggtggccccggcccctgctgttgtgaagaagcaggaggccaagaaagtggtgaattccctgtttgagaaaaggcgacatccagcccaaaagagaactcacctactttgtgaaatggcccgctatgtcaggttgcagcagcagagagccatcctctataagcagctgaaagtgcctcctgctattaaccagttcacccaggccctgaactgccaaacagttactcaactgcttaagctggcccacaaatacagaccagagacaaagcaagagaagaagcagaggctgttggcccaggctgagaagaaagctgctggcaaagggggcgtccccactaagagaccacctgcccttcgagcaggagttaacaccatcaccaccttggtggagaacaagaaagctcagctggtggtgattgcacacgatgtggattccatcgagctggttgtcttcttgcctgccctgtgttgtaaaatgggagtcccttactgcattatcaaggggaaggcaagactgggccgtctagtccacaggaagacctgcaccactgtcgccttcacacaggtgaacttggaagacaaaggcgctttggctaagctggtggaaggtatcaggaccaatgacaatgacagatacgatgagatctgctgtcactggggaggcaatatcttgggtcccaagtctgtggcttgcattgccaagctcgaaaaggcaaaggctaaagaacttgccactaaactgggttaa

SEQ ID NO: 118586 - DNA, 2568 bp, Homo sapiens
atgaacatgaacatcaaaaaaattgtaaaacaagccacagttctgacttttacgactgcacttctggcaggaggagcgactcaagccttcgcgaaagaaaataaccaaaaagcatacaaagaaacgtacggcgtctctcatattacacgccatgatatgctgcagatccctaaacagcagcaaaacgaaaaataccaagtgcctcaattcgatcaatcaacgattaaaaatattgagtctgcaaaaggacttgatgtgtgggacagctggccgctgcaaaacgctgacggaacagtagctgaatacaacggctatcacgttgtgtttgctcttgcgggaagcccgaaagacgctgatgacacatcaatctacatgttttatcaaaaggtcggcgacaactcaatcgacagctggaaaaacgcgggccgtgtctttaaagacagcgataagttcgacgccaacgatccgatcctgaaagatcagacgcaagaatggtccggttctgcaacctttacatctgacggaaaaatccgtttattctacactgactattccggtaaacattacggcaaacaaagcctgacaacagcgcaggtaaatgtgtcaaaatctgatgacacactcaaaatcaacggagtggaagatcacaaaacgatttttgacggagacggaaaaacatatcagaacgttcagcagtttatcgatgaaggcaattatacatccggcgacaaccatacgctgagagaccctcactacgttgaagacaaaggccataaataccttgtattcgaagccaacacgggaacagaaaacggataccaaggcgaagaatctttatttaacaaagcgtactacggcggcggcacgaacttcttccgtaaagaaagccagaagcttcagcagagcgctaaaaaacgcgatgctgagttagcgaacggcgccctcggtatcatagagttaaataatgattacacattgaaaaaagtaatgaagccgctgatcacttcaaacacggtaactgatgaaatcgagcgcgcgaatgttttcaaaatgaacggcaaatggtacttgttcactgattcacgcggttcaaaaatgacgatcgatggtattaactcaaacgatatttacatgcttggttatgtatcaaactctttaaccggcccttacaagccgctgaacaaaacagggcttgtgctgcaaatgggtcttgatccaaacgatgtgacattcacttactctcacttcgcagtgccgcaagccaaaggcaacaatgtggttatcacaagctacatgacaaacagaggcttcttcgaggataaaaaggcaacatttgcgccaagcttcttaatgaacatcaaaggcaataaaacatccgttgtcaaaaacagcatcctggagcaaggacagctgacatcgatagtggctccaagtagcgaacgggcaggactgggcggcggccaaagcggtcggacagtgctccgagaacgggtgcgcatagaaattgcatcaacgcatatagcgctacagcacgccatagtgactggcgatgctgtcggaatggacgatatcccgcaagaggcccggcagtaccggcataaccaagcctatgcctacagcatccagggtgacggtgccgaggatgacgatgagcgcattgttagatttcatacacgggtcaccgtcgacagcgacacacttgcatcggatgcagcccggttaacgtgccggcacggcctgggtaaccaggtactacctgaagcacgggtggatataagggtaaacaagacatggtccctgccctcaattaaagaatcagcaaatgcaaaggcacaaatgagtgaaatgttacggtatgttgagagaataacaagaattttaggaccagtggagtgtacagtgcagggtgggagagaagaaaagctgaggagagcacatctcaatttggtcagccacatttcaagtgctcaacagacccactggctagtagctaccatattggataatgcagggccagagggactaattgaggaggcaatttcagcagaatttgttgatttaatcaatgtggaggaggaggaacaaggagattccactgtcatcactttagttcaagatgtcattaggtcttttggttggtctttcaatgctgtttctcctgtgacattgccagcttcccaagagaagaagcagaggctgtttgtccaggccaagaagaaagctgctggcaaaggggacgtccccactaaaagaccacctgtccttcgagcaggagttaacaccatcaccaccttggaggagaacaagaaggctcagctggtggtgactgcacatgaagtggatcccatcaagctagttgtcttcctgcttgccttgtgtcataaaatgggggtcccttactgcattatcaaggggaaggcaagactgggacatctagtccacaggaagacctgcaccactgtcaactttacacaggttaactcggaagacaaagacactttggctaagctggtggaagctatcaggaccaattacaatgacagatatgatgaaatccgccatcactag

SEQ ID NO: 118587 - DNA, 644 bp, Homo sapiens
atgccaaaaggaaagaaggccaaggagaagaaggtggctccagcccctgctgtcgtgaagaagcaggaggccaagaaagtggtaaatcccttgtttgagaaaaggcctaagaattttggcactggacaggatatccagcccaaaagagacctcacccactttgtgaaatggccctgctatatcaggttgcagcagcagagaaccatcctctataagtggctgaaagtgcctcctgagattaaccagttcacccaggcaccagacagccaaacagctactctgctgcttaagctggcccacaatacagaccagagacaaaccaagagaagaagcagaggctgttggcccgggccaagaagaaagctgctggcaaaggggacattccccactaagagtccacctgtccttcgagcaggagttaacaccatcaccaccttggtggagaacaagaaagctcagctggtggtgatagcacatgatgtagatcccatcaagctggttgtcttcttgcctgtcctgtgtcataaaatggggtcccttactgcattatcaaagggaaggcaagactgggacatctagtccataggaagacctgcaccactgtcaccttcacacaggttaactcggaagacaaaggtgctttg

SEQ ID NO: 118588 - DNA, 1020 bp, Homo sapiens
  misc_feature (1)...(1020): n = a,t,c or g
aaaagtatacaaaagggtttaaaaatgtgcctaagtagctctctcctcccgccgtccaagatgccgaaaggaaagaaggccaagggaaagaaggtggctccggccccagctgtcgtgaagaagcaggaggctaagaaagtggtgaatcccctgtttgagaaaaggccttaagaattttggcattggacaggacattcagccccaaaagagacttcacccgctttgtgaaatggccccggctattatcaggttgcatgcgcgangagagccatcctctataaagcgggctgaaagttgcctcctgcggattaaccagtttcacccagggccctgggaccccgcaaacaagctacttcagctgctttaagcttgggcccacaagttacagacccagagacaaaagcaaagaggaagaagcagagactgtttggcccgggccgacgaagaaggctgcttggcaaaggggacgtccccaacgaaagagacccacctgtcccttcgagccaggagttaacaccgtcacccacctttggtggaggaacaagaaagctccagcctgggtggtgattgccacacgacggtggatcccattcgagcttggtggtcttcttgcctgccctggtgtcgtgaaaaatgggggtccccttactgcattatcaagggaaaggcaagactgggacgttttagtccaccagaaggccctgcacccactgtcggctttcacaccaggtgaaactcgaaagacaaaaggcggcttttggcttaagctgggttggaagctatcaggacccaatttacaattgaccagatacgatggagatccggccgtcacttggggttggcaatgtcctggggtcctaagtctgtggctcgtattcgccaagcttcgaaaaggcaaaggctaaaagaacttgccactaaactgggttaaatgttacactgttgagttttctgtactataaaaataattgaaataatacaaattttcccttcaaaaaaaaaaaaaaaagggcggccgct

SEQ ID NO: 118589 - DNA, 227 bp, Homo sapiens
ctgctgtagcagatgtggtttcattgcttgagcaaattaacacatctcctggtacctggtatgcagccattgacttggcaaatgcctttttctctattcctgtccataaagcccaccagaagcaatttgccttcagctgccataaagtgggtcgtgcacagcagcatccatcatcaaatggaagtggtatatatgtgatcaggcttgagcaggtcctgaaggcacaa

SEQ ID NO: 118590 - DNA, 338 bp, Homo sapiens
aaggagaaatggccagatgtgcgattatgtactgattcatgggctgtagccaatggtttggcggtatggtcagggacttggaagaagcgtgattggaaaattggtgacaaagaaatttggggaagaattatgtggatagacctctctgaatggtcaaaaactgtgaagatatttgtatcccatgctgacctgactgtggccattgctgagtgcccaatttgccaggagcagacacctacactgagctctcgatatgacaccatttctcagggtgatcagccggctacctggtggcaggtggattatattggacgtcttccatcacggaaatggcagag

SEQ ID NO: 118591 - DNA, 352 bp, Homo sapiens
aagacagatagatcttggagaatgacagtggattatcataagcttaacaaggtggtgactcctcttgcagctactgtaccagatgtggtttcattgcttgagcaaattaacacatctcctcgtacctggtgtgcagccattgacttggcaaatgcctttttctccattcctgtccacaaggcccaccagaagcaatttgccttcagctggcaagagaaggctctgcaacaggtccaggctgctgtgcaagctgctctgccacttgggccctatgacccagcagatccaatggtacttgaggtgtcactggcagatagggatgctgtttggagcctttggcaggcccccttag

SEQ ID NO: 118592 - DNA, 368 bp, Homo sapiens
ccatagagtgggccgtgcacagcagcattccatcagcaaatggaagtggtatatacatgattggtctcaagtaggtcctgaaggcacaaatgattctgcacgatatccagataccacccaaaagtggacagctgcagcactacagcccctttctaggacatccctgaaggacagccatgaagggaaatcttcccagtgggcagaacttagagcagtgcacctggttttgcgctttgcatggaaggagaaatggccagatgtgcaattatatactgattcatgggctgtagccagtggtttggctggatggtcagggacttggaagaagcatgattggaaaattggtgacaaagaaatttggggaagag

SEQ ID NO: 118593 - DNA, 468 bp, Homo sapiens
atgattctgcacgatatccagataccacccaaaagtggacagctgcagcactacagcccctttctaggacatccctgaaggacagccatgaagggaaatcttcccagtgggcagaacttagagcagtgcacctggttttgcgctttgcatggaaggagaaatggccagatgtgcaattatatactgattcatgggctgtagccagtggtttggctggatggtcagggacttggaagaagcatgattggaaaattggtgacaaagaaatttggggaagagccacccctgtcatcgcccaatgggcccatgaacaacgtggccatggtggcagggatggagattatgcatgggctcagcaacatgggcttccactcaccagggatgacctggctacagccactgctgagtgccccatttgccagcagcagagaccaacactgagccctcaatatggcaccattcctcagg

SEQ ID NO: 118594 - DNA, 838 bp, Homo sapiens
accacgtggtagaaataggaggagaaagacattccaagagagaagaatgacactgaatgaaagcccagagaaaataggcaaatggattgaatgctatgggcacccacctgcctctaagctggtggaaatttatattcatacagtctttgtggaagacaaattgtcaatatgtatcagaagctttaacaagaaggcagatggatcttggagaatgacagtggattattgtaagcttaaccaagtggtgactgcaattgcagctgctataccagatgtggtttcattgcttgagcaaattaatacatctcctgatacctggtatgcagccattgacttggcaaatgcccttttctccattcctgtccataaggggtatatcaactctctggctttgtgtcataatgttatttggagagaacttgattgcttttcacttccacgagataccacactggtccattacattgatgacattatgctgattggatccagtgtgcaagaagtagaaaacaaactggacttactggtgaaggataaattgctgcatttggctcctcctacaaccaaggaagaggtacaacacatggtgggcctgtttggattttggaggcagcacattcctcatttgggtgttttacaccagcccatttatcgagtgatccgaaaggctgccagtttgagtggggtccagaacaggagaaggctctgcaacaggtccaggctgctgttggtgggaaacaatctgaaaacaacctgggtcaccagaggtcaccaggcctctggttttcctgaagaccccactgcttctccagaagctgccatggccaccttgctctga

SEQ ID NO: 118595 - DNA, 1219 bp, Homo sapiens; identical to SEQ ID NO: 117723

SEQ ID NO: 118596 - DNA, 2520 bp, Homo sapiens
atgctcacagcagctggaccatatagccaaatactggaatcaaaccaaatatccatcaactttcactgtcaccgagcctcccctcctccccgtgacgaggttcctggtgacctcacagatgcagccctcagacatacaggcacccgtgtcagggctcccactcggcaagggaggaaaataaaaggagaatcaagtgaagggaaaggagaaaggaggcagaagagaacacaagaagttccctttaacaggaggaaaagtaaaggggagacattggagatcgttgatcaagagggaaaaagtcttaagagcgtcccagacgttggtgcggctgatggtgggggggccatcacagactctgatcagatgcacaggacttggggtttcgaggacattctctggggagcttcctgcactctattgcgcacagaaactaccgtggatcttgttacaaggcagcttttgttttgggtctctgctgggagtagtgagggtgtagacagaatgaatgaactaagtcacttccgagctttctggctacacattgcgcacccagcaatgtgggtgacgggtcttgacatgggcacatgtgccgagcttaaggaagaggccttggatggtgaaacggaaaatgaaatgagcacttttctattttaccggatcacacatgcagggacagtcgccttcgctcctctcctcagtggtttcctgcactgtgaatctctgctcacttttcttttgccttttatgctccagttagcacctcctcattcttgcgttttctggaacaaggagcaccggtgtcttacaaggtctctgtggtccgccttgcacggaagcactggcagtcaggaagcagtggctgtcgcagcacctgccactcaagaagctgatggtgaaaagcaaaacaagggggtccagatgctgcccgaccccagcactcagccacaggaggggtgtcctcagcctgccttctatgttctagcttcgtccaactggctgcttagtatgattagacctcaaaatgctaaggattctactgctaatggtatgcagaacactgagaatccttggtatgaatggttcagagagttacacaaaataaatgcatttgacactcctgattcattgctcgtgagaggcaaggagtttgttgactctatacataacacctttgaccatatgtggagaacccaggaacataatgaagctggttggttcctcctaagttcactggacaaagtgatgaaagaaaatgatgaactcagagattctaactcctgccttcagaagcagatactgagcctcaaatctaagattgccctgagtcagagtcttatttcctgtagagaaagagctgacattgtggcaaatcaaacagaagctcttatcattgccagatgtgtaattatcagagatatacttagcagctggcagaacccccatgttggctccatgactgggagggtgagggctgctatgatgggaaaggccaaatggaagccattagagctgcctttacttagaaaaatagtaaataaaaaacaatatcatatccctggaggaactgtggagattagtgccaccatcaaagacttgaaagacccaggggtggtgatttccactacatccccattcaactctcctatttggcctgtgcagaagacagctgctgtaccagatatggtttcattgcttgagcaaatgaactcatctcctggtacctggtatgcagccattgacttggcaaatgcctttttctccattcctgtccataagccccaccagaagcaatttgccttcagctgccactcctgtcatcgcccaatgggccctgaacaaagtggccacggtggcagggatggaggttacacatgggctcagcaacatggacttgcattcaccaatactgatctggctacggtcaatgccaagattgggtttgcctatcctgtgtgcgatgcttctgccaagactaccatccgtggactcttggaatgccttatccgctgtgatggtattccacacagcattgcctctgaccaagccaggattcacaggtccaggaatcaagaggtggaagtggaagtggcaccactcaccatcacccctagtgatcccctagcaaaatttttgctttctgttcccgtgacattacgttctgctggcctagaggtcttagttccaggggaaggaatgctgccaccagggaacacaaggacaattccattaaactggaagttaagattgccacctggacactttgggctcctcctaactttaagtcaagaggctaagaacggagttacagtgttggctggggtgattgacctggactatcaagatgaaatcagtctactactccacaatgggggtaagaaagagtatgcaaggaatacaggagatccattagggcgtctcctagtattaccatgccctgtgattaagatcaatgggaaactacaacagcccaatccaggcgggactacaaatggctcagacccttcaggaatgaaggtttag

SEQ ID NO: 118597 - DNA, 367 bp, Homo sapiens
gagacctctggccttttaccagggtaactgtgcattgggaaaggcaaatgatcagacatttcagggactactggacactggctctgagctgacattgattccagggtacccaaaacgtcattgctgtcccccagttaaagtacgggtttatggaggtcagacagatggatcttggagaatgacagtgggttatcataagcttaaccaagtggtgactccaattgcagctgctgtaccagatgtggtttcattgcttgagcaaattaacacgactcctgccataaagtgggttgtgcacagcagcattccatcatcaaatggaagtggtgtatatgtgatcaggcttgagcaggtcctgaaggcacaa

SEQ ID NO: 118598 - DNA, 541 bp, Homo sapiens
tgccagatgtgtaattatcagagatatacttagcagctggcagaacccccatgttggctccatgactgggagggtgagggctgctatgatgggaaaggccaaatggaagccattagagctgcctttacttagaaaaatagtaaataaaaaacaatatcatatccctggaggaactgtggagattagtgccaccatcaaagacttgaaagacccaggggtggtgatttccactacatccccattcaactctcctatttggcctgtgcagaagacagctgctgtaccagatatggtttcattgcttgagcaaatgaactcatctcctggtacctggtatgcagccattgacttggcaaatgcctttttctccattcctgtccataagccccaccagaagcaatttgccttcagctgccactcctgtcatcgcccaatgggccctgaacaaagtggccacggtggcagggatggaggttacacatgggctcagcaacatggacttgcattcaccaatactgatctggctacggtcaatgccaag

SEQ ID NO: 118599 - DNA, 681 bp, Homo sapiens
atgaaactcatggaaacacttaaccagtgcataaacgctggtcatgaaatgacgaaggctatcgccattgcacagtttaatgatgacagcccggaagcgaggaaaataacccggcgctggagaataggtgaagcagcggatttagttggggtttcttctcaggctatcagagatgccgagaaagcagggcgactaccgcacccggatatggaaattcgaggacgggttgagcaacgtgttggttatacaattgaacaaattaatcatatgcgtgatgtgtttggtacgcgattgcgacgtgctgaagacgtatttccaccggtgatcggggttgctgcccataaaggatacctctggccttttaccagggtaactgtgcaatgtggaaagaaaaatgatcagacatttcagggactactggacactggctctgagctgacgttgattccagaggacccaaaacgtcattgtggtcctccagttaaagtaggggcttatggaggtcaggtattacacagcaagtgggcaccaatatatcatttcctcagtagtcataactgcaatggattttgttacatcagtatagccaatttaccaaagaagtttggtcaaaacatcaaagaatgccttaccaataatcggatagtgccttttaactgtgtccaagaccctacatactaa

SEQ ID NO: 118600 - DNA, 1093 bp, Homo sapiens
accacgtggtagaaataggaggagaaagacattccaagagagaagaatgacactgaatgaaagcccagagaaaataggcaaatggattgaatgctatgggcacccacctgcctctaagctggtggaaatttatattcatacagtctttgtggaagacaaattgtcaatatgtatcagaagctttaacaagaaggcagatggatcttggagaatgacagtggattattgtaagcttaaccaagtggtgactgcaattgcagctgctataccagatgtggtttcattgcttgagcaaattaatacatctcctgatacctggtatgcagccattgacttggcaaatgcccttttctccattcctgtccataaggggtatatcaactctctggctttgtgtcataatgttatttggagagaacttgattgcttttcacttccacgagataccacactggtccattacattgatgacattatgctgattggatccataaaatttctaggggtccagtggtgtggggcctgtcgagatattccttctaaggacccagcagatccaatggtgctcgaggtgtcagtggcagatagggatgctgtttggagcatttggcaggctcttatagatgaatcacagcagaggcctctaggattttggagcaagtctctaccatcttctgcagataactactctccttttgagagacagctcttggcctattactgggctttggtggaaactgaacgttcaactatgggtcatcaagtcaccatgctacctgaactgcctgtcatgaactgggtgctttctgacccatctagccataaaccaatggtttggctggatggtcagggactgggaagaagcatgattggaaaattggtgacaaagaaatttggagaagaggtatgtggatggacctctctgagtggtcaaaaactgaagatatttgtgtcccatgtgagtgctcaccaacgagtgacctcagcagaggaggagtttaataatcaagtggataggatgacccgttctatggacaccactcagcctctttacccaaccacccctgtcatcgcccaatgggctcatgaataa

SEQ ID NO: 118601 - DNA, 1239 bp, Homo sapiens
atgctgattggatccagtgagcaagaagtagctaacacactggacttatttgtgagacatttgcatgccagagaatgggaaataaaactgactaaaattcagggaccttctacctcagtaaaatttctaggggtccagtggtatggggcctgtcaagatattccttctaatgtaaaggatacgttgctgcatttggcccctcccataaccaagaaagaggcacaatgcctactgggcctatttggattttggaggcaacacattcctcatttggaattgcctatcaagaactgggtgctttctgacccatctagctataaagtgggttgtgcacagcagtattccatcatcaaatggaagtggtatatatgtgattgggctcaagcaaatccagaaggcacaatcaatggtttggctcgatggtcagggacttggaagaagcacaattggaaaattggtgacaaagaaatttggggaagaggcatgtggatggacctctctgagtggtcaaaaactgtgaagatatatgtatcccatgtaagtgctcaccaacagatgacctcagcagaggaggattttaataatcaagtggataggatgacccgttctatggacaccacacagcctctttccccaaccactcctgtcatcacccaatgggcccatgaacaaagtgaccatggtggcagggatggagattatacatgggctcagcaacatggacttccactcaccaagtcattcacttttgctaaagaagtgtggcagtgggctcatgctcatggaattcactggtcttatgttccccatcatcctgaagcagctggattgatagaacgatggaatggccttttgaagtcacaattaaaatgccaactaggtgacaatactttgcagggctggggcaaagttctccagaaggctatgtatgctctgaatcagcatccaatatatggtactgtttctcccatagccaggcttcatgggtccaggaatcaaggggaggaagtggaagtggcaccactcatcatcacccctggtgacctactagcaaaatttttgcttcctgtttccacgacattacattctgctggcctaggagttgtgtatgggttcaagttgacaagggatggacttgtgatggttaatactgagtgtcaacttgatcggattgaaggatgcaaagtattgttcctgggtgtgtctgtgagagtgtcgccaaaggagattaacatttga

SEQ ID NO: 118602 - DNA, 1467 bp, Homo sapiens
ggggaaaaaggaaatgatcagacatttcggaaactactggacactggctctgagctgatgttgattccactcagggtggtgattcctaccacatccctgttcaactctcccatttggcctgtgcagaagacagatggatctggaagaatgagagtggattatcataagcttaaccaagtgatgactccaactgcagctgctgtaccagatgtggtttcattgtttgagccaattaacacatttcttggtacctggtatgcagccattgacttggcaaatgcccttttctccattcctgtctgtaaggcccaccagaagcaatttgccttcagctggcaaggccagcaatatacctttactgttctacctcagaggtatattaactgtttggctttgtgtcataatcttattcagagagaccttgatcactttttgcttccacaaggtatcacactggtccattacattgattccggcccatttatcaagtgacctgaagctgccagttttgagtggggtccagaacaggagaaggctctacaacaggtccaggctgctgtgcaagctgctctgtcaattgggccatatgacccagcagatccaatggtacttgaggtgtcagtggcagatggcgatgctgtttggagcctttggcaggcccccaaaggtgaatcacagtggaggcctctaggattttggagcaaggctctgccatcttctacagataattactcttcttcagatgtgcaattatatactgattcatgggctgttgccagtagtttggctggatagtcagggacttggaagaagcatgattggaaaattggtgacaaagaaatttggggaagaggtatgtggatggacctctctgagtggtcaaaaactggaaagatatttgtatcccatgtgaatgctcaccaactggtgacctcagcagaggaggattttaataatcaagtggataggatgacccgttctgtggacaccactcagcctctttccccagccacccctgttgtcgcccaatgggcccatgaacaaagtggccatggtggcaggaatgaaggttatgcatggactcagcaacatggacttccactcaccaaagctgacctgactacagccactgctgagtgcccaatttgccagcagcagagaccaacactgagacctcgatatggcaccacttctcagggtgatcagccagctacctgctggcaggttgattacattgaacctcttccatcatggaaaaggcagaggtttctcctcactggaataaacactcactctggatatgggtttgcctatcctccatgcaatgcttctgccaagactaccatccatggactcatagcatgccttatccactgtcatggtattccacacagcattgcctctctttacagagagagaggcactcactttacagataaagaagtgcagcagtgggcgcatgctcat

SEQ ID NO: 118603 - DNA, 1605 bp, Homo sapiens
gaatctttctcccatccttccccaagacctctggccttttaccagggtaactgtgcactggggaaagggaaatgatcagacatttcagggactacaggatactggctctgagctgatgctgattccaggggacccaaaacgtcactgtagtcctccagttaaagtagggtcttatggaggtcaggtaattaatggagttttagctcaggtgcgacttacagtgggtacagtgggtccccggactcatcctgtggtcatttccccagtgccagaatgcataattgacatagacatacttaacagctggcagaacccccacattgactccctgactggtagggtgaaagctattatggtgggaaaggccaaatggaagccatttgagccgcttcttcctataaaaatagtaaatcaaaaacaatatcgcatccctggagggattgcagagattagtgccaccatcaaggatttgaaagacgcaggggtggtgattcccatcacactgccgttcaactctcctttttggcctgtgaagaagacagatggatcttggagaatgaaagtggtttattgtaagcttaaccaagttgtgactccaattacagctgctgtaccagatgtggggtttcattgcttgagcaaattaacacatctcctggtacctggtatgcagccattgatttggcaaatgccattttctccattcctgtccataaggcccaccagaagcaatttgccttcagctggcaaggccaccaaaatacctttactgtctttactatcctacttcacatccataaagtgggtcacgcacagcaacattccatcatcaaatggaagtggtatatacatgatggggctcgagcaggttctgaaggcacaagtaagttaaatgaggaagtgcctcaaatgcccatggtcaccacctctgccgccttaccttctctcccgcggcctgcaccgatggcctcatggggagttctctatgatcagttgacagaggaagagaagactagggcctggttcacagatggttctgcacgatatgcaggcaccacccaaaagtggacagctgcagcactacagcccctttctaggacatcactgaagggcagtggtgaagggaaatcttcccagtgggcagaacttcaagcagtgcacctggttgtgcacttttcatggaaggataaatggccagatgtgcgattatatattgattcatgggctgtagccaatggtttggctggatggtcagggacttggaagaagcatgattggaaaattggtgacaaagaaatttggggaagaggtatgtggatggacctctctgagtggccaaaacctgtgaagatatttggatcccatgtgagtgctcaccaatgggtgatctcagcagaggaggattttaataatcaagtggataagatgacctgttctgtggacatcactcagcctctttccccagccacccctgttatcacccaatgggcccataaacaaagtggccatggtggcagggatggaggttatacatgggctcagcaacatggacttccactcaccaaaactggcctggctatggctacagctgagtgcccaatttga

SEQ ID NO: 118604 - DNA, 2097 bp, Homo sapiens
atgctctccagtacgcagaacgcgggcggctcctatcagcgggtccgcggggcgcttgatacacaggagtggaagtggggagaggtgagtcctcgaaccctgaacgtggacggacgagcccttgtttcagtagccaacacacacgggacagacagaccggcgtacacactcaatcctcagagcagagatcagagatcaggagtaattactttaggctataagagacctttggaaagagaggatctttttgaactaaaggaaagtgattccttctgcactgcgtgtcccatctttgaaaaacaatggagaaaggaagttttaaggaatcaagagaggcaaaaagtaaaggccctcaacaaattggatgaggcactatgccctgggatcatccttactcagtctactgattcaaatgctaatctcttccagaaacagcctcacagacacacccagacatctggtagatggcaaattatcattttctgtgaacacagctcagattttggctggaatggctatggctatgcagtggcacttcttgttgtagtctttttgcaaactctgattcttcagcaatatcaacgttttaacatgctcacctcagcaaaagttaagacagctgtaaatggactgatctacaaaaagctaggatggtcaggaaaagtgtcatggttaatattgcatgatgtgggtcatggaataatggaaggatacattgcatggggtaaaggctctgatgttagaataacttgggagaaaaaaagtacagaaatgcgtacaaggcctgctcagaaaatggccttacttttatcaaatgtttctcgacaaaagttttccactggggaaattattaacttgatgtcagcaactcatggacttgacagcaaacctcaatctcctctggtctgccccttttcaaatcctaatggccgtatatctcctttggcaagagctggattggcagatcattatcgtgtgactcatttacagatcctcaaactttatgcatgggaaccctcctataaaaataagattatcaaaattcgagatcaggaattggaatttcaaaaatcagctaggtatcttactgtattttccatgttgacattaacctgcattccattcttgacaaagatatccctgggccgtttggaagactttctcaacactgaggagcttcttcctcaaagtattgaaacgaactatacaggagatcatgctattgggtttacagatgcttctttctcctgggataaaacaggaatgccagttctaaaagagtcaataagaataagaattgaacaagttcttaatcagctttctctttttgaaacagtagactacccgggctctgtggcttatgtttctcagcaggcctggattcagaattgcattttgcaagaaaacattctctttggctccatcatgaagaaagagttttatgagcaagtattggaagcctgtgctctccttccagatttggagcagttgccaaagggagatcaaactgagattggagaaagagctgtgaatataagtgggggccagcagcatcgagtaagcctggccagagctgtctacagtggggccgacgtctacctcctggatgatcccttgtctgctattgatgttcatgttggaaagcagctttttgaaaaagtgatagggtccttgggccttttgaaaaaccggactcatattttagtgacacacaatctcacacttctgccacaaatgaatcttattgttgtaatgaaaagtggcagaatagctcaaatgggaatataccaggagctgctgtgtaaaaccaaaaatctcactaatttgcaccaagtcatcagtgaacaagaaaaaggtgggagagtgggaagagtctggacgtggcagctgaggtatctgcagatgtacagagcttctgagagtgcaaagtggagcttgggagggggagaagagcagcaaaagccttggctgagactgactcatcaaggactgccatgtcccccagaggaagtctcaggaatccagacattctcatcagatccttgccttccaggtggcttggaaggtgtattggtcagagaaagcaatataatttga

SEQ ID NO: 118605 - DNA, 887 bp, Homo sapiens
gctcacctcagcaaaagttaagacagctgtaaatggactgatctacaaaaaggtgtccctggcaaccttgtgtgtctatttcttactggatgaacgaatcattttaacagcgcctaaagtgttcacatcgatgtctttgtttaatattttaaggattcctctgtttgagttaccaagcgtgatctcagctgtggtccagacaaagatatccctgggccgtttggaagactttctcaacactgaggagcttcttcctcaaagtattgaaacgaactatacaggagatcatgctattgggtttacagatgcttctttctcctgggataaaacaggaatgccagttctaaaagaggctctgaggcttatgtttctcagcaggcctggattcagaattgcattttgcaagaaaacattctctttggctccatcatgaagaaagagttttatgagcaagtattggaagcctgtgctctccttccagatttggagcagttgccaaagggagatcaaactgagattggagaaagagtaaggaaactgtaatttatcatgtagagaaatataatcccattcagctgcgctaataaaatgtttatggcctttttcttgaagtctcgaagagctatacaactataattttaaaaaactattatgcaattcctatgtaagagatggcagtattaaggacaagttattatatataattgactgtctgcaacacagattaaaaatcagtccgaaattctgttgttagtatccacggggggggaataaaagcccaataattagatcatcatacctttgggttggggggctgggcaccaatgccagttcactttcttaagagtgacctaataagttgtggctaattcctggaccctcggtcc

SEQ ID NO: 118606 - DNA, 668 bp, Homo sapiens
attgaaacgaactatacaggagatcatgctattgggtttacagatgcttctttctcctgggataaaacaggaatgccagttctaaaagagagctctgtggcttatgtttctcaacaggcctggattcaaaattgcattttgcaagaaaacattctctttggctccatcatgaagaaagagttttatgagcaagtattggaagcctgtgctctccttccagatttggagcagttgccaaagggagatcaaactgagattggagaaagagtaaggaaacggctgtgaatataagtgggggccagcagcatcgagtaagcctggccagagctgtctacagtggggccgacgtctacctcctggatgatcccttgtctgctattgatgttcatgttggaaagcagctttttgaaaaagtgatagggtccttgggccttttgaaaaaccggacatcgcattctgtttgtcattataccttgctggctgttcctcatctccttgaggtacaaatactgactggcaatttcatccagtctctaggttttaactaccacgaatatgccaataattctaatgcctatatcgtcaacctagacctcttccctggattccagacttgtgtgtacaaactcctatctcctattagatgcctaatatgcaaatcggaatga

SEQ ID NO: 118607 - DNA, 460 bp, Homo sapiens; identical to SEQ ID NO: 117483
  misc_feature (1)...(460): n = a,t,c or g

SEQ ID NO: 118608 - DNA, 515 bp, Homo sapiens
tttgtggtgataactgtgtgtttgaaagctggattggagacatcatattggacatggacaatgagtttagtgactctatacataatacctttggccatatgtggagaaccaaggaacataatgaagctggttggttgctcctaagttcagtggacaaagtaatgaaagaaaatgatgaactcagggattctatctcctggcttcagaagcagatactgagtctcaaatctgctaagattgccctgagtgagagtcttatctcctgcagggaaagagctgaaattgtggaaaaacagacacaagctgttatcatgcgaatggctgacccgcaaggaaaggtgcatgcgcagcctcaacaggtgtctactgttaaagggaggacattgattggaaaagaatgggaccccgcaacttggaatggggacgtgtgggaggaccctgatgaagctggggacactgagtttgtaaactctgatgaaccttttttgccagaagtaacagcttccccatcccca

SEQ ID NO: 118609 - DNA, 852 bp, Homo sapiens
atgccctgcactacctcaggactcgacaaagtccccaccagcaagaaagctctcaccagatatggttatggttccttgaccttagacttctcaggctccataattccatgtaagatgtgcctttcaccttccaccaggattgtgaggccttcccaaccacgtggaactgaggaccctgatgaaactggggacactgagtttgtaaactctgatgaatcctttttgctagaaggaacagcttccccatccccagtagtggcagtatcccctcccagacccatgctaccatcagcctttccacctttgtctgaggacataaaccctgtactgcctgaggcaacagtgctggcctcccctgaggtggttgccaagcaaactcatgttgattctcctcggaagccactctcaacattcctgtttgcttctagacctgtaactaaactaaagtcccggcagacccctggaggtgaggttgacagtgtgacctgtgaggagaagacagatggaccttggagaaagacagtggattattgtaagcttaaccaagtggtaactccaattgcagctcttgtaccagatatggtttcattgcttgtgcaaattaacacatcttctgatacctcgtatgcagccattgacttggcaaaagcctttttctccattcctgtctataaggcccaccagaagcaatttatcttcagctggcaagcccagcaatatacctttactgtcctacctcaagggtatattatctctcccgctttgtgtcataatcttattcggagagccttgatcactttttgcttccacaggatatcacactggtccattacattgatgacattaggctga

SEQ ID NO: 118610 - DNA, 366 bp, Homo sapiens
  misc_feature (1)...(366): n = a,t,c or g
cccagatcctacagagtagggacaccccccacttcccatttcaattctgaagcaaggaagctaggaatgacaggagaggtttaactgatggtacactttataccctcactatcaantctanttttatactaaattaacttagttatgagagctnattttccatctctccaggttgaacttcttcattaggccaatccgtttgcaagtcggcactgtttgatctcanagaggcaaggctgctgctgctgtgctggctgggttccctgaggctcctggccggaggggccatgcgggaggtgcggcttcggcttccacgcggcatcctaggtangcgacggctaggccntncacngccgaantcggnac

SEQ ID NO: 118611 - DNA, 940 bp, Homo sapiens
cggacgcgtgggcggacgcgtgggttccggtctcctcagaagtcgcttagctcttcggtggttgtcacacgtccggaggcctagccgtgcgcgtacctaggatgccgcgtggaagccgaagccgcacctcccgcatggccccttcgggcaagccgggcccccttaaaatgagagcttgaaccaaggcaagcacaagtcgctcagccaccagcaagcggcacccccatctgcagttggctcttctgtctgctgcgccccggcagccagggtctttatggcccagatggcaaccactgcagctggcgtggcttgtggggttctgttgtggggggcacacattgggtcacggcatttactggggggctttcagtgggagggaagttaattgcttgagccttgcgaaggccttgacatcaatttaaccaagggagcttcaggggaacccaagccaagcacagcaagcagcagccagccttgcccctcctatggaggatcaaaaccagtttccgggaagtggtgcccccagaaccccgggtgaccatccaaggcttctgtggagggtttccaatgaggttgctggaaacagtgcccgacttgrcaaacggatttgggcctaaatgaaagaaagttcaacctttggagagattggaaattcagctctcataactaaggttaatttagtataaaactagatttgatagtgagggtataaagtgtaaccatcaggttaaacctctcctgtcgattcctaggcttccttgcttcgagaattgaaatggaagtggggggtgtccctaactactgtagaatctgggacttgggcaaatgttttgtgtggcctccttaaaactagctgtttatgttatgatttttattctttgtgagttaattaggaataaagtcattttcttccaaaaaaaaaaaaaaaaaaagtcgacgc

SEQ ID NO: 118612 - DNA, 10437 bp, Homo sapiens
atgacagttatccgaagtggcattgcttacatactgcatttgaaatcgtatgatgtcaacatccagactggttctaacgcctgtaatcaacccacgcatcctaacggtgactgcagccacttctgcttcccggtgccaaatttccagcgagtgtgtgggtgcccttatggaatgaggctggcttccaatcacttgacatgcgagggggacccaaccaatgaaccacccacagagcagtgtggcttattttccttcccctgtaaaaatggcagatgtgtgcccaattactatctctgtgatggagtcgatgattgtcatgataacagtgatgagcaactatgtggcacacttaataatacctgttcatcttcggcgttcacctgtggccatggggagtgcattcctgcacactggcgctgtgacaaacgcaacgactgtgtggatggcagtgatgagcacaactgccccacccacgcacctgcttcctgccttgacacccaatacacctgtgataatcaccagtgtatctcaaagaactgggtctgtgacacagacaatgattgtggggatggatctgatgaaaagaactgcatattaaactgtactgcttctcaattcaagtgtgccagtggggataaatgtattggcgtcacaaatcgttgtgatggtgtttttgattgcagtgacaactcggatgaagcaggctgtccaaccaggcctcctggtatgtgccactcagatgaatttcagtgccaagaagatggtatctgcatcccgaacttctgggaatgtgatgggcatccagactgcctctatggatctgatgagcacaatgcctgtgtccccaagacttgcccttcatcatatttccactgtgacaacggaaactgcatccacagggcatggctctgtgatcgggacaatgactgcggggatatgagtgatgagaaggactgccctactcagccctttcgctgtcctagttggcaatggcagtgtcttggccataacatctgtgtgaatctgagtgtagtgtgtgatggcatctttgactgccccaatgggacagatgagtccccactttgcaatgggaacagctgctcagatttcaatggtggttgtactcacgagtgtgttcaagagccctttggggctaaatgcctatgtccattgggattcttacttgccaatgattctaagacctgtgaagacatagatgaatgtgatattctaggctcttgtagccagcactgttacaatatgagaggttctttccggtgctcgtgtgatacaggctacatgttagaaagtgatgggaggacttgcaaagttacagcatctgagagtctgctgttacttgtggcaagtcagaacaaaattattgccgacagtgtcacctcccaggtccacaatatctattcattggtcgagaatggttcttacattgtagctgttgattttgattcaattagtggtcgtatcttttggtctgatgcaactcagggtaaaacctggagtgcgtttcaaaatggaacggacagaagagtggtatttgacagtagcatcatcttgactgaaactattgcaatagattgggtaggtcgtaatctttactggacagactatgctctggaaacaattgaagtctccaaaattgatgggagccacaggactgtgctgattagtaaaaacctaacaaatccaagaggactagcattagatcccagaatgaatgagcatctactgttctggtctgactggggccaccaccctcgcatcgagcgagccagcatggacggcagcatgcgcactgtcattgtccaggacaagatcttctggccctgcggcttaactattgactaccccaacagactgctctacttcatggactcctatcttgattacatggacttttgtgattataatggacaccatcggagacaggtgatagccagtgatttgattatacggcacccctatgccctaactctctttgaagactctgtgtactggactgaccgtgctactcgtcgggttatgcgagccaacaagtggcatggagggaaccagtcagttgtaatgtataatattcaatggccccttgggattgttgcggttcatccttcgaaacaaccaaattatgatcaacctttcttaataactgtaaggcaacatataatttttggaatctcccttaatcctgaggtgaagagcaatgatgctatggtccccatagcagggatacagaatggtttagatgttgaatttgatgatgctgagcaatacatctattgggttgaaaatccaggtgaaattcacagagtgaagacagatggcaccaacaggacagtatttgcttctatatctatggtggggccttctatgaacctggccttagattggatttcaagaaacctttattctaccaatcctagaactcagtcaatcgaggttttgacactccacggagatatcagatacagaaaaacattgattgccaatgatgggacagctcttggagttggctttccaattggcataactgttgatcctgctcgtgggaagctgtactggtcagaccaaggaactgacagtggggttcctgccaagatcgccagtgctaacatggatggcacatctgtgaaaactctctttactgggaacctcgaacacctggagtgtgtcactcttgacatcgaagagcagaaactctactgggcagtcactggaagaggagtgattgaaagaggaaacgtggatggaacagatcgaatgatcctggtacaccagctttcccacccctggggaattgcagtccatgattctttcctttattatactgatgaacagtatgaggtcattgaaagagttgataaggccactggggccaacaaaatagtcttgagagataatgttccaaatctgaggggtcttcaagtttatcacagacgcaatgccgccgaatcctcaaatggctgtagcaacaacatgaatgcctgtcagcagatttgcctgcctgtaccaggaggattgttttcctgcgcctgtgccactggatttaaactcaatcctgataatcggtcctgctctccatataactctttcattgttgtttcaatgctgtctgcaatcagaggctttagcttggaattgtcagatcattcagaaaccatggtgccggtggcaggccaaggacgaaacgcactgcatgtggatgtggatgtgtcctctggctttatttattggtgtgattttagcagctcagtggcatctgataatgcgatccgtagaattaaaccagatggatcttctctgatgaacattgtgacacatggaataggagaaaatggagtccggggtattgcagtggattgggtagcaggaaatctttatttcaccaatgcctttgtttctgaaacactgatagaagttctgcggatcaatactacttaccgccgtgttcttcttaaagtcacagtggacatgcctaggcatattgttgtagatcccaagaacagatacctcttctgggctgactatgggcagagaccaaagattgagcgttctttccttgactgtaccaatcgaacagtgcttgtgtcagagggcattgtcacaccacggggcttggcagtggaccgaagtgatggctacgtttattgggttgatgattctttagatataattgcaaggattcgtatcaatggagagaactctgaagtgattcgttatggcagtcgttacccaactccttatggcatcactgtttttgaaaattctatcatatgggtagataggaatttgaaaaagatcttccaagccagcaaggaaccagagaacacagagccacccacagtgataagagacaatatcaactggctaagagatgtgaccatctttgacaagcaagtccagccccggtcaccagcagaggtcaacaacaacccttgcttggaaaacaatggtgggtgctctcatctctgctttgctctgcctggattgcacaccccaaaatgtgactgtgcctttgggaccctgcaaagtgatggcaagaattgtgccatttcaacagaaaatttcctcatctttgccttgtctaattccttgagaagcttacacttggaccctgaaaaccatagcccacctttccaaacaataaatgtggaaagaactgtcatgtctctagactatgacagtgtaagtgatagaatctacttcacacaaaatttagcctctggagttggacagatttcctatgccaccctgtcttcagggatccatactccaactgtcattgcttcaggtatagggactgctgatggcattgcctttgactggattactagaagaatttattacagtgactacctcaaccagatgattaattccatggctgaagatgggtctaaccgcactgtgatagcccgcgttccaaaaccaagagcaattgtgttagatccctgccaagggtacctgtactgggctgactgggatacacatgccaaaatcgagagagccacattgggaggaaacttccgcgtacccattgtgaacagcagtctggtcatgcccagtgggctgactctggactatgaagaggaccttctctactgggtggatgctagtctgcagaggattgaacgcagcactctgacgggcgtggatcgtgaagtcattgtcaatgcagccgttcatgcttttggcttgactctctatggccagtatatttactggactgacttgtacacacaaagaatttaccgagctaacaaatatgacgggtcaggtcagattgcaatgaccacaaatttgctctcccagcccaggggaatcaacactgttgtgaagaaccagaaacaacagtgtaacaatccttgtgaacagtttaatgggggctgcagccatatctgtgcaccaggtccaaatggtgccgagtgccagtgtccacatgagggcaactggtatttggccaacaacaggaagcactgcattgtggacaatggtgaacgatgtggtgcatcttccttcacctgctccaatgggcgctgcatctcggaagagtggaagtgtgataatgacaacgactgtggggatggcagtgatgagatggaaagtgtctgtgcacttcacacctgctcaccgacagccttcacctgtgccaatgggcgatgtgtccaatactcttaccgctgtgattactacaatgactgtggtgatggcagtgatgaggcagggtgcctgttcagggactgcaatgccaccacggagtttatgtgcaataacagaaggtgcatacctcgtgagtttatctgcaatggtgtagacaactgccatgataataacacttcagatgagaaaaattgccccactcacacgtgcagcagcagtgagttccaatgcgcatctgggcgctgtattcctcaacattggtattgtgatcaagaaacagattgttttgatgcctctgatgaacctgcctcttgtggtcactctgagcgaacatgcctagctgatgagttcaagtgtgatggtgggaggtgcatcccaagcgaatggatctgtgacggtgataatgactgtggggatatgagtgacgaggataaaaggcaccagtgtcagaatcaaaactgctcggattccgagtttctctgtgtaaatgacagacctccggacaggaggtgcattccccagtcttgggtctgtgatggcgatgtggattgtactgacggctacgatgagaatcagaattgcaccaggagaacttgctctgaaaatgaattcacctgtggttacggactgtgtatcccaaagatattcaggtgtgaccggcacaatgactgtggtgactatagcgacgagaggggctgcttataccagacttgccaacagaatcagtttacctgtcagaacgggcgctgcattagtaaaaccttcgtctgtgatgaggataatgactgtggagacggatctgatgagctgatgcacctgtgccacaccccagaacccacgtgtccacctcacgagttcaagtgtgacaatgggcgctgcatcgagatgatgaaactctgcaaccacctagatgactgtttggacaacagcgatgagaaaggctgtggcattaatgaatgccatgacccttcaatcagtggctgcgatcacaactgcacagacaccttaaccagtttctattgttcctgtcgtcctggttacaagctcatgtctgacaagcggacttgtgttgatattgatgaatgcacagagatgccttttgtctgtagccagaagtgtgagaatgtaataggctcctacatctgtaagtgtgccccaggctacctccgagaaccagatggaaagacctgccggcaaaacagtaacatcgaaccctatctcatttttagcaaccgttactatttgagaaatttaactatagatggctatttttactccctcatcttggaaggactggacaatgttgtggcattagattttgaccgagtagagaagagattgtattggattgatacacagaggcaagtcattgagagaatgtttctgaataagacaaacaaggagacaatcataaaccacagactaccagctgcagaaagtctggctgtagactgggtttccaggtacctctactgggcagactggggtcaccgcgcatacattgggagagtaggcatggatggaaccaacaagtctgtgataatctccaccaagttagagtggcctaatggcatcaccattgattacaccaatgatctactctactgggcagatgcccacctgggttacatagagtactctgatttggagggccaccatcgacacacggtgtatgatggggcactgcctcaccctttcgctattaccatttttgaagacactatttattggacagattggaatacaaggacagtggaaaagggaaacaaatatgatggatcaaatagacagacactggtgaacacaacacacagaccatttgacatccatgtgtaccatccatataggcagcccattgtgagcaatccctgtggtaccaacaatggtggctgttctcatctctgcctcatcaagccaggaggaaaagggttcacttgcgagtgtccagatgacttccgcacccttcagctgagtggcagcacctactgcatgcccatgtgctccagcacccagttcctgtgcgctaacaatgaaaatgcctctctagcccgtggacagacattgaccttcaaggctccaagggatgggagttttctaggccacgagagagctcatgcatgtcatttcttggaattcagtgttgacttcttctctccagataactgttgcccctggtgctttgctaaagaagtgctgtatgttctctgtgcaggtgcattcctatctggtggaaatgtgatggacagaaagactgctcagatggctctgatgaactggccctttgcccgcagcgcttctgccgactgggacagttccagtgcagtgacggcaactgcaccagcccgcagactttatgcaatgctcaccaaaattgccctgatgggtctgatgaagaccgtcttctttgtgtgcgccaacaaacgttgcatcccagaatcctggcagtgtgacacatttaacgactgtgaggataactcagatgaagacagttcccactgtgccagcaggacctgccggccgggccagtttcggtgtgctaatggccgctgcatcccgcaggcctggaagtgtgatgtggataatgattgtggagaccactcggatgagcccattgaagaatgcatgagctctgcccatctctgtgacaacttcacagaattcagctgcaaaacaaattaccgctgcatcccaaagtgggccgtgtgcaatggtgtagatgactgcagggacaacagtgatgagcaaggctgtgaggagaggacatgccatcctgtgggggatttccgctgtaaaaatcaccactgcatccctcttcgttggcagtgtgatgggcaaaatgactgtggagataactcagatgaggaaaactgtgctccccgggagtgcacagagagcgagtttcgatgtgtcaatcagcagtgcattccctcgcgatggatctgtgaccattacaacgactgtggggacaactcagatgaacgggactgtgagatgaggacctgccatcctgaatattttcagtgtacaagtggacattgtgtacacagtgaactgaaatgcgatggatccgctgactgtttggatgcgtctgatgaagctgattgtcccacacgctttcctgatggtgcatactgccaggctactatgttcgaatgcaaaaaccatgtttgtatcccgccatattggaaatgtgatggcgatgatgactgtggcgatggttcagatgaagaacttcacctgtgcttggatgttccctgtaattcaccaaaccgtttccggtgtgacaacaatcgctgcatttatagtcatgaggtgtgcaatggtgtggatgactgtggagatggaactgatgagacagaggagcactgtagaaaaccgacccctaaaccttgtacagaatatgaatataagtgtggcaatgggcattgcattccacatgacaatgtgtgtgatgatgccgatgactgtggtgactggtccgatgaactgggttgcaatatcaatgaatgtgaacaatttgggacttgtccccagcactgcagaaataccaaaggaagttatgagtgtgtctgtgctgatggcttcacgtctatgagtgaccgccctggaaaacgatgtgcagctgagggtagctctcctttgttgctactgcctgacaatgtccgaattcgaaaatataatctctcatctgagaggttctcagagtatcttcaagatgaggaatatatccaagctgttgattatgattgggatcccaaggacataggcctcagtgttgtgtattacactgtgcgaggggagggctctaggtttggtgctatcaaacgtgcctacatccccaactttgaatccggccgcaataatcttgtgcaggaagttgacctgaaactgaaatacgtaatgcagccagatggaatagcagtggactgggttggaaggcatatttactggtcagatgtcaagaataaacgcattgaggtggctaaacttgatggaaggtacagaaagtggctgatttccactgacctggaccaaccagctgctattgctgtgaatcccaaactagggcttatgttctggactgactggggaaaggaacctaaaatcgagtctgcctggatgaatggagaggaccgcaacatcctggttttcgaggaccttggttggccaactggcctttctatcgattatttgaacaatgaccgaatctactggagtgacttcaaggaggacgttattgaaaccataaaatatgatgggactgataggagagtcattgcaaaggaagtgcccaacctttgcaaacagatctgcagccacctctgccttctgagacctggaggatacagctgtgcctgtccccaaggctccagctttatagaggggagcaccactgagtgtgatgcagccatcgaactgcctatcaacctgccccccccatgcaggtgcatgcacggaggaaattgctattttgatgagactgacctccccaaatgcaagtgtcctagcggctacaccggaaaatattgtgaaatggcgttttcaaaaggcatctctccaggaacaaccgcagtagctgtgctgttgacaatcctcttgatcgtcgtaattggagctctggcaattgcaggattcttccactatagaaggaccggctcccttttgcctgctctgcccaagctgccaagcttaagcagtctcgtcaagccctctgaaaatgggaatggggtgaccttcagatcaggggcagatcttaacatggatattggagtgtctggttttggacctgagactgctattgacaggtcaatggcaatgagtgaagactttgtcatggaaatggggaagcagcccataatatttgaaaacccaatgtactcagccagagacagtgctgtcaaagtggttcagccaatccaggtgactgtatctgaaaatgtggataataagaattatggaagtcccataaacccttctgagatagttccagagacaaacccaacttcaccagctgctgatggaactcaggtgacaaaatggaatctcttcaaacgaaaatctaaacaaactaccaactttgaaaatccaatctatgcacagatggagaacgagcaaaaggaaagtgttgctgcgacaccacctccatcaccttcgctccctgctaagcctaagcctccttcgagaagagacccaactccaacctattctgcaacagaagacacttttaaagacaccgcaaatcttgttaaagaagactctgaagtatag

SEQ ID NO: 118613 - DNA, 852 bp, Homo sapiens
atgggcactggcttggtctttaggccacaggcaggtgttgttgtgggttggcaccgggctttccattgtgttgggttctttaccccggtggcaggggttctgcttgatccagaaccccatgtgctgaggactggttcacctctccagagggaacagagaactaatggaagaacagacctaagcagtctattaccgaacctcaacttcgattctccgcctcgttgtaaacataagaaccagttggctataactttacgaaaacgaatccgcaagctggctactagtctgttctcatcaaccatatttcgcatctctggcaccagtgtaattattagcgctcccggagccgggctgcctctacctgcgctttttccaacgagatgtcaaccgaagttcagtaggtcaatagaccctactggcaaagctgttcaaactgcggatatccggctatctgctagagctacgctatggttaggcggttcgatagaggagagtccggttctgtgttcgactctccgactgctgctgcggcggcttccgccaccccttacctggaccagtccgaacagaccgactcaaccctgtaccgcgcaaacacagaccaaccagagcgtcggaatcgccgcacctagtgcaatacgcgttatttatccagagtcggttgtactcaacgctgttatttatttaccaggagacccagaagtatccgggttgcccagggccttcaaaaggcgttttagtgtcgaagtacggctcgattgtggaaccttcaaactcctattagtttattgtactcatccgggcgataaaaaagtgaatacgtgtaaaactggtgcattggttgcattttag

SEQ ID NO: 118614 - DNA, 477 bp, Homo sapiens
tttttttttttttttttaccaagtacaaaggatttaatcagaaaattatccaatggtgatgtatttgaattcaattatggttaccccctacacagatgtgaactcatagaggaactgaaatccttcctacaaagctacacagtgactgtgacaatggtgatgcacaccaggctactgttcagaatgagtttatggccagtaaactgtggtcaggaaacttactgcaaagtggggactcatctgtcccattggggcagtcaaagatgccatcacacactacactcagattcacacagatgttatggccaagacactgccattgccaacttaggacagcgaaagggctgagtagggcagtccttctcatcactcatatccccgcagtcattgtcccgatcacagagccatgccctgtggatgcagtttccgttgtcacagtggaaatatgatgaagggcaagtcttggggacacaggca

SEQ ID NO: 118615 - DNA, 789 bp, Homo sapiens
atggaaactcatagaagccctggcaggacaagttcaagggcacttgagtacagccctcgaaggcaagcctttgagcagggtaatgtggatattgcagtccgggagcggaggcactggccagattaccctgctcaaagggtggccgtggctggtgctactcgtggactgctggttgcggcggcggttgactggctatcgcaggattcaaagtggctgcaggattcgcacatagtacctgacgtaaaactgtgtgtcgtagccagtgcctaccggcaatcgtatcagtctctgggtaacgatatttcgctaggctatcgatgtcaaccgaagttcagtaggtcaatagaccctactggcaaagctgttcaaactgcggatatccggctatctgctagagctacgctatggttaggcggttcgatagaggagagtccggttctgtgttcgactctccgactgctgctgcggcgcttccgccaccccttacctggaccagtccgaacagaccgactcaaccctgtaccgcgcaaacacagaccaaccagagcgtcggaatcgccgcacctagtgcgaatacgcgttatttatccagagtcggttgtactcaacgctgttatttatttaccaggagacccagaagtatccgggttgcccagggccttcaaaaggcgttttagtgtcgaagtacggctcgattgtggaaccttcaaactcctattagtttattgtactcatccgggcgataaaaaagtgaatacgtgtaaaactggtgcattggttgcattttag

SEQ ID NO: 118616 - DNA, 14392 bp, Homo sapiens
gcagacctaaaggagcgttcgctagcagaggcgctgccggtgcggtgtgctacgcgcgcccacctcccggggaaggaacggcgaggccggggaccgtcgcggagatggatcgcgggccggcagcagtggcgtgcacgctgctcctggctctcgtcgcctgcctagcgccggccagtggccaagaatgtgacagtgcgcattttcgctgtggaagtgggcattgcatccctgcagactggaggtgtgatgggaccaaagactgttcagatgacgcggatgaaattggctgcgctgttgtgacctgccagcagggctatttcaagtgccagagtgagggacaatgcatccccagctcctgggtgtgtgaccaagatcaagactgtgatgatggctcagatgaacgtcaagattgctcacaaagtacatgctcaagtcatcagataacatgctccaatggtcagtgtatcccaagtgaatacaggtgcgaccacgtcagagactgccccgatggagctgatgagaatgactgccagtacccaacatgtgagcagcttacttgtgacaatggggcctgctataacaccagtcagaagtgtgattggaaagttgattgcagggactcctcagatgaaatcaactgcactgagatatgcttgcacaatgagttttcatgtggcaatggagagtgtatccctcgtgcttatgtctgtgaccatgacaatgattgccaagacggcagtgatgaacatgcttgcaactatccgacctgcggtggttaccagttcacttgccccagtggccgatgcatttatcaaaactgggtttgtgatggagaagatgactgtaaagataatggagatgaagatggatgtgaaagcggtcctcatgatgttcataaatgttccccaagagaatggtcttgcccagagtcgggacgatgcatctccatttataaagtttgtgatgggattttagattgcccaggaagagaagatgaaaacaacactagtaccggaaaatactgtagtatgactctgtgctctgccttgaactgccagtaccagtgccatgagacgccgtatggaggagcgtgtttttgtcccccaggttatatcatcaaccacaatgacagccgtacctgtgttgagtttgatgattgccagatatggggaatttgtgaccagaagtgtgaaagccgacctggccgtcacctgtgccactgtgaagaagggtatatcttggagcgtggacagtattgcaaagctaatgattcctttggcgaggcctccattatcttctccaatggtcgggatttgttaattggtgatattcatggaaggagcttccggatcctagtggagtctcagaatcgtggagtggccgtgggtgtggctttccactatcacctgcaaagagttttttggacagacaccgtgcaaaataaggttttttcagttgacattaatggtttaaatatccaagaggttctcaatgtttctgttgaaaccccagagaacctggctgtggactgggttaataataaaatctatctagtggaaaccaaggtcaaccgcatagatatggtaaatttggatggaagctatcgggttacccttataactgaaaacttggggcatcctagaggaattgccgtggacccaactgttggttatttatttttctcagattgggagagcctttctggggaacctaagctggaaagggcattcatggatggcagcaaccgtaaagacttggtgaaaacaaagctgggatggcctgctggggtaactctggatatgatatcgaagcgtgtttactgggttgactctcggtttgattacattgaaactgtaacttatgatggaattcaaaggaagactgtagttcatggaggctccctcattcctcatccctttggagtaagcttatttgaaggtcaggtgttctttacagattggacaaagatggccgtgctgaaggcaaacaagttcacagagaccaacccacaagtgtactaccaggcttccctgaggccctatggagtgactgtttaccattccctcagacagccctatgctaccaatccgtgtaaagataacaatgggggctgtgagcaggtctgtgttctcagccacagaacagataatgatggtttgggtttccgttgcaagtgcacattcggcttccaactggatacagatgagcgccactgcattgctgttcagaatttcctcattttttcatcccaagttgctattcgtgggatcccgttcaccttgtctacccaggaagatgtcatggttccagtttcggggaatccttctttctttgtcgggattgattttgacgcccaggacagcactatctttttttcagatatgtcaaaacacatgatttttaagcaaaagattgatggcacaggaagagaaattctcgcagctaacagggtggaaaatgttgaaagtttggcttttgattggatttcaaagaatctctattggacagactctcattacaagagtatcagtgtcatgaggctagctgataaaacgagacgcacagtagttcagtatttaaataacccacggtcggtggtagttcatccttttgccgggtatctattcttcactgattggttccgtcctgctaaaattatgagagcatggagtgacggatctcacctcttgcctgtaataaacactactcttggatggcccaatggcttggccatcgattgggctgcttcacgattgtactgggtagatgcctattttgataaaattgagcacagcacctttgatggtttagacagaagaagactgggccatatagagcagatgacacatccgtttggacttgccatctttggagagcatttattttttactgactggagactgggtgccattattcgagtcaggaaagcagatggtggagaaatgacagttatccgaagtggcattgcttacatactgcatttgaaatcgtatgatgtcaacatccagactggttctaacgcctgtaatcaacccacgcatcctaacggtgactgcagccacttctgcttcccggtgccaaatttccagcgagtgtgtgggtgcccttatggaatgaggctggcttccaatcacttgacatgcgagggggacccaaccaatgaaccacccacggagcagtgtggcttattttccttcccctgtaaaaatggcagatgtgtgcccaattactatctctgtgatggagtcgatgattgtcatgataacagtgatgagcaactatgtggcacacttaataatacctgttcatcttcggcgttcacctgtggccatggggagtgcattcctgcacactggcgctgtgacaaacgcaacgactgtgtggatggcagtgatgagcacaactgccccacccacgcacctgcttcctgccttgacacccaatacacctgtgataatcaccagtgtatctcaaagaactgggtctgtgacacagacaatgattgtggggatggatctgatgaaaagaactgcaattcgacagagacatgccaacctagtcagtttaattgccccaatcatcgatgtattgacctatcgtttgtctgtgatggtgacaaggattgtgttgatggatctgatgaggttggttgtgtattaaactgtactgcttctcaattcaagtgtgccagtggggataaatgtattggcgtcacaaatcgttgtgatggtgtttttgattgcagtgacaactcggatgaagcgggctgtccaaccaggcctcctggtatgtgccactcagatgaatttcagtgccaagaagatggtatctgcatcccgaacttctgggaatgtgatgggcatccagactgcctctatggatctgatgagcacaatgcctgtgtccccaagacttgcccttcatcatatttccactgtgacaacggaaactgcatccacagggcatggctctgtgatcgggacaatgactgcggggatatgagtgatgagaaggactgccctactcagccctttcgctgtcctagttggcaatggcagtgtcttggccataacatctgtgtgaatctgagtgtagtgtgtgatggcatctttgactgccccaatgggacagatgagtccccactttgcaatgggaacagctgctcagatttcaatggtggttgtactcacgagtgtgttcaagagccctttggggctaaatgcctatgtccattgggattcttacttgccaatgattctaagacctgtgaagacatagatgaatgtgatattctaggctcttgtagccagcactgttacaatatgagaggttctttccggtgctcgtgtgatacaggctacatgttagaaagtgatgggaggacttgcaaagttacagcatctgagagtctgctgttacttgtggcaagtcagaacaaaattattgccgacagtgtcacctcccaggtccacaatatctattcattggtcgagaatggttcttacattgtagctgttgattttgattcaattagtggtcgtatcttttggtctgatgcaactcagggtaaaacctggagtgcgtttcaaaatggaacggacagaagagtggtatttgacagtagcatcatcttgactgaaactattgcaatagattgggtaggtcgtaatctttactggacagactatgctctggaaacaattgaagtctccaaaattgatgggagccacaggactgtgctgattagtaaaaacctaacaaatccaagaggactagcattagatcccagaatgaatgagcatctactgttctggtctgactggggccaccaccctcgcatcgagcgagccagcatggacggcagcatgcgcactgtcattgtccaggacaagatcttctggccctgcggcttaactattgactaccccaacagactgctctacttcatggactcctatcttgattacatggacttttgcgattataatggacaccatcggagacaggtgatagccagtgatttgattatacggcacccctatgccctaactctctttgaagactctgtgtactggactgaccgtgctactcgtcgggttatgcgagccaacaagtggcatggagggaaccagtcagttgtaatgtataatattcaatggccccttgggattgttgcggttcatccttcgaaacaaccaaattccgtgaatccatgtgccttttcccgctgcagccatctctgcctgctttcctcacaggggcctcatttttactcctgtgtttgtccttcaggatggagtctgtctcctgatctcctgaattgcttgagagatgatcaacctttcttaataactgtaaggcaacatataatttttggaatctcccttaatcctgaggtgaagagcaatgatgctatggtccccatagcagggatacagaatggtttagatgttgaatttgatgatgctgagcaatacatctattgggttgaaaatccaggtgaaattcacagagtgaagacagatggcaccaacaggacagtatttgcttctatatctatggtggggccttctatgaacctggccttagattggatttcaagaaacctttattctaccaatcctagaactcagtcaatcgaggttttgacactccacggagatatcagatacagaaaaacattgattgccaatgatgggacagctcttggagttggctttccaattggcataactgttgatcctgctcgtgggaagctgtactggtcagaccaaggaactgacagtggggttcctgccaagatcgccagtgctaacatggatggcacatctgtgaaaactctctttactgggaacctcgaacacctggagtgtgtcactcttgacatcgaagagcagaaactctactgggcagtcactggaagaggagtgattgaaagaggaaacgtggatggaacagatcggatgatcctggtacaccagctttcccacccctggggaattgcagtccatgattctttcctttattatactgatgaacagtatgaggtcattgaaagagttgataaggccactggggccaacaaaatagtcttgagagataatgttccaaatctgaggggtcttcaagtttatcacagacgcaatgccgccgaatcctcaaatggctgtagcaacaacatgaatgcctgtcagcagatttgcctgcctgtaccaggaggattgttttcctgcgcctgtgccactggatttaaactcaatcctgataatcggtcctgctctccatataactctttcattgttgtttcaatgctgtctgcaatcagaggctttagcttggaattgtcagatcattcagaaaccatggtgccggtggcaggccaaggacgaaacgcactgcatgtggatgtggatgtgtcctctggctttatttattggtgtgattttagcagctcagtggcatctgataatgcgatccgtagaattaaaccagatggatcttctctgatgaacattgtgacacatggaataggagaaaatggagtccggggtattgcagtggattgggtagcaggaaatctttatttcaccaatgcctttgtttctgaaacactgatagaagttctgcggatcaatactacttaccgccgtgttcttcttaaagtcacagtggacatgcctaggcatattgttgtagatcccaagaacagatacctcttctgggctgactatgggcagagaccaaagattgagcgttctttccttgactgtaccaatcgaacagtgcttgtgtcagagggcattgtcacaccacggggcttggcagtggaccgaagtgatggctacgtttattgggttgatgattctttagatataattgcaaggattcgtatcaatggagagaactctgaagtgattcgttatggcagtcgttacccaactccttatggcatcactgtttttgaaaattctatcatatgggtagataggaatttgaaaaagatcttccaagccagcaaggaaccagagaacacagagccacccacagtgataagagacaatatcaactggctaagagatgtgaccatctttgacaagcaagtccagccccggtcaccagcagaggtcaacaacaacccttgcttggaaaacaatggtgggtgctctcatctctgctttgctctgcctggattgcacaccccaaaatgtgactgtgcctttgggaccctgcaaagtgatggcaagaattgtgccatttcaacagaaaatttcctcatctttgccttgtctaattccttgagaagcttacacttggaccctgaaaaccatagcccacctttccaaacaataaatgtggaaagaactgtcatgtctctagactatgacagtgtaagtgatagaatctacttcacacaaaatttagcctctggagttggacagatttcctatgccaccctgtcttcagggatccatactccaactgtcattgcttcaggtatagggactgctgatggcattgcctttgactggattactagaagaatttattacagtgactacctcaaccagatgattaattccatggctgaagatgggtctaaccgcactgtgatagcccgcgttccaaaaccaagagcaattgtgttagatccctgccaagggtacctgtactgggctgactgggatacacatgccaaaatcgagagagccacattgggaggaaacttccgggtacccattgtgaacagcagtctggtcatgcccagtgggctgactctggactatgaagaggaccttctctactgggtggatgctagtctgcagaggattgaacgcagcactctgacgggcgtggatcgtgaagtcattgtcaatgcagccgttcatgcttttggcttgactctctatggccagtatatttactggactgacttgtacacacaaagaatttaccgagctaacaaatatgacgggtcaggtcagattgcaatgaccacaaatttgctctcccagcccaggggaatcaacactgttgtgaagaaccagaaacaacagtgtaacaatccttgtgaacagtttaatgggggctgcagccatatctgtgcaccaggtccaaatggtgccgagtgccagtgtccacatgagggcaactggtatttggccaacaacaggaagcactgcattgtggacaatggtgaacgatgtggtgcatcttccttcacctgctccaatgggcgctgcatctcggaagagtggaagtgtgataatgacaacgactgtggggatggcagtgatgagatggaaagtgtctgtgcacttcacacctgctcaccgacagccttcacctgtgccaatgggcgatgtgtccaatactcttaccgctgtgattactacaatgactgtggtgatggcagtgatgaggcagggtgcctgttcagggactgcaatgccaccacggagtttatgtgcaataacagaaggtgcatacctcgtgagtttatctgcaatggtgtagacaactgccatgataataacacttcagatgagaaaaattgccctgatcgcacttgccagtctggatacacaaaatgtcataattcaaatatttgtattcctcgcgtttatttgtgtgacggagacaatgactgtggagataacagtgatgaaaaccctacttattgcaccactcacacatgcagcagcagtgagttccaatgcgcatctgggcgctgtattcctcaacattggtattgtgatcaagaaacagattgttttgatgcctctgatgaacctgcctcttgtggtcactctgagcgaacatgcctagctgatgagttcaagtgtgatggtgggaggtgcatcccaagcgaatggatctgtgacggtgataatgactgtggggatatgagtgacgaggataaaaggcaccagtgtcagaatcaaaactgctcggattccgagtttctctgtgtaaatgacagacctccggacaggaggtgcattccccagtcttgggtctgtgatggcgatgtggattgtactgacggctacgatgagaatcagaattgcaccaggagaacttgctctgaaaatgaattcacctgtggttacggactgtgtatcccaaagatattcaggtgtgaccggcacaatgactgtggtgactatagcgacgagaggggctgcttataccagacttgccaacagaatcagtttacctgtcagaacgggcgctgcattagtaaaaccttcgtctgtgatgaggataatgactgtggagacggatctgatgagctgatgcacctgtgccacaccccagaacccacgtgtccacctcacgagttcaagtgtgacaatgggcgctgcatcgagatgatgaaactctgcaaccacctagatgactgtttggacaacagcgatgagaaaggctgtggcattaatgaatgccatgacccttcaatcagtggctgcgatcacaactgcacagacaccttaaccagtttctattgttcctgtcgtcctggttacaagctcatgtctgacaagcggacttgtgttgatattgatgaatgcacagagatgccttttgtctgtagccagaagtgtgagaatgtaataggctcctacatctgtaagtgtgccccaggctacctccgagaaccagatggaaagacctgccggcaaaacagtaacatcgaaccctatctcatttttagcaaccgttactatttgagaaatttaactatagatggctatttttactccctcatcttggaaggactggacaatgttgtggcattagattttgaccgagtagagaagagattgtattggattgatacacagaggcaagtcattgagagaatgtttctgaataagacaaacaaggagacaatcataaaccacagactaccagctgcagaaagtctggctgtagactgggtttccagaaagctctactggttggatgcccgcctggatggcctctttgtctctgacctcaatggtggacaccgccgcatgctggcccagcactgtgtggatgccaacaacaccttctgctttgataatcccagaggacttgcccttcaccctcaatatgggtacctctactgggcagactggggtcaccgcgcatacattgggagagtaggcatggatggaaccaacaagtctgtgataatctccaccaagttagagtggcctaatggcatcaccattgattacaccaatgatctactctactgggcagatgcccacctgggttacatagagtactctgatttggagggccaccatcgacacacggtgtatgatggggcactgcctcaccctttcgctattaccatttttgaagacactatttattggacagattggaatacaaggacagtggaaaagggaaacaaatatgatggatcaaatagacagacactggtgaacacaacacacagaccatttgacatccatgtgtaccatccatataggcagcccattgtgagcaatccctgtggtaccaacaatggtggctgttctcatctctgcctcatcaagccaggaggaaaagggttcacttgcgagtgtccagatgacttccgcacccttcaactgagtggcagcacctactgcatgcccatgtgctccagcacccagttcctgtgcgctaacaatgaaaagtgcattcctatctggtggaaatgtgatggacagaaagactgctcagatggctctgatgaactggccctttgcccgcagcgcttctgccgactgggacagttccagtgcagtgacggcaactgcaccagcccgcagactttatgcaatgctcaccaaaattgccctgatgggtctgatgaagaccgtcttctttgtgagaatcaccactgtgactccaatgaatggcagtgcgccaacaaacgttgcatcccagaatcctggcagtgtgacacatttaacgactgtgaggataactcagatgaagacagttcccactgtgccagcaggacctgccggccgggccagtttcggtgtgctaatggccgctgcatcccgcaggcctggaagtgtgatgtggataatgattgtggagaccactcggatgagcccattgaagaatgcatgagctctgcccatctctgtgacaacttcacagaattcagctgcaaaacaaattaccgctgcatcccaaagtgggccgtgtgcaatggtgtagatgactgcagggacaacagtgatgagcaaggctgtgaggagaggacatgccatcctgtgggggatttccgctgtaaaaatcaccactgcatccctcttcgttggcagtgtgatgggcaaaatgactgtggagataactcagatgaggaaaactgtgctccccgggagtgcacagagagcgagtttcgatgtgtcaatcagcagtgcattccctcgcgatggatctgtgaccattacaacgactgtggggacaactcagatgaacgggactgtgagatgaggacctgccatcctgaatattttcagtgtacaagtggacattgtgtacacagtgaactgaaatgcgatggatccgctgactgtttggatgcgtctgatgaagctgattgtcccacacgctttcctgatggtgcatactgccaggctactatgttcgaatgcaaaaaccatgtttgtatcccgccatattggaaatgtgatggcgatgatgactgtggcgatggttcagatgaagaacttcacctgtgcttggatgttccctgtaattcaccaaaccgtttccggtgtgacaacaatcgctgcatttatagtcatgaggtgtgcaatggtgtggatgactgtggagatggaactgatgagacagaggagcactgtagaaaaccgacccctaaaccttgtacagaatatgaatataagtgtggcaatgggcattgcattccacatgacaatgtgtgtgatgatgccgatgactgtggtgactggtccgatgaactgggttgcaataaaggaaaagaaagaacatgtgctgaaaatatatgcgagcaaaattgtacccaattaaatgaaggaggatttatctgctcctgtacagctgggttcgaaaccaatgtttttgacagaacctcctgtctagatatcaatgaatgtgaacaatttgggacttgtccccagcactgcagaaataccaaaggaagttatgagtgtgtctgtgctgatggcttcacgtctatgagtgaccgccctggaaaacgatgtgcagctgagggtagctctcctttgttgctactgcctgacaatgtccgaattcgaaaatataatctctcatctgagaggttctcagagtatcttcaagatgaggaatatatccaagctgttgattatgattgggatcccaaggacataggcctcagtgttgtgtattacactgtgcgaggggagggctctaggtttggtgctatcaaacgtgcctacatccccaactttgaatccggccgcaataatcttgtgcaggaagttgacctgaaactgaaatacgtaatgcagccagatggaatagcagtggactgggttggaaggcatatttactggtcagatgtcaagaataaacgcattgaggtggctaaacttgatggaaggtacagaaagtggctgatttccactgacctggaccaaccagctgctattgctgtgaatcccaaactagggcttatgttctggactgactggggaaaggaacctaaaatcgagtctgcctggatgaatggagaggaccgcaacatcctggttttcgaggaccttggttggccaactggcctttctatcgattatttgaacaatgaccgaatctactggagtgacttcaaggaggacgttattgaaaccataaaatatgatgggactgataggagagtcattgcaaaggaagcaatgaacccttacagcctggacatctttgaagaccagttatactggatatctaaggaaaagggagaagtatggaaacaaaataaatttgggcaaggaaagaaagagaaaacgctggtagtgaacccttggctcactcaagttcgaatctttcatcaactcagatacaataagtcagtgcccaacctttgcaaacagatctgcagccacctctgccttctgagacctggaggatacagctgtgcctgtccccaaggctccagctttatagaggggagcaccactgagtgtgatgcagccatcgaactgcctatcaacctgccccccccatgcaggtgcatgcacggaggaaattgctattttgatgagactgacctccccaaatgcaagtgtcctagcggctacaccggaaaatattgtgaaatggcgttttcaaaaggcatctctccaggaacaaccgcagtagctgtgctgttgacaatcctcttgatcgtcgtaattggagctctggcaattgcaggattcttccactatagaaggaccggctcccttttgcctgctctgcccaagctgccaagcttaagcagtctcgtcaagccctctgaaaatgggaatggggtgaccttcagatcaggggcagatcttaacatggatattggagtgtctggttttggacctgagactgctattgacaggtcaatggcaatgagtgaagactttgtcatggaaatggggaagcagcccataatatttgaaaacccaatgtactcagccagagacagtgctgtcaaagtggttcagccaatccaggtgactgtatctgaaaatgtggataataagaattatggaagtcccataaacccttctgagatagttccagagacaaacccaacttcaccagctgctgatggaactcaggtgacaaaatggaatctcttcaaacgaaaatctaaacaaactaccaactttgaaaatccaatctatgcacagatggagaacgagcaaaaggaaagtgttgctgcgacaccacctccatcaccttcgctccctgctaagcctaagcctccttcgagaagagacccaactccaacctattctgcaacagaagacacttttaaagacaccgcaaatcttgttaaagaagactctgaagtatagctataccagctatttagggaataattagaaacacacttttgcacatatattttttacaaacagatgaaaaaagttaacattcagtactttatgaaaaaaatatatttttccctgtttgcctataggtggaggtatcctgtgtgtctttttttacttatgccgtctcatatttttacaaataattatcacaatgtactatatgtatatctttgcactgaagttgtctgaaggtaatactataaatatattgtatatttgtaaattttggaaagattatcctgttactgaatttgctaataaagatgtctgctgaaaaaaaa

SEQ ID NO: 118617 - DNA, 1305 bp, Homo sapiens
atgctccttcagacagcaactgttgactataatataagatacaaagggagaattgtcatgaggacactgctgaaaaacactgtgatagttctcctaccttacaagggttcagggaagctctatggagaaagtagcactgaactgaatgttgaagtattaaactgtactgcttctcaattcaagtgtgccagtggggataaatgtattggcgtcacaaatcgttgtgatggtgtttttgattgcagtgacaactcggatgaagcaggctgtccaaccaggcctcctggtatgtgccactcagatgaatttcagtgccaagaagatggtatctgcatcccgaacttctgggaatgtgatgggcatccagactgcctctatggatctgatgagcacaatgcctgtgtccccaagacttgcccttcatcatatttccactgtgacaacggaaactgcatccacagggcatggctctgtgatcgggacaatgactgcggggatatgagtgatgagaaggactgccctactcagccctttcgctgtcctagttggcaatggcagtgtcttggccataacatctgtgtgaatctgagtgtagtgtgtgatggcatctttgactgccccaatggacagatgagtccccactttgcactggttgcggcggcggttgactggctatcgcaggattcaaagtggctgcaggattcgcacatagtacctgacgtaaaactgtgtgtcgtagccagtgcctaccggcaatcgtatcagtctctgggtaacgatatttcgctaggctatcgatgtcaaccgaagttcagtaggtcaatagaccctactggcaaagctgttcaaactgcggatatccggctatctgctagagctacgctatggttaggcggttcgatagaggagagtccggttctgtgttcgactctccgactgctgctgcggcggcttccgccaccccttacctggaccagtccgaacagaccgactcaaccctgtaccgcgcaaacacagaccaaccagagcgtcggaatcgccgcacctagtgcaatacgcgttatttatccagagtcggttgtactcaacgctgttatttatttaccaggagacccagaagtatccgggttgcccagggccttcaaaaggcgttttagtgtcgaagtacggctcgattgtggaaccttcaaactcctattagtttattgtactcatccgggcgatataaaagtgaatacgtgtaaaactggtgcattggttgcatttaggtgttttttaccaggtaatctccgaagtaaaccttag

SEQ ID NO: 118618 - DNA, 684 bp, Homo sapiens
atgggacctccagatatcatcctggcagtcattgaagactttaagagggacaccaatagcaaaaagatgaatctgggagttggtgcctaccgggatgataacggaaagccttggaccgtccccaaggcagaggcccagattgccacaaaaagtttggacaaggaatacctgtccactgggggactggctgaattttgcaaggcatctgcagaactagcccttggtgagaacagcgaagtcttgaaaagtggccgctggggaaatcacacgcccatcttcagggacactggcatgcagctacaaggttatcggctttatgaccccaagacttgcgattttgacttcacaggcgctgtggagggcctttcaaaaataccagagcaaaatgttgttcttctgcatgcctgcacccacaatcccacgggagtggacccaggtctggaacagtggaaggatacagcaacaatggtgaagaagaagagtctctttgccttctttgacatagcctaccaaggctttaccagtggtgatggtgataaggatgcccgggctgtgcaccacttctttgaacagggcattaatgtttgtctctgccaatcatatgccaagaacatgggcttatattgtgagcgtgtaggagccttcactgtagtatgcaaagatgcgatgaaaccaaaagggtag

SEQ ID NO: 118619 - DNA, 1356 bp, Homo sapiens
atgggcagaaagtacaccttgaaatgggaattcgaggaaggcttcactgagaagaaagaattgaagaaggtgaccagtgaaggatatatcacaccggtcgagatctatgactaccgccagtactgttacgcccttcaacgacccatcgctacgacacagatcgatgacgtacgcgacggccatacgacccggctcgccaaactagaaaagcaagagcaaacacattcaaaagctagcagaaggcaagaaataattaagatcagagcagaaccgaaggaaatagagacacaaaaaacccttcaaaaaattaatgaatccaggagctggttttttgaaaagatcaacaaaattgatagactgctggcaagactaataaagaagaaaagagagaaaaatcaaatagacgcaataaaaaatgataaaggggatatcaccaccaatcccacagaaatacaaactaccatcagagaatactataaacacctctatgcaaataaactagaaaatctagaggaaatggataaattcctccacacatatatcctcccaagactaaaccaggaagaagttgaatctctgaatagaccaataacaggctctgaaattgaggcaataatcaatagcttaccaaccaaaaaaagtccaggaccagatggattcacagccgatttctaccagagtgttggaagttctggccagggcaatcatgcaggagaaggaaataaagggtattcaattaggaaaagaggaagtcaaattgtccctgtttgcagattacatgattgtatatctagaaaacgccatcatctcagcccaaaatctcctcaagctgataagaacttcagcaaagtctcaggatacaaaatcaatgtgcaaaaatcacaagcattcttatacatcaataacagacaaacagagagccaaatcatgagtgaacgcccattcacaattgcctcaaagagaataaaatacctaggaatccaacttacaagggatgtgaagaacctcttcaaggagaactacaaaccactgctcaatgaaataaaagaggatacaaacaaatggaagaaaattccatgctcatgggtaggaagaatcaatatcgtgaaaatggccatactgcccaaggtaatttatagattcaatgccatccccatcaagctaccaatgactttcttcacagaattggaaaaaactactttaaagttcatatggaaccaaaaaagagcctgcatcaccaagtcaatcctaagccaaaagaacaaagctggaggcatcatgctacctgaattcaaactatactccaagggtccagtacccaaacagcatggtactggtaccaaaacagagatatag

SEQ ID NO: 118620 - DNA, 1386 bp, Homo sapiens
atggccaactgcgatatcaacaggaaagacgaaaaaggtggaaaagaaaaaaaagacagatcaaaaagcaaaagcttgatggatacgttaaaaaggcagctttctgccaaacagaagccaaaaggcaaggcgggcaaaccctctgggagctctgccgatgaggacaccttctcctcctcctcagcaccgatagtctttaaagccgtgagagctcagaggccgataaggccacctccctccgcagccatcactgcagtcccatgccatggcctcttcgacccacaaactctgaggagacgtgcatcaagatggagtccgagtccacccctgaatggcgtccgaaaggatttccacgaccttcagtctgagaccgcgtgccaggaacaagccaattcactgaaaagctcggcttctcagaacggagacctgtatcttcgcctggatgaacatgtgcctgtcgttattggacttctgcctcaggactacattcagtatactgtgcctttagatgaggggatgtgtcctttggaaggatcaagtagctattgtctggacagttcttctaccatggaagtctctgtggttccttctcaagtgggagggcgctctttccccgaagatgagagtcaggcagaccagaacctagttgttgccccagagatctttgtggatcagtccatgaatgggttgttgactggcaccacgggagtcatgttgcagagccccagagtgggtccgcatcatgtccctccactctcaccattgctacctccaatgcaaaataatcaaatccaaaggaacttcagtggacttactggcacagaagcccacatggctgaaagtatgctctgtcatttgaattttgattttaactctgctcctggtgttgcaagagtttatgtctcagtgcaaagtagtggtcccatggtagtgacaagccttacagaggagctaaaaagatcttgcaaaacaaggatggctttggccaccactcaagagcgtcaggaggtgtgtgctggccaggcggagtttatacaccaagcagctcaaccaggaggagggaacagagctgaatttgggaagcagctgcctgctatgctgaaaacccctggaaacttgctaaagagctgtggccttcctcacacccatgtcttcagatacccaaggcctttaatacccaagtccttccaggattctgcacatctcattagcttcatattcccagctacgaaggtcacattggctgtcaaaggacatgtcttctggctagaagaagccctggtgaaatcttatgtgatatcggcacctttgcagaaaacttgtacttcatgtaaacaagcacctgacctggccagagactatgagcttcatgggggaaaggagtga

SEQ ID NO: 118621 - DNA, 661 bp, Homo sapiens
attgacctgatcgcctgcggaattccgcacgagccgaactccagatatgcgatggggcaaatcctgaagcgtacatggctatctctcacagctaaagcatccctcacccctatccagcgcttcttacccctggcgcaaggagaatcacctgcggggaggaaaactttcaaaatcccttaaacccaagttgtaaccgcacaactaaatcagaatccttggagctggatctgaaaaaaatacggttgaaagtcgtgcaggtgattacaatgtgtaggcaaaccagaaaaccatggctttaaccagcagcttttgttagaaatgatttctccaatgaatgtagaaacgtttgctgctgaattgtgacctttccattttacctgcttctcctgcaaagtatattttgcagacccaggcagtgctgctcgctctgttcctggttcacccagtgccgtgtgtgctcagtgcatcctgtgcacgggtcactgtgctgtgtgccctggcctgggtgagcatcattcttcggggagaaccttgatgaaaacaaagctgcattccaaaaagttaaaaccatgctacttactgtgttgaagtaaaaattaaaagacccaggggggctcacccaaaagttaaaacgtaaataaatatcttgtaacattaatat

SEQ ID NO: 118622 - DNA, 663 bp, Homo sapiens
tttcttataacaatgtaaacaataataatatctaagtgagataccgttttaatgcatttcaataattattcttccaggaccttcggcaaaaaccttgagtcctgtcctctcgctttcctccccgtacacagcgagctttcaacccacctttgtccgcaccttctcccatcaaactacttacctgtccctgggatctgtcccagtcgcccagctaaagtgctcagcaggtcagcagcgcggcgagcttctatgcaggcgtggggtctggggctcctggatctctgtgtcccatttcacagagattgccaccttacctgccgcctgcttagaagatggggagggacttcaatcttggtggtattctggacagcagcaaatacctgtaaagcatccaaaagaccaacacccacaggatagtggacggcaaagtggtgtctgagaccaacatcacagacgtcttgaggtgctaagccagcagaagcaaggtccctttgcggagcaggagggcaataaaaacttctgtggtcaaaaaaaaaaaaaaaaattaccctcgcatcacagaggtgttttcctcacgcaaacgtaatatagattcattaatacatagatgtggaaattagggcaatttccacaactactcacccagagaggattaaaaaaaaa

SEQ ID NO: 118623 - DNA, 1638 bp, Homo sapiens
atgggctggacctgcaagatcctcttcttggtggcagcagccacaggtgcccacttcctggtgcagctggtgcagtctggggctgaggtgaagaagcctggggcctcagtgaaggtctcctgcaaggcttctggatacaccttcacctactgctacttgcactggagagagcctgtctctttcatctgtggcaggtgcatcctgctgacacttttacttggtgattgtttgtggggtgaaggggcttggacacagggggatgttctccaaccttcggaccgagcctccttcttagctatgggtgtcaacaccacaggacagcaggtgggtgacttgtctggggatttccccaattctgtaggaaaagcctgcaagtgccgggagtttcacactctcacacccttagcacatacatcctcaacaactcatgaaacatttccaggcatgtcccacatcgccctggagctgtctcaggggagcagtctcctccagtgtttagaggcacagacacagggacaacgccaagaactcactgtatctgcaaatgaacagcctgagagccgaggacacggctgtgtattactgtgtgaaacacagagtgaggggaagtcagtgagagcccaggcacaaacctccctgaaggggtcccagaaacgactagggggcgccaggacactgtgcacggggctgtctccagggcagagaaagcaggaaagatctaaaattgacaccctaacatcacaattaaaagaactagagaagcaagagcaaacatattcaaaagctagcagaaggcaagaaataactaagatcagagcagaactgaaagagatagagacacaaaaaacccttcaaaaaatcaatgaatccaggagctggttttttgaaaagatctacaaaattgatagaccactagcaagactaataaagaagaaaagagagaaaaatcaaatagatgcaataaaaaatggtaaaggggatatcaccaccgatcccacagaaatacaaactaccctcagacaatactataaacacctctatgcaaataaactagaaaatctagaaggaatggataaattcctggacgcatacaccctcccaagactaaaccaggaagaagttgaatccctgaatagaccaataacaggccctgaaattgaggcaataattaatagactccaaccaaaaaaagtccaggaccagacagattcacagcggaattctaccagagtgtcggatgttctggccagggcaatcaggcagaagaaagaaataaagtgtattcaattaggaaaagaggaagtcaaattgtccctctttgcagatgacatgattgtatatttagaaatccccatcatctcagcccaaaatctccttaagctaataagcaacttcagcaaagtctcaggatacaaaatcagtgtgcaaaaatcacaagcattcttatacaccaataacagacaaacagagagccaaatcatgagtgaactcccattcacaattgcttcaaagagaataaaatacctaggaatccaacttacaaaggatgtgaaggatctcttcaaggataactgcaaaccactgctcaacgaaataaaagaggatacaaacaaatggaagaacattccatgctcatga

SEQ ID NO: 118624 - DNA, 435 bp, Homo sapiens
atgggtgagacttgggtgttggggacctggccaggcggagggcttcctccccgggccatcgggagccaggcaggggagctaccagcaggcactgaggagcagcccctctcagtcctgcagcgaagccaggcccctgctgcccgggccttcctggacgccgtccgactctaccggcagcaccaaggccactttggcgacgacgacgtgaccctaggctcagacgccgaggtgctgaccgcggtgctgatgcgggagcaacttcccgcgctgcgagcccagacccttcctggcctgcggggggcaggccgcgcccgcgcctgggcctggaccgagtccctgagctcccagcacccacgggctccccacgtgccggtccggtcccaagtgctgtctgaggaccctcttgttgaaccctcaaagccctacatggtgtga

SEQ ID NO: 118625 - DNA, 900 bp, Homo sapiens
atggatttaaactataccttggaacaaatggacttaacagatatatacagaacattccatccaacaaccacagaatacacattctattcaacagggcatggaactttctccaagacagacgatgtgataggccataaaatgagcctcgataaatttaagaaaattgaaatgatatcaaacactgtctcagaccacagtggaataaaactggaaatcaactccgaaaggaaccttgaaaaccatgcaaatacatggaaattaaataacctgctcctgaatgagtgctgggtcaaaaacaaaatgaagatggaaattaaaaaattatttgaactgaatgacaataatgatacaacctatcacaacctctgggatagagcaaaggtggtgataagaggaaagtgcatagccctaaacacctacatcaaaaagtctgaaagagcacaaacagacaatctaagaattaaaaacaaaaatcacatgatcatctcaatagatgcagaaaaagcattcgacaaaatccagcatccctttatgattaaaactctcagcaaaatcagcatacgagggacctaccttaacctaataaaagacatctatgacaaacccacagccaacataatgctgaatggggaaaaattgaaagcattcactctgagaactggaacagaggatgaaccaagggtgcccactcccatcactcctcttcaacatatactggaagtcctagccagagcaatcagacaagagaaagaaataaagggcatccaaattggtaaagaggaagtcaaagtgtcactgtttgctgactatgtgatcgtttactttgaaaacccaacggactcctctagaaagctcctagaactgataaaagaattcagcagtttctggatacaagattaa

SEQ ID NO: 118626 - DNA, 1464 bp, Homo sapiens
atggtcaccttgatgggacatgcagcactgtgcctgcattatgtcatgcaactaggcaccacaggaggggcctggtatttccccagagcctcctcccaggccagggagatgccacagtgcccgactttggaaagccaggaaggggaaaactccgaagagaagggggacagttccaaagaagatccaaaagaaaccgtcgcgctggcttttgtgagagagaacccaggggcacaaaacggacttcagaatgcccagcagcaaggcaagaagaagaggaagaaaaagaggatcatcattatatcaggcaaggtccttgaagattttctagccttagccatgcattttgctgatgaggaaacaggccagaaaaggtgtagtcttaatcagactattcaactcctcatcaccccagacactggtagtatctggcaccaggcctttctttcttcaatagtgcgcagggctgcccaacagtacggctttagagagggaggggaagacgatgactggactctctattggacagattactcagtgtcactggagcgggtgatggaaatgaaaagttaccagaagatcaatcacttccccgggatgagtgaaatctgccggaaggacttgctggccaggaacatgagccgcatgttaaagatgttccctaaagatttccgctttttccctaggacctggtgtcttcctgctgaccccgcgcagctggacctctggagccagacgttctggccgcgcccgcgcacggcgcccgacggcaccggcgcggatgggctgggactgcggcttggctcgctgggcaagggagtttctggtttccagcatgccatggcctcgggtgaccagaagccagctacactgcctcctggcctgtggttcccttccaggaagctctccaccttcagtgcatacttggaggaccacagctacaacgtggagcagatatggagggatattgaggacgtcatcatcaagaccctcatctcggcccaccccatcatcaggcataactaccacacctgcttccccaaccacacactcaacagcgcctgctttgagatcctgggctttgacattttgttggaccacaaactcaaaccctggctgctggagactgaaaaaatgcagaccgccggggcattattcatttctccagctctgccttcctacagcaacttcccactccaggtggccagacgggagttccagaccagtgttgtctcccgggacattgacacagcagccaagtttattggtgctggggcagccacagttggtgtggctggttcaagggctggcattggaaccgtgtttggcagcttgatcattggctatgccaggaacccgtctctcaagcagcagctcttctcctatgccattcttggctttgccctgtctgaggccatggggcttttctgtttgatggtcgccttcctcatcctcttcgccatgtga

SEQ ID NO: 118627 - DNA, 569 bp, Homo sapiens
agcgttgcgacggacctcccgaatcgacccacgcgtccgaagggctgaagctgggagactgaaaaaatgcagaccgccggggcattattcatttctccagctctgatccgctgttgtaccaggggtctaatcaggcctgtgtctgcctccttcttgaatagcccagtgaattcatctaaacagccttcctacagcaacttcccactccaggtggccagacgggagttccagaccagtgttgtctcccgggacattgacacagcagccaagtttattggtgctggggcagccacagttggtgtggctggttcaggggctggcattggaaccgtgtttggcagcttgatcattggctatgccaggtaagtttgggtggtctacagcatctcccactgtaaattccaccccgtttggggaagcctcagctggaggagctcccttcaggagccttcaggttgatttcatctacatcatagtttctccagagaaaacatgcatccagcctggctcacttaaacttaccaggttggtccactctgcttgtccatccaaatccccaggatctgtgc

SEQ ID NO: 118628 - DNA, 637 bp, Homo sapiens
ggggaagctgagggctgagaccaagggctaaagctgggaggtgagtctgtcaccttgagccgggcgagcgctgtgggccaagcaggggttgcagggcagtaggagtgcagactgaaaaaatgcagaccgccggggcattattcatttctccagctctgatccgctgttgtaccaggggtctaatcaggcctgtgtctgcctccttcttgaatagcccagtgaattcatctaaacagccttcctacagcaacttcccactccaggtggccagacgggagttccagaccagtgttgtctcccgggacattgacacagcagccaagtttattgggtgctgggtcagccacagttggtgtggctgattcaggggctggcattggagcggtgtttggcagcttgattattgtctatgccaggaagctgtctctcaagcagcaactcctcttctatgccattcttggcttttgccctgtctgagggcatgtgggcttttctgtttgatggtcgccttcctcatcctcttcgccatgtgaggctccatggggggtcacctgcctgtccctgcagcagcaactccgcgccattcctggtgctggggtgtgctaagctttaccattaaacacaacgtttctctaaa

SEQ ID NO: 118629 - DNA, 686 bp, Homo sapiens
agggggcggcgagtggaagctgcctgggtgtgtaccgcaccgatctgggccccggtggctgcacagcttccctgagcctcagtttccctacctgtgagactggtacagcagatctcaccctaaagagctgtgggagggttcgaagaagaaaagtattaaccacagcgcctgctccctgcaggcacatggcgggcccatctccacctccctgaacccccacagcaagccccgcgggagagtatcacccccgccagggaagaggcaacaagaatgcagagcccggcccgggcgctctcccgagctcgcgggtcctccgccggccaacgttcaggaaacaagccagaaaaatgcgtgcgcttcccgcctttctgagccgccgggcgagggtcccgcagcccgccgctcacccacagccgcaccgcggatccagctccggtccttgttcccggggcggctaccgacaacccctatttccgggtccagccgcttctggcgtccccgcgtccggttccgtggctcgcggattccgggagcaccccagggagtggcacttgcacgccgcggaccgcagggatccccaagccctgcacccagattcttccccgccacggagagacaatcatgacaattatcattacaatgattatgaaaactggcatgaaaacatttatgctgttaataattaa

SEQ ID NO: 118630 - DNA, 627 bp, Homo sapiens
atggctgaagataaaagcaagagagactccatcgagatgagtatgaagggatgccagacaaacaacgggtttgtccataatgaagacattctggagcagaccccggatccaggaagctcaacagacaacctgaagcacagcaccaggggcatccttggctcccaggagcccgacttcaagggcgtccagctaatgcggggatgcccaaggagcagctcactgtcacagacaccgcacagctcaccatcacaggcaccgcacagctcaccgtcacaggcaccgcacagctcaccgtcacaggcaccgcacagctcaccgtcacagacaccgcacagctcagtcacaggcactgcacagctcagtcacagacaccgcacagctcagtcacaggcaccgcacagctcaccgtcacagacaccgcacagctcaccgtcacagacagtgcacagctcagtcacagacaccgcacagctcaccgtcacagacaccgcacagctcaccgtcacaggcaccgcacagctcaccgtcacaggcaccgcacagctcaccgtcacaggcaccgcacagctcaccgtcacaggcaccgtacagctcactgtcacaggtggcggggcaacttggagctag

SEQ ID NO: 118631 - DNA, 363 bp, Homo sapiens
ctttagccccggctcccagtgctgcgtggaggacgggcctgaaagcattgactccatcatcgacatggatgctgtgtgcaagcgagtcaccacgttgggtctggatgtgtcggtgaccatctcgcaggatgccggcaggaaaaaacccttccctgccaaaggtgactgtgttttctgccgccgaaggagggcccggtccctccaggctcagtgtggcttctccctgacccccgccctagaacttttgccagtgccttttctgaaactcctgtgtcccgggccccccaggcggagaaggatatgccggattctgcctggggctgggctttaggagaccccaaatttgacaccacagaaagcaaa

SEQ ID NO: 118632 - DNA, 1027 bp, Homo sapiens
atggcgccagtattgtcttggttcatcgttgtagatgcggttgctgcgtacaaattggccaatgagcctgctttggcaagagacaccccagatggccccgagccccggagctccccagcccttaacacccacctgcacctcctcggaagagaaacacagccagtgccccagtccaccctgagagatggggaaactgaggctcgtaaaggaaccaaggacgtcatgtggccttcccctatctcccgatgtcccggatacccgatgtgcctccacattctcagttgtgccatacttggtgtcttgttttctttggtatatcagggttgtaggcttgggtggtcggataatacggccctcacaaggtgcctggagctagaaaagctaggccttggcgacagcgtggacctgcatgtgtacgagattccggttgagtaccaaacagtccagagactcatccccgccctgtgggagaagcacagtccacagctggtggtgcatgtgggggtgtcaggcatggcgaccacagtcacactggagaaatgtggacacaacaagggctacaaggggctggacaactgccgcttttgccccggctcccagtgctgcgtggaggacgggcctgaaagcattgactccatcatcgacatggatgctgtgtgcaagcgagtcaccacgttgggcctggatgtgtcggtgaccatctcgcaggatgccggcagccttggaagtcagaagtccaaggtcaaggtggtagcaggactggttccttctggaggtgctgagggaaaaaacccttccctgccaaaggtgactgtgttttctgccgccgaaggagggcccggtccctccaggctcagtgtggcttctccctgacccccgccctagaacttttgccagtgccttttctgaaactcctgtgtcccgggccccccaggcggagaaggatatgccggattctgcctggggctgggctctaggagaccccaaatttgacaccacagaaagcaaataaaacacttgaaatacg

SEQ ID NO: 118633 - DNA, 510 bp, Homo sapiens
ccggtcccccatcccgggtcgacgatttcgtggctgcagcggcagcagctgtcgcgccagtcgtattatatgcatgtccgaggcacagcccgatcccgccatggagcatccgaggaaggcgggtggtagtgacgggatttggcccttttggggaacacaccgtgaacgccaattggattgcagttcaggagctagaaaagctaggccttggcgacagcgtggacctgcatgtgtacgagattccggttgagtaccaaacagtccagagactcatccccgccctgtgggagaagcacagtccacagctgggtggtgcatgtgggggtgtcaggcatggcgaccacagtcacactggagaaatgtggacacaacaagggctacaaggggctggacaactgccgcttttgccccggctcccagtgctgcgtggaggacgggcctgaaagcattgactccatcatcgacatggatgctgtgtgcaagcgagtcaccacgttgggccagtgtatt

SEQ ID NO: 118634 - DNA, 285 bp, Homo sapiens
atggctccgggggctctgcctgcacttggggaagaggaaggacccggcgcgagcggcctctcggctgagctggggcatctgagcgcgggctcgcgggctttccgggagaccagtgtggacagcgccctggacacgcccttcccagctggaacatttgtgaggctggaatttaagctccggcagacagagaagcggccggaggaaagactggaagaaacccaagtgcaaagtccagcccgagaggaggaagcagaaatgcctgacctgcgtcaaactggaatgtga

SEQ ID NO: 118635 - DNA, 228 bp, Homo sapiens
atggagaaaaaacaaaacaagaagaaagtggaggaggtgttagaagaggaggaacaggaatatgtggtggaaaaagttctctaccgtcgattggtaaagggcaaagtggagtacctcctaaagtggaagggattctcagatgaggacaacacatgggagtcagaagagaacttggattgccctgccctcatgagtttctgccgtcccagaaaccagcccatgagatag

SEQ ID NO: 118636 - DNA, 801 bp, Homo sapiens
atggggctagagaggccggtggacagggtaatgtggcttcctggggctttgtggaacagcgctgtggtctcagcacctgtgggagaagagtgggcactggcaggaactggcaaccaaggattacaagatattcagggaatgcattgcccagaggaaggtataagccagatccacggcagagaccacaggaatgcgaaggacagccatactggtgtgtggtgctcatgcaccctggggataatttctaccataataataaggcctaaatgtcgatttagcatagatcgcagtgattctgactacttgcccacatccagctgccggcgggaccctggtggcgctgagccctgccaggacaggccccgggtggagcagctctgcagtgttctggcaaaccgctccgggcccttggccaagtgccactggtatgagagccccgtgtcctacacgcaggtgtgtgtctctgacctctgccagtatggcacgggcaaccgcatgctgtgcaccatgctggaggcctacgtccaactctgcgccctgcgctgcgcgttgcctgcccgcgtggcgagccagcctgggatgcagttacgtgtggcgtgtccagccaacagctactatgactcctgtgggccacccttcccggccacctgtgctagcctcaactcctccgcgccctgcaccctccagtgcacagtgagctgcttctgcctcgagggctttgccctggaggcgggcatcttcggtgccccacgcttgctgcggctgccacctgcagggccgctatatccgcctgggtactga

SEQ ID NO: 118637 - DNA, 240 bp, Homo sapiens
atgtggaccgcggatgagattgctcagctatgctatgaacactatgggatcaggctgcccaagaaggggaagcctgagccaaaccatgagtggacattattggcagcggtggtgaagatacaatctccagctgacaaggcctgcgacacccctgataagccggtgcaagtgacaaaggaagttgtgtcaatgggaacaggaccaaatggtaggacagtccatactgaggaagaacggtag

SEQ ID NO: 118638 - DNA, 230 bp, Homo sapiens
cacttctcagggcctctttcatctgtgctcttccaggatgctgcctcttactccctgggcacctcggcctggtcccagcaggtatgggcagttgcttgaggctccagacatactcacctctacctcgaccacatcaaccccatcaccaagaggaggttcagggaagctgcattttgtggtcttgtcctcccagtccagggtggtagtgctgggctgttcccagcctccca

SEQ ID NO: 118639 - DNA, 3000 bp, Homo sapiens
caggccacaccggtggtctgggctggggaccgcgggtcgggtccggtttccagggggttcctggtgctcgaggctggcggcgaggaaggaccagatggcctttgaggatgtggctgtgtacttctcccaggaggagtgggggctcctggacacagcccagagggccctgtaccgccgcgtgatgctagacaacttcgcacttgtggcctcgctgggactctccacctctcgacctcgtgtggtcatccaactggagcgtggcgaggagccctgggttcccagtggaacggacacaaccctgtccaggaccacctacaggaggcgcaaccctggttcctggagtttgacagaggatagagatgtttctggagaatggccacgagctttcccagataccccacctgggatgactactagcgtcttccctgttgccggtgcctgccacagtgtaaaaagcctgcagagacaacggggtgcctccccatctcgggagagaaaacccacgggggtgtcggtgatctactgggagaggctcctgctaggctcaggcagtgggcaagccagcgtcagcctgcgactgacctccccgcttaggcctcccgagggcgtccggcttagggaaaagacactcacagagcatgcgttgctggggaggcagcccaggacgcctgagcggcagaaaccatgtgcacaggaggtccctgggagaacctttgggagcgcccaggacctggaggctgccggcggtcggggacatcaccgaatgggtgcagtttggcaggagcctcatagactcctcggtggccaggagccctcgacctgggacgagctgggcgaggctcttcacgctggggagaagtccttcgaatgcagggcgtgcagcaaagtgttcgtgaagagctccgacctcctcaagcacctacgcacccacaccggggagcggccctacgagtgcgcccagtgcggcaaggccttcagccagacgtcgcacttgacgcagcaccagcgcatccacagcggcgagacgccctacgcgtgccccgtgtgcggcaaggccttccggcatagctcctcgctggtgcggcaccagcgcatccacacggccgagaagtccttccgctgctccgagtgcggcaaggccttcagccacggctccaacctcagccagcaccgcaagatccacgcgggtgggcgtccttatgcttgcgcacagtgtggccgccgcttctgccgcaactcgcacctgatccagcacgagcgtacgcacacaggcgagaagcccttcgtgtgcgcgctctgcggtgctgccttcagccagggctcctcgctctttaagcaccagcgcgtgcacacaggcgagaagcccttcgcctgcccacagtgcggccgcgcctttagccacagctccaacctcacccagcaccagctcctgcacacgggcgagcggcccttccgctgcgtggactgtggcaaggccttcgccaagggcgccgtgctgctcagccaccggcgcattcacacgggcgagaagcccttcgtgtgtacgcagtgtggccgcgccttccgtgagcgcccggccctcttccaccaccagaggatccataccggcgagaagaccgtccggcgatccagggccagcctgcacccccaggccaggtctgttgccggggcatcatcagaaggtgcgccagcgaaggaaaccgagcccactcccgcctcgggcccagccgccgtctcgcagccagcggaggtctgaggtcacaggttgcagccctggccttctgtgaatcccttccacagctaaagggcatatgtcctctgcagatccacagcagagaaaaagtcccgtgcttgctagtcagggacaagggaggccctttggctgtgatttcatttgcacgtggggacaggatttgccagttcacccacagatcacacctccatccccaaagaggtagcactgcagcaacatcagggggaggacgtggtggctgaactctagtggggccgagactattcagagccagtaggaggccgacagtcacagcactgcactgtggtgcggcttcatgtgatatgacagtggatgctaaggtgagagggatgcaggcatgggttgggggtggcccagagaaacttatgacagctgtacacaaactggccgctggagagatgcccgctgagggtattctcccctcaacccactgcctctgttcatccaagacttcctaggggccagcctagcagacaagagaccacaagggactggggatcagggtctgggctctgtcagccgccacctctgggaaagagaaaaggtttgggtccactgaacatcatgtttgtagacgctgacaggtggggtcctaatgagagccaacacatgctcactgccagctcctgtcctgagtactgggaagtttctcctgaagccctgtgagatggctctgtggctggtatcccgacttggaagatgaggaaactgaggcacacggcctggcctggcttcacacacatagccgactcaggagagggatgcccatgggggaacatgtgactctcagcattggaaggacagagctaggatgatggctttccggtggcactcgttcaggtttttgcccaagtctcagcttggccaaggcctgtcactgactggtttaccaaagtcgatgtgaggaggaggctttatacctgaggggatgatgttaacttcagacaagatggagctgctcacttttgccgggtttggtggccacttcacccccaaccctgtctcacccccattatccctcctcaattggaggctggacagagctgaataggaaagacttgctattgcctaaggctatgtgtgacaccctcctgaggacctccccaccccagtgtaatggcccttcatggcagggacagaaaggtggactgggggccatttgcttcctgtggccttcagcagaccaggccctgtccctacctggagcctcacctccaaggaaattc

SEQ ID NO: 118640 - DNA, 1084 bp, Homo sapiens
tactccaaaaggtggaattcggctggggctggccaagctgggctgcccaacagcctggatcaacccgtatggtcgggggatgcccctggcgcactctgtgctgagctctggggcccgggtgctggtggtggacccagacctccgggagagcctggaggagatccttcccaagctgcaggctgagaacatccgctgcttctacctcagccatacctcccctacaccaggggtgggggctctgggggctgccctggatgcagcgccctcccacccagtgcctgctgacctgcgtgctgggatcacatggagaagccctgccctcttcatctatacctcggggaccactggcctcccgaagccagccatcctcacgcatgagcgggtactgcagatgagcaagatgctggccttatctggggccacagctgatgatgtggttgtacaccgaggtcctgcctctgtaccacgtgatgggacttgtcgttgggatcctcggctgcttagatctcggcacttccctcgcgagttatggtcttcgggtgtattttatcctatggtctgtgctcggcccatcgcgtcgcacgctgtgtctttaattgtggtgtgggttattggtttgagtaagcctgagggtactgcactgtacgagcatggcttcagaatctgcttcttgctaggttctcaagaagcttacaatcatggcagaaggtgtgagccacagcacctggccaaccaacacttctcagggcctctttcatctgtgctcttccaggatgctgcctcttactccctgggcacctcggcctggtcccagcaggaccagatggcctttgaggatgtggctgtgtacttctcccaggaggagtgggggctcctggacacagcccagagggccctggactctccacctctcgacctcgtgtggtcatccaactggagcgtggcgaggagccctgggttcccagtggaacggacacaaccctgtccaggaccacctacaggaggcgcaaccctgcccctcctggaggctgcagccttagctgcccttgaaggtggagctccaagggcacaggagcggggttga

SEQ ID NO: 118641 - DNA, 576 bp, Homo sapiens
atgggtgagaagaagaagaaaggaagaagaagaagaaagaagaagaaggaggaggaggagggagaggaggagggaggggggatgggtgagaagaagaagaaggaggaggaggaggagggagaggaggagggagagaaagaaagagagaaagaaagagacaaaagagagaaagaaaaagaaagaagaaagaaaagaaaaagaaagagaaagaaagaaaaagagagaaagaaagaaagagaaagaaagggaaaggaaggaaggggagggagagagggaaagaaaatcaacagagtgcacttcttccagttatataaaaaaaagttagttgtaaaacagccacaggcagctccctcaggagaaattccagaagaaggcattgctgtcttagggggtgacagctccatgcctgttattgtccccgaagaccttccagtaggacaagatgtggaagtggaagacagtgatattaatgatcctgactccctgatcttggtgtcatcccaggctggaggcggtggtgtgatcacagcttactgtaaccttgagcacctaggctctagtgatcctcctacctga

SEQ ID NO: 118642 - DNA, 297 bp, Homo sapiens
atttatgccaccaactctgccgaggtttgtcaatatgtcatcactcatgccaaagtgaacatcttgctggttgagaatgatcaacagttacagaaaatcctttcgattccacagagcagcctagagcccctaaaagcgatcatccagtacagactgccaatgaagaagaacaacaacttgtactcttgggatgatttcatggaacttggcagaagtatccctgacacccaactggagcaggtcatcgagagccagaaggcgaatcaatgcgcagtgcttcatcttacactttcaggg

SEQ ID NO: 118643 - DNA, 1472 bp, Homo sapiens
atgaagcccacagggaactttctttcagattcccagagcagcctagagcccctaaaagcgatcatccagtacagactgccaagaagaagaacaacaacttgtactcttcctgagatggttcagcagctcctagagctacatctgactcattcacatacacagtctgtgtctcagaattcccagtggatgatttcatggaacttggcagaagtatccctgacacccaactggagcagtcatcgagagccagaaggcgaatcaatgcgcagtgctcatctacacttagggaccacaggcatacccaagggagtgatgctcagtcatgacaacatcacgtggattgcaggagcagtgacaaaggactttaaacgacagacaagcatgagacggtggttagctacctcccactcagccatattcagcacagatgatggacatctgggtacccataaagattggggcgctcactactttgctcaagcagatgctctcaaggtaagattgagtaaggacctgggctccgacttcatcctcttgggcagcccagtgggactgcgcccctcaaccaagagactgccagttctttctaagcttggacatacctataggcgagttgtatgggttgaggagagctcgggaccccacacgatatccaaccagaataactacaggcttcaaggtccaatgatgaaacttaagagacattttgtagcccagaaatacaaaaaacaaattgatcacatgtaccactgactgctttgatggagctgctctcagctgttctgatgaaagtaggaggcaatgaatcccaatgtctcattgggtcttatttggagaaggcctttgtcagaaactttagtgagaaagttctacttgccaggaactcaaggaatgaggtcatctgggggtctccggccgccgctgacccgcctgtccgcaggctgagctctcggaccacggagcgcgacggggaggcgcgactgcggctcagcaaggataagttagcaacaagacactcctcactgtgcacgacatggtcgcgagcaggccatcaagtacgccaacaacatcgcgcccggctccaacagctgccactgctcacctacatcgagtaccaccagcagtgtctcggcgtcgagaagtcttcttcaaagtaccgccaggcggtccgcgcctgcgcgcccctcccgccctcctgcgcctgcgcgcctcttctgcacccaccctcttgcgcctgcgcgcacttatttcacctcctgcgccagcgcagcgctccagggcctttcttccccgcccctccccgcgtcctgcgcctgcgcgcctttcttcccccggtaagctgcgcgccgctccggcccacttgcttctgcgcctgcgcgccgctgcaggccttcctcccccatctccccccgcctcctacgcctgcgcgccactacatccttctgcgcctgcgcagtgttactctcctgtga

SEQ ID NO: 118644 - DNA, 840 bp, Homo sapiens
atggtgacacagaaactccccaatgctcaggaaaacctgaaacacgccgagaggcaagcagcaggctgctgccctggaaggagccacattttccagcatgtcgggcctggggcctcagagtctctgcggggagaggggtgttcaactcacccagaagcccagggagcccaggagaggtgtgagcaatggaagaaagaccagcactggtgccttgccagccacaccgatgtcactcagcagtggggcaggcacatcgttcaggagggtgggacacacagagggccttctgcggtgctgtctcttcgaactgccttagacgagggggacgagggggctgctcccatccaatcactgcccagctccccctgcagctacgtcacctcccacggcctcctccggcgcctgcgcggctcttccccagctccccctgcagctacgtcacctcccacggcctcctccggcgcctgcgcggctcttccccagctccccctgcagctacgtcacctcccacggcctcctccggcgcctgcgcggctcttccccagctccccctgcagctacgtcacctaccccggcctcctccggcgcctgcgcggctcttccccagctccccctgcagctatgtcacctcccacggcctccggcgcctgcgcggccgcggctccgccgttcaaccgcatgcgcgacagcgctgaggcccggggagcgaggatctgccgccgctcagcccggagcccgctcagaaacctcgttctgccgactcggacggcagccgccgttttggatcctgcattcatttcctcccaggctctggcttgtcccgtcgttggtgtcatctag

SEQ ID NO: 118645 - DNA, 377 bp, Homo sapiens
tgggtttctacacttgcaatgccaccaatgccttgggatacgactctgtctccattgccgtcacattagcaggaaagccactagtgaaaacgtcacgaatgacagtgatcaacacggagaagcctgcagtcacagtcgatataggaagcaccatcaaaacagtgcagggagtgaatgtgacaatcaactgccaggttgcaggagtgcctgaagctgaagtcacttggttcaggaataaaagcaaactgggctccccgcaccatctgcacgaaggctccttgctgctcacaaacgtgtcctcctcggatcagggcctgtactcctgcagggcggccaatcttcatggagagctgactgagagcacccagctgctgatc

SEQ ID NO: 118646 - DNA, 1798 bp, Homo sapiens
atgaatgaaacagtcatcctggctgatgagctgtgtcgccagcccaagcccagcacggtgcaagcttgtaaccgctttaattgccccccagcctggtaccctgcacagtggcagccgccctcctcaaaggaagatgcaggcagagtgcctgaagctgaagtcacttggttcaggaataaaagcaaactgggctccccgcaccatctgcacgaaggctccttgctgctcacaaacgtgtcctcctcggatcagggcctgtactcctgcagggcggccaatcttcatggagagctgactgagagcacccagctgctgatcctagacacccttcctcgagatgtaaacagatattactttgggaaatcagctgagtacatcggagggactccgacttgttcttgggtcttggttcacattgcatgcactgaggcaagggcagagatcaaaaaaacaatgttgagagcacggccaggactcggagcacttggtgaacccctcatactcccagtcatacagctcgtcgaaatcctgcaggccaccaaagagcccatctgtctcgtctgggttgaactcaggaatttccccgctgcatgggcctgcataacaggcacgctgggatgctggcttgggcccttcacactcgtcaataggcaggtcagccacggactgagagaaagacaggagcacctggcacctgactattcgcacctgggtccccacaccacaggtgactgtgcaggccgaccaggcctctgggatgaacctgcagtcggcaagcaaacaagaggacaggatgagaagccccaggcaggaagccatgggggctggagtcgtgctgcagaggcatgcaaacctggctccttaaccttgactttggcagacaatgaaagaactgataagaaggcatcactagctcatcgtgtgtttttgctcttcagcccttatgaatgtaactcggaatccgtatctgcacagtactccaggaaaactctgtcagtcattagatttggcttcaggatctcaaacctgtttgctaggtcctcatccttcaggatcaaaatggtgcctggttggctgaacacttctgttttaaaggcatcacaaggccatgctccttccttaatggccttcacatccttggatgctgacgtacgagttttagccatatgtcaggctctcctgttgtgtaagagctgccctcgtttactagacctgaacgaccggaagagagccgtgcagaagtctgtaggtggaagatgtcagggacagggaatggccagggctgatgtgctgctgtgttggaggaaaggaaggccagtgtgctggagcactgtgattgatggggagtgtgggctaagaaagccactagtgaaaacgtcacgaatgacagtgatcaacacggagaagcctgcagtcacagtcgatataggaagcaccatcaaaacagtgcagggagtgaatgtgacaatcaactgccaggttgcaggtgtccaggaggctgtggtgagctgcttgaacaaacagactcgggagcctgctgaggagaacctgtgcgtgaccagccgccggcccccacagcttctgaaagccctgcatttggaatccctgcccagcaagctctctagttgttgagcctaaatgtgtgggcaaagggcaccaacttttctatttgactacagtcctgtcatctaggaagaagcagtatcgactcagcatggaacgcctgcaacgttctttgttaggcaaccaagaggcctggcttctcatcctgctgtcaccaactagctctgtggcctag

SEQ ID NO: 118647 - DNA, 1580 bp, Homo sapiens
atggatggaaccaacagattttacttgtacgtctgggagacagagcgccagcaggatgtggagcacgtggcccgctgtattctctgctatgacaaatgcagaccagacccagaatgcccggctggcacgccggggccccaggaggtggacgtggacttggtatttgtggtggacagctcctatggagtggatgccgacgtgtaccgcgggtctttgagtctagcggacgccgcgctagaagacctggaggtggctgagcagccgggcgcgtcccaccgtggggcgcgtgtggccctggtgacgcacacgacacccaacttctggccggggcttccacttgaccacctatggcaaccggaagcagatgcagagacatgtgcgcgaggcttcagcccgccccttacagggaaccgccccccctggccacgccctggagtggacgctggagaatgtgctcctggcagcccctcggccgcggaaggcacaagtcctcttcgccatcgtggccagcgagacaagtagctgggacagggagaagctatggactctgtccctggaggccaaatgcaagggcattaccctctttgtgctggccttgggtccgggtgtggggacccatgagctagccgagctagccgagctggtcagtgctccctctgagcagcatctactgcgcctacaaggggtctcagagccagaggttaactacgctcagggattcactcgggccttcctgaacctcctaaaaagtgagcagtccccgggaactggggcaccttgggtggagtggggagagggatttacagagcctggcatttgggcatgcaggtggacaaaccagtacccacccccagagctcactgaagaatgtgggggcctacaccgtggggacactgtgctgcaattagtcacacctgtcaacaggttcatgtatgcagctaaagaaaatagtttaaaaagaaagacaaaggctaactttcacctggctgtcgaactggagctggatgaaagttatttcagggcgtattatgaaggcacactctatgaagtgtctgcactacctttgcagagaagcaatgagttattgcagaagtggtccttgttccatggatccaatggaaggcgagtgtcaggatcacaccctgaagtggcattacaacaaggaggaacgggtttgccagcagttctggtgtggcagctgtggcggcaatgccaaccggtttgaaaccaaggaagaatgtgaggcttggtggcaaggatgtggagagctgtattttaccaaggtcaagttttcccagatgaatatggaggcagaaaagaggacaaggaaattgaaggtgcatataaggaaacgattacgatggtttctagaatctgagaagtggagacatgatgggaaaaggaggcagactgtgaaaaggttacaggatcaatggatcatagatctcagtgtggtcaacaaaacttgttggctctgggtaccagtagaagtgaggatctcagatccagtacacactgagcaagtggaaagtgcaaaggaagaggagttgggcactgggcaaagttgggatctaagataa

SEQ ID NO: 118648 - DNA, 556 bp, Homo sapiens
agacatgaaccccaaaattcctgtcctctggatggcagaaaccaagagaaagtatccccacatggtcaaaaggttaagctcttaaggacacaaagcaagacagagaaatttcatccagtattggtttcaggaacctgtagcaaggtttgtaactgaccagcctgccaagctggcttgaaaagcgggcttataggggtcctaaacccacattctatcctgtgatacccctctctctattacagaacaaagaaaaacaaattcttagcacaaagtacagcagatttgctaccgcctaagactagtctcacaaatccttttttctattaatcaaacccttgcagagagacaaatagtgacatttactgtttacccagacacagaaagagatagagagactagaaacttggctgacttgaagcaaattaaaatagacctaggtaaattctctgataaccctgatggctatattgatattttacgagggttaagacagtcctttgatctgacatgggagagatataatgttactgctaaatcagacactagctccaaatga

SEQ ID NO: 118649 - DNA, 735 bp, Homo sapiens
atggcttctaatagagctataacactcactgtatggcccaagatttcattccttggaatccatgaggccaagaaccccaggtcagagaacaagaggcttgccgccatcttggaagcggcccaccaccatcttgggagctctaagaacaaggaccacccgatgggaaacgttcccccccaaggcaaaaacacccctaagatgtattctggagaattcggcccagccagagtgtacgtaccttttttcctgtcagacttgaagcaaattaaaatagacctaggtaaattctcagataaccctgatggctatattgatgtttcacaagggttaagacagtcctttgatctgacatggagagatataatgttactgctagatcagacactaaccccaaatgaaagaagtgctgccataactgcagccagagagtttggcgatctctgttatctcagtcaggtagtggcagcagtagcaggcttagtatctgaagcagttaaaataatacagggatcttactgtgtggacatccatgatgtgaatggcatactaactgctaaaggagacttgtggctgtcagacaaccatttacttaaatatcaggctctattacttgaagggccagtgctgcgactgcgcacttgtgcaactcttaacccagccacatttcttccagacaatgaagaaaagatagaacataactgtcaacaagtaattgctcaaacatacgccacttga

SEQ ID NO: 118650 - DNA, 655 bp, Homo sapiens
gccgtcgacgccgccgagtcgcgcggaggcggaggcttgggtgcgttcaagattcaacttcacccgtaacccaccgccatggtcgaggaaggcattgctgctggaggtgtaatggacgtgaatactgctgtacaagaggttctgaagactgccctcatccacgatggcctagcacgtggaattcgcgaagctgccaaagccttagacaagtacgtgtatcagtctcaatactgtgggttcttgcaaccggaccaaaaacttgccacccaagggaagaagggcatgggagttcatggtgttaagcgcaaaagttcttgaatggcatccgtcctacccggaaaccttaggaaaaggcgccaagcccattctttgtgtgcttgcatccaactgtgatgagcctatgtatgtcaagttggtggaggccctttgtgctgaacaccaaatcaacctaattaaggttgatgacaacaagaaactaggagaatgggtaggccttttgtaaaattgacagagaggggaaaccccgtaaagtggttggttgcagttgtgtagtagttaaggactatggcaaggagtctcaggccaaggatgtcattgaagagtatttcaaatgcaagaaatgaagaaataaatctttggctcacattcaaaaaaa

SEQ ID NO: 118651 - DNA, 706 bp, Homo sapiens
gccgttgaatcccgcgcggaggcggaggcttgggtgcgttcaagattcagcttcacccgtaacccaccgtcatggccgatgaatggtgagcccatgggccgcggtcggagttggggtctgagtgcggctgatgcgtggggctagagctggcggaacaggactgtgtcaaacgggtcagccgtaagcgcgtctagcgtacacttatgttttgctgagtgcaaggccttatgcggtgagaggattttaactgatggttctgatgtgtcgcgtccaaccattgctgctggaggtgtaacggacgttaatactgctttacaagaggtgtctgaagactgccctcatccacgatggcctagcacggtggaatttcgcgaacgtggcccaaagccttagaacaagcgccaagcccattctttgtgtgcttgcatccaactgtggatgagcctatgtatgtccaagttgggtggaggccctttgtgctgaacaccaaatcaacctaatttaaggtttgatgacaaccaagaaacttaggagaaatgggttaggcctttgtaaaatttgacagagagggggaaaccccgtgaatagtggttggttggcagttgatgtagtagtttaaggactattggcaaggagtctcaggccaaggatgtcattgaagagtatttcaaatgcaaaaaatgaaaaaataaatctttggctcaca

SEQ ID NO: 118652 - DNA, 592 bp, Homo sapiens
gcatgggatcatcacgttacaggccttctcagaagctaataggaaactctggcttgaagccatggatgggaaggaaccgcaagaggaagtgagaggctttcatgattcagaagaaggaagatgtagggcaaagaggacaaatgcctacattctgagactgaaagttgaaggaggtgagattcagacaagtaaagggaagtccaggaagatcaagccttttatgcttgcctgtaaagtctgcaacatcttagagaagcttggatttagtgtggtggcagctgagtggaggcttagcaggcagtgccaagccaaagccatgtactcctgtaaagcagagcacagtcatgagctttccttcccacaaggagcaatattttctaatggatggaaagaagaagttgacaaagagagtgaaaaatattactctatccttgaaaagcatttaaatttgtccgcaaagaaaaaggagtctcatttacaagagaacagctctggtccttctgtcagcaccaagcttattaacttgttctcaaaaaggctcctctgtgccttcctacctgcacagctgactccttattcattttgttcatga

SEQ ID NO: 118653 - DNA, 1665 bp, Homo sapiens
atcacagaaaatggtatggagaaatacttgcattgcttacccccaccgccaacgtatgtggacatagtcaagtaccccatgcttgctcaatctatcacgaccctgtcacgtggaaccctcagggtttgggaggatctggggtcaggtgtcaccactcagtacacttggacccggctcctccaagggttcaagaactcccccaccatctttggagaggcaatggctcgagacctccagaagtttcctgccagatacctaggctgtgtgctgctccagtacattgatgacctcctgctgggacaacccacagcagtcgggagtgccaagggaatggataccctgctccagcacctggaggacttattgcctaagtccctgtatggagtcacaaagtggggagataaggaacattttgaatgggggtcccaacagcaacgagctttttatgagttaaaaggaaaactcatttcggccccagccctggggctacctgacctgacaaaaccttttacactatatgtgtcagagagagaaaaaatggcagttgcagttttgacccagactgtggggccctggccgaggccagtggcctacttctctaaacaactagatggggtttctaagggttggcccccatgtttgagggccttggcagcaacagccctgctagcacgagaagtggataagctaactcttgggcaaaacctaaacataaaggccccccatgctgtggtgactttaatgaataccaaaggacaccattggctaatgaatgctagaataactagataccaaagtttgctctgtgacaaaccccatataaccattgaagtttgcaacaccctgaaccccaccaccttgctcctggtatcagagagcccagttgaacataactgtgtagaggtgttggactcagtttattctagcaggcccaacctccgagaccatccttggacatcagtagactgggagctgtatgtggacgggagcagcttcatcaacccacaaggagagagtgtatggggcattatacaaggaaaaaggcctattaaactctgggggaaaagacgtaaagtatcagcaagagatcttgcaattattggaggcagtgtggaagccccaaaactggtgcagcagtgtgtcacctactggcagcacaatgctaggcaaggtccaaatgtcctgcccggcatacaatcttatggagcagccccctttgaagatctccaagtagccctcactgagatgcccaaatgtggaggtaacaagtatttgctagttctagtgtgtgcatacgctgggtgggtggaagtctatccaacacagaccgagaaagctcatgaagtaacctgtgtgcttctccgagatctccttcctaggtttggactgcccttacaaatcagctcagacaacgggctgggatttgtggctgacttggtacagaagacagcaaagaatctcaccgacactggacagctcccactggactatactggatatgtgggcatagagcctacaccaaattacctgaccaatgggattaccctggatgttgtattaagaacagaatgtaaagaagtggaactatctcagggagaattattagtaggccactgcaataacaaagtgaagggaaatggtgacttagagcaggaagatggctga

SEQ ID NO: 118654 - DNA, 4904 bp, Homo sapiens
atggtaaagggatcaattcaacaagaggagctaactatcctaaatatttatgcacccaatacaggagcacccagattcataaagcaagtcctgagtgacctacaaagagacttagactcccacacattaataatgggagactttaacaccccactgtcaacattagacagatcaacgagacagaaagtcaacaaggatacccaggaattgaactcagctctgcaccaagcagacctaatagacatctacagaactctccaccccaaatcaacagaatatacatttttttcagcaccacaccacacctattccaaaattgaccacatacttggaagtaaagctctcctcagcaaatgtaaaagaatagaaattataacaaactatctctcagaccacagtgcaatcaaactagaactcaggattaagaatctcactcaaagccgctcaactacatggaaactgaacaacctgctcctgaatgactactgggtacataacgaaatgaagacagaaataaagatgttctttgaaaccaacgagaacaaagacaccacataccagaatctctgggacgcattcaaagcagtgtgtagagggaaatttatagcactaaatgcctacaagagaaaggaggaaagatccaaaattgacaccctaacatcacaattaaaagaactagaaaagcaagagcaaagacattcaaaacctagcagaaggcaagaaataactaaaatgagagcagaactgaaggaaatagagacacaaaaaacccttcaaaaaatcaatgaatccagtagctggttttttgaaaggatcaacaaaattgatagaccgctagccagactaataaagaaaaaaagagagaagaatcaaatagacacaataaaaaatgataaaggggatatcaccaccgatcccacagaaatacaaactaccatcagagaatactacaaacacctctacacaaataaactagaaaatctagaagaaatggatacattcctcgacacatacactctcccaagactaaaccaggaagaagttgaatctctgaatagaccaataacaggctctgaaattgtggcaataaccaatagcttaccaaccaaaaagagtccaggaccagaaggattcacagccgaattctaccagaggtacaaggaggaattggtaccattccttctgaaactattccaatcaatagaaaaagagggaatcctccctaactcattttatgaagccagcatcattctgataccaaagccgggcagagacacaaccaaaaaagagaattttagaccaatatccttgataaacattgatgcaaaaatcctcaataaaatactggcaaaccgaatccagcagcacatccaaaagcttatccaccatgatcaagtgggcttcatccctgggatgcaaggctggttcaatatacgcaaatcaataaatgtaatccagcatataaacagagccaaagacaaaaaccacatgattatctcaatagatgcagaaaaagcctttgacaaaattcaacaacgcttcatgctaaaaactctcaataaattaggtattgatgggacgtatttcaaaataataagagctatctatgacaaacccacagccaatatcatactgaatgggcaaaaactggaagcattccctttcaaaactggcacaagacagggatgccctctctcaccactcctattcaacatagtgttggaagttctggccagggcaatcaggcaggagaaggaaataaagggtattcaattaggaaaagaggaagtcaaattgtccctgtttgcagacgacatgattgtttatctagaaaaccccatcgtctcagcccaaaatctccttaagctgataagcaacttcagcaaagtctcaggatacaaaatcaatgtacaaaaatcacaagcattcttatacaccaacaacagacaaacagagagccaaatcatgagtgaactcccattcacaattgcttcaaagagaataaaatacctaggaatccaatttacaagggatgtgaaggacctcttcaaggagaactacaaaccactgctcaaggaaataaaagaggacacaaacaaatggaagaacattccatgctcacgggtaggaagaatcaatatcgtgaaaatggccatactgcccaaggtaatttacagattcaatgccatccccatcaagctaccaatgactttcttcacagaattggaaaaaactactttaaagttcatatggaaccaaaatagagcccgcatcgccaagtcaatcctaagccaaaagaacaaagctggaggcatcacactacctgacttcaaactatactacaaggctacagtaaccaaaacagcatggtactggtaccaaaacagagatatagatcaatggaacagaacagagccctcagaaataatgccgcatatctacaactgtctgatctttgacaaacctgagaaaaacaagcaatggggaaaggattccctatttaacaaatggtgctgggaaaactggctagccatatgtagaaagctgaaactggatcccttccttacaccttataccaaaatcaattcaagatggattaaagatttaaacgttagacctaaaaccataaaaaccctagaagaaaacctaggcattaccattcaggacataggcgtgggcaaggacttcatgtccaaaacaccaaaagcaatggcaacaaaagccaaaattgacaaatgggatctaattaaactaaagagcttctgcacagcaaaagaaactaccatcagagtgaacaggcaacctacaacatgggagaaaattttcgcaacctactcatctgacaaagggctaatatccagaatctacaatgaactcaaacaaatttacaagaaaaaaacaaataaccccatcaaaacgtgggcgaaggacatgaacagacacttctcaaaagaagacatttatgcagccaaaaaacacatgaagaaatgctcatcatcactggccatcagagaaatgcaaatcaaaaccactatgagatatcatctcacaccagttagaatggcaatcattaaaaagtcaggaaacaacaggtggaatattggtggacttgtccccaagttaaattatgatttaaagagacacttagaaaaagaggaaaagcctactaaaactgagcaggctatcagcaaagacaaaaatgcagagaagaacaaccgtttatctcttcagggagaaattattattgcaattatattgataacagaacctgggttgaaagggagaggaatcccaattttcataattgaagatggaggaacaagttatgtggttgctctgcagatactatgcaaattagttgaactaactcagaaaccagttgatcagccctttgattacatttgtggtgtgagcacagctttactcctgaagtcagcaagaccacgaacccactggaaggaagaagctccagacacatctgaacatctgaaggaacaaactccggacacaccatctttaagaactgtaacactcactgctagagtctgcggcttcattcttgaagtcagcgagaccaagaactcaccggaaggaaccaattccggacatattttgacatcccagatgggactatcacctattgccaagcggagggaaactagtgcttctgctgctgcgttggtgagtgcaactattccaatctgcagggtccagggaccattgcgggttcttgggcaagaggtgtttctgctgctgcttcgccttcctacagctccccttcctattaatgataagcctcctctaatctcccctgcccagaaggaaacaagcaaagaaatctccaaaggaccacaaaaacccctgggctatcggttatgtccccttcaagcagtagggggaggggaatttggcctaacccgggtacatgtccccttctccctctatgatttaaagcagatcaaggcagacttggggaagttttcagatgatcctgataggtacatagatgtcctacagggtctagggcaaactttctatctcacttggagagatgtcatgctattgttagatcaaaccctggcctttaatgaaaagaacgcagctttagctgcagcccgagagtttggagatatctgggaccaaggggaacagtccaaaaaggaaaagcaagatcagagaaagaccgtagccttagtcatggccctcagacaaataaaccttggtggttcagagaggacagaaaatggagcaggtcaatcagccgggtttagggatagccctcaactgtttggtcaggcactggcccaagatctaggccacttctcaagtccaggcactcttgtccttcaatatgtggatgatttacttttggctaccagtttggaagcctcatgccagcaggctactctagatctcttgaactttctagctaatcaagggtacaaggtgtctaggtcgaaggcccagctttgcctacagcaggtcaaatatctaggcctaatcttagccagagggaccagtgcccagttagcagaactactggcacttaccctagccttagaactgggaaatggaaaaagaataaatgtgtatacagatagcaagtatgcttatctaatcctgcatgatcatgctgcaatatggaaagaaagggcgttcttaacctctgggggaacccccattaaataccacaaggaaattatggagttattgcacacagtgcaaaaacccaaggaagtggcagtcttacactgccaaagccatcaaaaagagagttcccctctggaggacactacaactgcagggccccttcttcacccctatccggcaggaagtagcccagagcggtcatcacccagttcccaacagctgttgggtgacctgtttagagggataattgagag

SEQ ID NO: 118655 - DNA, 2632 bp, Homo sapiens
atggagcaggccaatcacccagtaaggcttatcaatgtggtttgcaaggacactttaaaaaagattgtccaacaagaaacaagctgccccctcacccacgtccactatgccgaggcaatcactggaaggtgcactgccccagaggacaaaggctctctggaccagaagcccccaacagatgatccaacagggtgcccatggcaagtgccagctcatgtcatcaccctcactgagacctgggtatgtttaaccattgagggccaggaaattgacttcctcctggacactggagtacaaaaaccgaatggtcagtggagactagtgcaagatcttatacccatcaaagaggcagtaattcctttatatccagttgtaccaaacccctataccctgatctctcaaataccagagaaagcagaatggttcatggctctggacctcaaggatgccttcttctgtatctccctgcactctgactcccagtttctttttgcctttgaggatcccacaaaccacacatccaaaattacacggacagtcttgccccaagggtttagggatagccctcctctgtttggtcaggcactggcccaagatctaggccacttctcaagtccaggcactctagtctttcagtatgtggatgatttaattttggctaccagttcagaagcctcatgccagcaggccactctagatctcttgaacttcctagctaatcaaggaaaggtagttcctaatctttgggggaaactcccattaaataccacaaggaaatcatggagttattgcacgcagtgcaaaaacccaaggagatggcagtcttacactgccaaagccatcaaaaagcagctggcagaggcaggtcctgtgacagccatcttgctgctactcatctttgggccctgtatttttaacctccttattaaatttgtttcctccaggattgaggccatcatgctacagatggtcttacaaatggaaccccaaatgagctcaactaacaacttctaccaaggacccctggaccgatgcactgaccctttgtctggcctagagagttcccctagatgctcagaggccccatgcctgatgagtcagtggacaggggacattgaatatgacctgcttctgccacccattccacaccaaacaactctgtgtgacctacaaaatcttaaaggcatcttttcaagatatcacagaaaatggtatggagaaatacttgcattgcttacccccaccgccaacgtatgtggacatagtcaagtaccccatgcttgctcaatctatcacgaccctgtcacgtggaaccctcagggtttattgcctaagtccctgtatggagtcacaaagtggggagataaggaacattttgaatgggggtcccaacagcaacgagctttttatgagttaaaaagaaaaactcatgtcggccccagccctggggctacctgacctgacaaaactctttacactccatgtgtcagacagagaaaaaaaaatggcggttagagttttgacccagaccatggggccctggctggggccagtggcctacctctctaaacaactagatggcgtttctaagagttggcccccatgtttgagggctttggcagcaacagccctgctagcacgagaagtggataagctaactcttgggcaaaacctaaacataaaggccccccatgctgtggtgactttaatgaataccaaaggacaccattggctaatgaatgctagaataactagataccaaagtttgctctgtgacaaaccccatataaccattgaagtttgcaacaccctgaaccccaccaccttgctcctggtatcagagagcccagttgaacataactgtgtagaggtgttggactcagtttattctagcaggcccaacctccgagaccatccttggacatcagtagactgggagctgtatgtggacgggagcagcttcatcaacccacaaggagagagtgtatggggcattatacaaggaaaaaggcctattaaactctgggggaaaagacgtaaagtatcagcaagagatcttgcaattattggaggcagtgtggaagccccaaaactggtgcagcagtgtgtcacctactggcagcacaatgctaggcaaggtccaaatgtcctgcccggcatacaatcttatggagcagccccctttgaagatctccaagtagccctcactgagatgcccaaatgtggaggtaacaagtatttgctagttctagtgtgtgcatacgctgggtgggtggaagtctatccaacacagaccgagaaagctcatgaagtaacctgtgtgcttctccgagatctccttcctaggtttggactgcccttacaaatcagctcagacaacgggctgggatttgtggctgacttggtacagaagacagcaaagaatctcaccgacactggacagctcccactggactatactggatatgtgggcatagagcctacaccaaattacctgaccaatgggattaccctggatgttgtattaagaacagaatgtaaagaagtggaactatctcagggagaattattagtaggccactgcaataacaaagtgaagggaaatggtgacttagagcaggaagatggctga

SEQ ID NO: 118656 - DNA, 506 bp, Homo sapiens
ttcctggcactcaccagccgcttcctgtttgtactcctgaacgaggagaccaggagccacctggagaagagtctctgctggaaggtctcgccgcacatcaagatggacctgttgcagtggatccaaagcaaagctcagagcgacggctccaccctgcagcagggctccttggagttcttcagctgcttgtacgagatccaggaggaggagtttatccagcaggccctgagccacttccaggtgatcgtggtcagcaacattgcctccaagatggagcacatggtcttcttcgttctgtctgaagcgctgcaggagcgcccaggtgctgcacttgtatggcgccacctacagcgcggacggggaagaccgcgcgaggtgctccgcaggagcgcacacgctgttggtgcagctaccagagaggaccgttctgctggacgcctacagtgaacatctggcagcggccctgtgcaccaatccaaacctgatagagctgtctctgtaccgaa

SEQ ID NO: 118657 - DNA, 381 bp, Homo sapiens
ttcgacagtcagccgcatcttcttttgcgtcgccagccgagccacatcgctcagacaccatggggaaggtgaaggtcggagtcaacggatttggtcgtattgggcgcctggtcaccagggctgcttttaactctggtaaagtggatattgttgccatcaatgaccccttcattgacctcaactacatggtttacatgttccaatatgattccacccatggcaaattccatggcaccgtcaaggctgagaacgggaagcttgtcatcaatggaaatcccatcaccatcttccaggagcgagatccctcaacgaccactttgtcaagctcatttcctggtatgacaacgaatttggctacagcaacagggtggtggacctcat

SEQ ID NO: 118658 - DNA, 483 bp, Homo sapiens
gatttcgtgccgcatcttcttttgcgtcgccagccgagccacatcgctcagacaccatggggaaggtgaaggtcggagtcaacggatttggtcgtattgggcgcctggtcaccagggctgcttttaactctggtaaagtggatattgttgccatcaatgaccccttcattgacctcaactacatggtttacatgttccaatatgattccaccaactgcttagcacccctggccaaggtcatccatgacaactttggtatcgtggaaggactcatgaccacagtccatgccatcactgccacccagaagactgtggatggcccctccgggaaactgtggcgtgatggccgcggggctctccaaaacatcatccctgcctctactggcgctgccaaggctgtgggcaaggtcatccctgagctgaacgggaagctcactggcatggccttccgtgtccccactgccaacgtgtcaatggtggacc

SEQ ID NO: 118659 - DNA, 410 bp, Homo sapiens
ctgcggaattcggcacgagagccgcatcttattttgcgtggccagccgagccacatcgctcagacaccatggggaaggtgaaggtcggagtcaacgggaagctcgtcatcaatggaaatcccatcaccatcttccaggagcgagatccctacaaaatcaagtggggcgatgctggcgctgagtacgtcgaggagtccactggcgtcttcaccaccatggagaacgctggggctcatttgcaggggggagccacaagggacatcatctctgccccctctgctgatgcccccatgttcgacatgggtgtgaaccacgagaagtatgacaacagcctcaagatcatcagcagtgcctcctgcaccaccaactgcttagcacccctgtgcaaggtcatccatgacaactgtgga

SEQ ID NO: 118660 - DNA, 369 bp, Homo sapiens
ctctgctgatgcccccatgttcgatatgggtgtgaaccatgagaagtatgacaacagcctcaatatcatcacgtgatgaaggcagggcccgtggagaagcggccagcctggcaccctatggacacgctcccctgacttgcgccccgctccctctttctttgcagcaatgcctcctgcaccaccaactgcttagaacccctggccaaggtcatccatgacaactttggtatcgtggaaggactcatggtatgagagctggggaatggaactgaggctcccacctttatcatccaagactggctcctccctgccggagctgcgtgctaccctggggatggtggttctggggactggcttatccataatttc

SEQ ID NO: 118661 - DNA, 596 bp, Homo sapiens
gttagcacccctggtcaaggaaatccatgacaactttggtatgggggaaggactcatgaccacaggccatgccatcactgccacccacaagactgcggatggcccctccggaaaactgtggcgtgacaggccgcggggctcaccaaaacatcatccctgcctctactggcgctgccaaggctgtgggcaaggtcatgcctgagctgaacgggaagctcactggcgtggccttccgtgtccccactgccaacgtgtcagtggtggacctgacctgccgtcgacaaaaacctgccaaatatgatgacatcgggaaggtggtgaggcaagcgcctgagggccccctcaagggcatcctgggctacactgagcaccaggtggtctcctctgacttcaacagcgacacccactcctccacctttgacgctggggctggcattgccctcaacgaccactttgccacactcagtcccccaccacactgaatctcccctcctcacagttgccatgtagaccccttgaagaggggaggggcctagggagccgcaccttgtcatgtaccatcaataaagtaccctgtgctcaacccaaaaaaaaaa

SEQ ID NO: 118662 - DNA, 381 bp, Homo sapiens
cagcgagatccctccaaaatcaagtggggcgatgctggcgctgagtacgtcgtggagtccactggcgtcttcaccaccatggagaaggctggggctcatttgcaggggggagccaaaagggtcatcatctctgccccctctgctgatgcccccatgttcgtcatgggtgtgaaccatgagaagtatgacaacagcctcaagatcatcagcaatgcctcctgcaccaccaactgcttagcacccctgcctctactggcgctgccaaggctgtgggcaaggtcatccctgagctgaacgggaagctcactggcatggccttccgtgtccccactgccaacgtgtcagtggtggacctgacctgccgtctagaaaaacctgcca

SEQ ID NO: 118663 - DNA, 1597 bp, Homo sapiens
  misc_feature (1)...(1597): n = a,t,c or g
cccatcgaccgcctgcaggaattcggcacgagcctgttcgacagtcagccgcatcttcttttgcgtcgccagccgagccacatcgctcagaacacctatggggaaggtgaaggtcggagtcaacggatttggtcgtattgggcgcctggtcaccagggctgcttttaactctggtaaagtggatattgttgccatcaatgaccccttcattgacctcaactacatggtttacatgttccaatatgattccacccatggcaaattccatggcaccgtcaaggctgagaacgggaagcttgtgatcaatggaaatcccatcaccatcttccaggagcgtttatccctccaaaatcaattggggctgatgctggcgctgagtacgtcttggagtccactggcgccttcaccaccatggagaacgctggggctcatttgcaggggggagccaaaagggtcatcatctctgccccttctgcttgacggcccccatgttcgtcatgggtgtgaaccatgagaagtatgacaacagcctcaagatcatcagcaatgccttcctgcaccaccaactgtcttagcacccctgggccaaggtcatccatgacaactttgggtatcgtgggaaggactcatgaccacagtccatagccatcactagccacccaaaagactgtaggatggcccctccgggaaaactgtgggcgttgatgggcccgcggggcttcttccaggaacatcaatccctgccttttactggcggctgccaagggttgtggggcaaggttcatcccctgagcttgaacgggggaagctcacttgggcatgggccttccggtgtccccaactgccaaaacgtgtcaatgggtgggacctgaacctgccgtcttagaaaaaccctgcccaaaatatgattgacatcaaggaagggtggtgaaagcaggccgtcggaagggcccccttcaaggggccatcctggggctacaactgagcaacccaggtgggtctccctctggactttcaacaagcgacaacccactcctcccaccttttgacgcctggggcttggcatttgcccttcaacggacccacttttgttcaaagctcattttcctgggtattgacaacggaattttgggctacagcaaccagggtgggtgggaccttcatgggccaccatggcccacatgggctttccaagggagttaaggaccccttgggaccaccaggccccaggcaaggaggcacaagagggaaggagagagaaccctaattgctgggggagtccctgccacactcagttcccccaccacactgaatcttcccctccttcacaagttgccaatgtagaccccttgaaaaaggggaaggggtcaagggaagccgcaccttgtcatgtatccatctaataaagtatccctgtgctcaaccnnnnnnnnnnnnnggggggggcccgttttaaaggacccttgggggggccaaagttaacccgggcaggcaaggaaaaagttttttccttatagggggccgaataaaaacctacctgggaatttttggaaaggacccttactttgggggggggacaaaatgggccaaccaacct

SEQ ID NO: 118664 - DNA, 272 bp, Homo sapiens
ctgtcagatacttgttcctgggtgagcttcttgtcgctctgcagcaggatggacacgtagtggcggatcatgcctacgaagaaagtgatgataacgatgggtaggaccacccagaggcggatgttggagtcgagcaacagttctggccctgccatcttcactgaaagctggttcccagttgccttcagctgggctgcctggtcttccacttccggcgcgaacgttgacgtcacgtcgtggcgcacctcagtggcgtcagagcggcgtcgggc

SEQ ID NO: 118665 - DNA, 498 bp, Homo sapiens
atggcagggccagaactgttgctcgactccaacatctgcctctgggtggtcctacccatcgttatcatcactttcttcgtaggcatgatccgccactacgtgtccatcctgctgcagagcgacaagaagctcacccaggaacaagtatctgacagcatgcagcagagtgcaaggcacatgctgggctgcccggccttccacttccggcgcggaagttggcgtcacgtcatggcgcgcctcggtggcgtcagagcggcgtcgggcctggcgggaaagtcgaaaactacgggcggcgacggcttctcggggacgaggcacccacagtccctctcccataagcctgccaagaagattgatgtggcccgtgtaacctttgacctgtacaagctgaacccacaggacttcattggctgcctgaacatgaaggcgactttttatgatacgtactccctttcctatgatctgcactgctgtggggccaaacgcatcatgaagtga

SEQ ID NO: 118666 - DNA, 1774 bp, Homo sapiens
atggagtccaacgcagtccagctgacaaggatggaatacgccatgaagtcccttagccttctctaccccaagtccctctccaggcatgtgtcagtgcgtacctctgtggtgacccagcagctgctgtcggagcccagccccaaggcccccagggcccggccctgccgcgtaagcacggcggatcgaagcgtgaggaagggcatcatggcttacagtcttgaggacctcctcctcaaggtccgggacactctgatgctggcagacaagcccttcttcctggtgctggaggaagatggcacaactgtagagacagaagagtacttccaagccctggcaggggatacagtgttcatggtcctccagaaggggcagaaatggcagcccccatcagaacaggggacaaggcacccactgtccctctcccataagcctgccaagaagattgatgtggcccgtgtaacgtttgatctgtacaagctgaacccacaggacttcattggctgcctgaacgtgaaggcgactttttatgatacatactccctttcctatgatctgcactgcttggggggccaagcgcatcatgaacgtgcctacagagcaagatttcgtgtcgatgatgggatgggatggcatacgatcgcatagaatgcgttatgaaaacttggatgggacagcaaaacataaagaaaaaagccagaaatccccgaaatcctactcctcggaaatagcgacggggctcacatttagcagtacatctcaatccgttctaggagaagggcacttggggtgtgacatgcctggttttgaattctggctctgctactgcctaactgtgggttcttggccagagaatctgctgtactacagcctggatgaagactccaaaatcatgatctccgactttggcctctccaagatggaggacccgggcagtgtgctctccaccgcctgtggaactccgggatacgtggcccctgaagtcctggcccagaagccctacagcaaggctgtggattgctggtccataggtgtcatcgcctacatcttgctctgcggttaccctcccttctatgacgagaatgatgccaaactctttgaacagattttgaaggccgagtacgagtttgactctccttactgggacgacatctctgactctgccaaagatttcatccggcacttgatggagaaggacccagagaaaagattcacctgtgagcaggccttgcagcacccatggattgcaggagatacagctctagataagaatatccaccagtcggtgagtgagcagatcaagaagaactttgccaagagcaagtggaagcattctttgcatgctttctttctggtgcaacaaggtgtgcgactgctgcgacaagaccccatcgaatgccttttctcttttatctgttcctccaacaacaacatcgcccgcatcactggcatggtggagcggctgtgccaggcttttggacctcggctcatccagcttgatgatgtcacctaccatggcttccccagcctgcaggccctggctgggccagaggtggaggctcatctcaggaagctgggcctgggctatcgtgcccgttacgtgagtgccagtgcccgagccatcctggaagaacagggcgggctagcctggctgcagcagctacgagagtcctcatatgaggaggcccacaaggccctctgcatcctgcctggagtgggcaccaaggtccaacgcagtccagctgacaaggatggaatacgccatgaagtcccttag

SEQ ID NO: 118667 - DNA, 1124 bp, Homo sapiens
gcacgagcccagctgaaggcaataagcttggtctcaccgctgcagcagaggttctgtgctagccgggcataggggcgagagaaggcccagaggcgacagtcagagagaagcaactgcgccccggtgaagagaagctcgcccattcaccggctgggagccagctttcagtgaagatgggcagggccagaaactgttgcttgactccaacatctgcctctgggtggtcctacccatcgttatcactcttcgtagacatgatccgccactacgtgtccatcctgctaggagagcgacaataatctcacccagggaacaagtatctgacaggggacgaggcacccacagtccctcttcccattaagccctgccaagaagatttgatgtgggcccgtgttaacctttttgacctgttacaagttgaacccacagggactttcattgggttgcctgaacattgaagggcgattttttatggattacgtaattccctttcctattgatcttgcattgttgttgggggccaaacgcatcatgaaaggaagctctccactgggcccttttcagcatgcaaaccacggggccacgtgctgcttcacctcctgttacctgcagcagctcctcgatgccacagaggacgggcatccccccaagggcaaggcctcatccctcatcccgacctgtctaaagatactgcagtgaaagcccaagccctagctttccccagtgaaggactaaaattaggggccccccgctcaattggtagtggccacaagcctggcagctgtagagccgctaaccttccgacacctccctcaccacacaggaccctgagtgaggaggaggggctggaaacctgggatgggttggccaaaggagaacctcaggctcctggcctggcccagctccttcctgcccaaggtagcttagcccatccagactggtcctgaagtctgtccctccattggcatgaagtttgcccctcagcagtccggcctcacaggctgtactttcatggtgctctttaccttttggcccccatcccagaacatttgtgagtgaatttgcaagcatactagcatgtgatattagggagtttgcaataaattattgatgctgaaaaaaaa

SEQ ID NO: 118668 - DNA, 731 bp, Homo sapiens
cggacgcgtgggttttcgccggaagtggaagaccaggcagcccagctgaaggcagtaagctcggctcacagtctcaggagagttctggggtacacgggcaaaggggcttgagaaggcccggaggcgaagccgaagagaagcaactgtgccccggagaagagaagctcgcccattccagactgggaaccagctttcagtgaagatggcagggccagagactgttgctcgactccaacatccgcctctgggtggtcctacccattcgttatcattcactttctttcgtagggcatgatccgccactacgtgttccatcctgcttgcagagcgacagagaagcttcacccagggaacaagtatcttgacagttcaagtcctaatttcgaaggcagagttccttcaggggaaaattgggaaattacattcccaaacagtctttttttggacacggaaatttttattttttccgaacccagaggatgggattttttcaaaaaaacttaaacgggaggtagtgccaccttctcctatgactgatcctactatgttgacagacatgatgaaagggaatgtaacaaatgtcctccctatgattcttattggtggatggatcaacatgacattctcaggctttgtcacaaccaaggtcccatttccactgaccctccgttttaagcctatgttacagcaaggaatcgagctactcacattagatgcatcctgggtgagtt

SEQ ID NO: 118669 - DNA, 2253 bp, Homo sapiens
gagccggacgtgtgcgcgaagatggcgggccggagcatgcaagcggcaagatgtcctacagatgaattatctttaaccaattgttcagttgtgaatgaaaaggatttccagtctggccagcatgtgattgtgaggacctctcccaatcacaggtacacatttacactgaagacacatccatcggtggttccagggagcattgcattcagtttacctcagagaaaatgggctgggctttctattgggcaagaaatagaagtctccttatatacatttgacaaagccaaacagtgtattggcacaatgaccatcgagattgatttcctgcagaaaaaaagcaatgactccaacccttatgacaccgacaagatggcagcagaatttattcagcaattcaacaaccaggcctactcagtgggacaacagcttgtctttagcttcaatgaaaagctttttggcttactggtgaaggacattgaatccatggatcctagcatcctgaagggagagcctgcgacagggaaaaggcagaagattgaagtaggactggttgttggaaacagtcaagttgcatttgaaaaagcagaaaattcgtcacttaatcttattggcaaagctaaaaccaaggaaaatcgccaatcaattatcaatcctgactggaactttgaaaaaatgggaataggaggtctagacaaggaattttcagatattttccgacgagcatttgccttccgagtatttcctccagagattgtggagcagatgggttgtatacatgttaaaggcatcctgttatatggacccccaggttgtggtaagactctcttggctcgacagattggcaagatgttgaatgcaagagagcccaaagtggtcaatgggccagaaatccttaacaaatatgtgggagaatcagaggctaacattcgcaaactttttgctgatgctgaagaggagcaaaggaggcttggtgctaacagtggtttgcacatcatcatctttgatgaaattgatgccatctgcaagcagagagggagcatggctggtagcacgggagttcatgacactgttgtcaaccagttgctgtccaaaattgatggcgtggagcagctaaacaacatcctagtcattggaatgaccaatagaccagatctgatagatgaggctcttcttagacctggaagactggaagttaaaatggagataggcttgccagatgagaaaggccgactacagattcttcacatccacacagcaagaatgagagggcatcagttactctctgctgatgtagacattaaagaactggccgtggagaccaagaatttcagtggtgctgaattggagggtctggtgcgagcagcccagtccactgctatgaatagacacataaaggccagtactaaagtggaagtggacatggagaaagcagaaagcctgcaagtgacgagaggagacttccttgcttctttggagaatgatatcaaaccagcctttggcacaaaccaagaagattatgcaagttacattatgaacggtatcatcaaatggggtgacccagttactcgagttctagatgatggggagctgctggtgcagcagactaagaacagtgaccgcacaccattggtcagcgtgcttctggaaggccctcctcacagtgggaagactgctttagctgcaaaaattgcagaggaatccaacttcccgttcatcaagatctgttctcctgataaaatgattggcttttctgaaacagccaaatgtcaggccatgaagaagatctttgatgatgcgtacaaatcccagctcagttgtgtggttgtggatgacattgagagattgcttgattacgtccctattggccctcgattttcaaatcttgtattacaggctcttctcgttttactgaaaaaggcacctcctcagggccgcaagcttcttatcattgggaccactagccgcaaagatgtccttcaggagatggaaatgcttaacgctttcagcaccaccatccacgtgcccaacattgccacaggagagcagctgttggaagctttggagcttttgggcaacttaaaggataaggaacgcaccacaattgcacagcaagtcaaagggaagaaggtctggataggaatcaagaagttactaatgctgatcgagatgtccctacagatggatcctgaataccgtgtgagaaaattcttggccctcttaagagaagaaggagctagcccccttgattttgat

SEQ ID NO: 118670 - DNA, 381 bp, Homo sapiens
gttggccagaagtgggatggggttttacagaagaggtcttctgggggaggtgaagggcagagtggagggaaacaggatgtggcatgtgattgtgaggacctctcccaatcacaggtacacatttacactgaagacacatccatcggtggttccagggagcattgcattcagtttacctcaggcgcccgtggtcctgacacccctgcgccgctggagacccctctaagtttctggcccgcagacgaagtggagatccagccaggtcttgagtgctgccgccccatccctgcagccggagactcacctgttgccactcaaggtaccgctacctacaacaccgccgactccgcggcctttaggatttcagctcagttcagctaa

SEQ ID NO: 118671 - DNA, 458 bp, Homo sapiens
ttcctgcccccacgcctgtcgtggtttagctgaactgagctgaaatcttaaaggccgcggagtcggcggtgttgtaggtagcggtaccttgagtggcaacagaattcgattaaattacaatgggaaacatttttgaaaagctctttaaaagtctacttgggaaaaaaaagatgcggattcttatattgagtttggatacagctggaaaaaccaccatcttgtataaattgaagctgggggagactgtgcctgccgtccctacagtaggtttctgtgtggagacagtagaatataaaaataacaccttcgctgtctgggatgttggcagccacttcaaaatcagacctctgtggcagcattttttccagaacacaaaagagctatcagcttcccagtttgcacaattcatcaagaaattatgcggggtcactggcacaaatgatgaggcatctcctggg

SEQ ID NO: 118672 - DNA, 1260 bp, Homo sapiens
taaactgttacttgttggttaacatttatgtttgaaatggaaaatcaataaaagggaacttatattaatttataagcacattaagaaaagaggggacactatttttgatcccaagatagcaacaaaactaaaaacttttccaaagaagcaaacgggaacagaggtcaataggctgtgacctctattttatgtttaaaacgtttgcacatccactaagtgcactgcagaatcttaaatgcaattaaaatcaatgggcatacaagttatagagtagcttgaggaagcacaagtcaatcttcattagctattgtagcaaagattccttccaaatccatgggagcaggtgctgtttatactcccttcattgacgcccagaacaatggcatagggtgagcattgaatacttatttgctacgcgcatgaatgaatgaagctacgctgcgaaggcagactgcgtggctgctggtcccgtggctgctggccccgcagcatgtctgccgccttttcagcaggcttgctgcatctcctcattccctcacctttctggcagtaaggagttcccacgtttgccccgcttcagtgtcgtggactggcaaaatgctgtctctaaacccctccacgcctcaggtaatccgctcatttctcacacagacgcagctgtttccgaggaatgtccggccgagcccgcagggtgcgggcagcgagtatcctgggaccttcaggggaggaggtggctcccacaccccaataccgtacagagagtccgaagagtccgggcccttatttttccaattcttggtaaacaacaaacatgctcgccctcgcctccccgtgcagacgcctcagggccaactcggacttcgccaggccccgagagcagacagaagacaccaaatggctattaccaagagagaggggcgagggcacccgcgccggcgtataacgcttgcccttttccccgcgctcggtcggcccgacgcctcaagcgccaaggttgctttgcaatggctggaggcagctaccaacgactttcttcacagaattggaaaaaactactttaaagttcatatggaaccaaaaaagagccctcattgccaagacaatcctaagccaaagaacaaagctggaggcatcacgctacctgacttcaaactatactacaaggctacggtaacaaaaacagcaaggttccttctctataaagtaagtcaaatcgacaatacagacctctttgatcctgtgaagattaaatttgaatga

SEQ ID NO: 118673 - DNA, 1372 bp, Homo sapiens
atgaacatcgatgcaaaaatcctcaataaaatactggcaaaccgaatccagcagcacatcaaaaagcttatccaccatgatcaagtgggcttcatccctgggatgcaaggttggttcaacatacgaaaatcaatgaatgtaatccagcatataaacagaaccaaagacaaaaaccacatgattatctcaatagatgcagaaaaggcctttgacaaaattcaacaacccttcatgctaaacactctcaataaattaggtattgatgggatgtatctcaaaataataagagctatctatgacaaacccacagccaatatcatactgaatgggcaaaaactggaagcattcccttcaaaacatggcacaagacagggatgccctctctcaccactcctattcaacatagtgttggaagttctggccagggcaatcaggcaggagaaggaaataaagggtattcaattaggaaaagaggaagtcaaattgtccctgtttgcagatgacatgattatatatctagaaaaccccatcgtctcagcccaaaatctccttaagctgataggcaacttcagcaaagtctcagaatacaaaatcaatgtgcaaaaatcacaagcattcttatacaccaataacagacaaacagagagccaaatcatgagtgaactcccattcacaattgcttcaataagaataaaatacctaggaatctaaacttacaaggggtgtgaaggacctcttcagggagaactacaaaccactgctcaacaaaataaaggaggacacaaacaaatggaagaacataccatgctcatgggtaggaagaaatcaatatcatgaaaatggccatacttgcccaaggtaatttacagattcaatgccatccccatcaagctaccaatgactttcttcacagaattggaaaaaaactactttaaagttcatatggaaccaaaaaagagcccgcattgccaagtcaatcctaagacaaaagaacaaagctggaggcatcacactacctgacttcaaactatactacaaggctacagtaaccaaaggagcatggttccaacaccacaagcatacgcttattaaggagcctttattagacagcgtattctcacctaacaggccagatcatggcaaaaagcaagacaagcaaccccagacaaagaatattgccaatgccagtgctgactcaaagaacacgcaacagatgaatggtttcgtgactggtgcagctacttccttcatccccaaggacagaacggcctcttccctgtgtggctgcactggaaggagaagacaatctgttgctaaatacctcagaataaggccacacattaatgttccctctttcacatactacaaataa

SEQ ID NO: 118674 - DNA, 671 bp, Homo sapiens
atggcaccagaatttggctctgacgagggcctcaggaagcttccactcatggaggaaggcaaagggggagcagatatgtcacacgagatttgtgttgccaatctacaggtttatgtgcgaagcacagacttcgatcgtactctcatgagtgctgaggccaacctggctggactcttccctcccaatgaagttcagcacttcaaccctaacatttcatggcagcctatccctgttcacactgtgcccatcactgaagacaggttgctgaagtttcctttgggtccatgtccccgttatgagcagctgcagaatgagactcggcagacaccagagtatcagaacagaagtattcagaatgcacaatttctgaacatggtggccaacgagacagggcttacaaacgtgaccctagagaccatctggaatgtgtatgacacactctcttgtgaggcaccttccccaccttggggaagaaagccacccttggagaggctctggcctaggcctagggagctaacctgcccgctgcgatacacagcaaacccatgggctgcttctgccgccctgggcctcaccccaaaccgtgcagcgtctgagccagctaaaggacttcagcttcctcttcctcttcgggatccacgagcaagtacagaaggcccggcttcaggggg

SEQ ID NO: 118675 - DNA, 1923 bp, Homo sapiens
gactcagttgcctttgaggatgtggctgtgaacttcacccaggaagagtgggctttgctgggtccttgccagaagaatctctacgaagatgtgatgcaggaaaccatcaggaacctggactgtgggcacgagacagagttcgtggagtacgagaaccttcgagaccccatgaacatgccattgcacacgacagatggacctcataagtgtaagatatgtggaaaaggctttgattgtcctagttcactgaaaagtcatgaaagaactcacactggagagaaactctatgaatgcaagcagtgtgggaaagcgttatctcatagctcaagctttcgaagacacatgacaatgcacactggagatggacctcacaaatgcaagatatgtgggaaagcctttgtttatcccagtgtatttcaaaggcatgaaaagactcacactgcagagaaaccctataaatgtaaacaatgtggcaaagcctaccgtatttccagttctcttcgaaggcatgaaacaactcatactggagagaaaccctataaatgcaaatgtgggaaagcctttattgatttctattcctttcaaaatcacaaaacaactcatgctggagagaagccatatgagtgtaaggaatgtgggaaagcattcagttgtttccaatacctttctcaacatagaaggactcacacaggagagaaaccttatgagtgtaacacatgtaagaaagccttcagtcattttggtaacttaaaagtacatgaaagaattcactctggagagaagccgtatgaatgtaaggaatgtgggaaagcattctcttggctcacttgctttctacgacatgaaagaattcacatgagagagaaaccctatgagtgtcaacaatgtggtaaagccttcactcattcccgcttccttcaaggacatgaaaggattcacactggagagaagccgtatgaatgtaaggaatgcaggaaggcattctcttggctcacttgccttctacaacatgaaagaattcacactcgagagaaaccttatgaaggtaaacaatgtggtaaagccttcactcattcccgtttccttcaaggacatgaaagaactcataccgcaaagaagctatgtgaatgcctttctacagtcagtgctcggaaatctgtggatctaatcatagcttcatacccattgttcttgaacttgtttagtacccctaaaacacttcgaaactgttcctatcgaagacatgagagaatgcacactggggagaaaccgtatgaatgtaagcagtgttctaaagccttgcctgattccagttcctatataagacatgaaagaactcacactggagagaaaccatatacatgtaaacagtgtgggaaagccttcagtgtttccagttcccttcgaagacatgaaaccactcacagtgcagagaaaccctatgagtgtaagcaatgcgggaaaacatttcatcatcttggaagctttcagatacacatgaaaaggcacactggagatcgacctcataaatgtaagatatgtgggaaaggctttgatcgtcccactttagttcgatatcatgaacgaatttccactggagagaaaccccatgaatgtaagcaatgtgggaaagcatttgatcatctgggaagcttccaaagacacatgataaggcacactagagatggacctcataaatgtaagatatgtgggaaaggctttgattgttccagtacactgcaaagtcatgaaagaactcacactggagagaagaaactctatgaatgcaagcagtgtgggaaagcgttatctcatagctcaagctttcgaagacacatgacaatgcacactggagatggacctcacaaaatgcaagatatgtgggaaagcctttgtttatttcattggatttcaaagacatga

SEQ ID NO: 118676 - DNA, 459 bp, Homo sapiens
atgggaaagggctccttcaagtatgcctgggccttgtataagcagaaagctgagtgtgaacgtggtgtcacaattgatacttctctgtggaaatttgagaccagcaagtgctatgtgaccatcacaagactttatcaaaaacattattacaggcacatcccagcaaggacagacggccagtgtggcagctttctgtatcctgagctcttgtccagcatcctggaagaatcaggtgtcacacagacttggaggatgaatgcagggcttttaaggttcaaaagtttggagggatcagaagaagacaggaagatgagggaaagcttggaacttcctagagacttgttgaatggttttgaccaaaatactgatagtgatgtgaatagtgaagtcctggctgaagtgatctcagatgaagatggggaacttattggaaactggagaaaaggcctggaggtctag

SEQ ID NO: 118677 - DNA, 719 bp, Homo sapiens
gagaagccgctgattacgccaatgcttggcacgaggggtttgccgccagaacacaggatgacgtgaaaactacccctaacagccagaatgggaaagtgttaagactcatatcaacattgtcgtgcattggacacgtgagattcggtcaagtccaccactactggccatctgatctataaatgcggtggcatcgacaagaagaaccattgaaaaatttgagaaggaggctgctgagatgggaaagggctccttcaagtatgcctgggtcttggataaactgaaagctgagcgtgaacgtggtatcaccattgatatctccttgtggaaatttgagaccagcaagtactatgtgactatcattgatgccccaggacacagagactttatcaaaaacatgattacagggacatctcaggctgactgtgctgtcctgattgttgctgctgggtgttggtgaatttgaagcttgctatatgccagaatgggccagacccgagagcatgcccttctggcttacaccactgggtgtgaaaacaactaatttgtcgtgttaacaaaatggattccactgagccaccctacagccagaagagatatgaggaaattgttaaggaagtcagcacttacattaagaaaattggctacaaccccgacacaagagcatttgtgcccaatttctggtttaaatggtgaccacatgctggagcccaaatgctaaa

SEQ ID NO: 118678 - DNA, 528 bp, Homo sapiens
atggctgcccctcaggacctggacatcgctgtgtggctggccacggtgcacctggagcagtatgcagacacgttccgacggcatggcctggctacagcaggtgcagcccggggcctgggccacgaggagttgaagcagttgggcatcagcgccacagggcaccggaaacgcattctacgcctgctgcagacaggcaccgaagagggctccctggatcccaaatcagatagtgccatggaaccatcccccagcccagccccgcaagcccagccccctaagcccgtgccgaagcccaggaccgtgtttggtggactcagtggccctgccaccactcagagacctgggctgagcccagccctcgggggaccaggagtgtccaggagcccagagcccagcccaaggccccctcctctccccacttcctcctctgagcagtcttcagccctaaatactgtggagatgatgcctaattccatctacttcggcctggactcaagaggcagggcacaggcagctcaggacaagtga

SEQ ID NO: 118679 - DNA, 448 bp, Homo sapiens
ccggcgcgcccacgcgtgcgcgaggagaaggagaaagaaagaaatgcttggggtaaatgttttaactagtcattcttcccaggagcggatgaagctgacttttaaaaagaaggctgtgaactttgcagatgctgctgccgcccagggccccctgcttccagccatggtcaaccccaccatgtttttccacattgctgtcgatggcgagcccttgggctgtgtctccttcgaggtaaggggcctggaaagcaagaagtgactgctcatctaatccataaaactatgttaacagattggagctgtttgcagacaaggttccaaagacagcagaaaatttccatgctctgagcactggagaaaaaggatttggttataagggttcctgctttcacagaattattccagggtttacgtgtcagagtggtgacttcacacgccctacagcatg

SEQ ID NO: 118680 - DNA, 976 bp, Homo sapiens
ggcacgagggacgccaccgccgaggaaaaccgtgtactattagccatggtcaaccccaccgtgttcttcgacattgccgtcgacggcgagcccttgggccgcgtctcctttgaggtaaggggcctggataccaagaagtgactgctcatctaatccataaagctatgttaacagattggaggtagtagcattttcattacaagtgactaaaagaacagctgtttacccctgatcgtgcagcagtgcttgctgttccttagaattttgccttctgtttgcagacaaggtcccaaagacagcaggtgtttaatttttttttaaacagaaaattttccgtgctctgagcactgggagagaaaggatttgggttataaggggttccctgcttttcacagaattattccagggtttatgtgtcagggttggtgactttcacaccgccataatggcactgggtggcaagtccatcttatggggagaaattttgaagatgagaaacttcatcctaaaagcatacggggtcctgggatctttgtccatggccaaatgcttggacccaacaaaaattggttccccagtttttccatcttgcactgccaagacttgagtggttgggatgggcaagccttgtggtgttttggcaaaagtgaagaagggattgaatattgtggaggccatggagcgcttttgggtccaggaatggcaagaccagccaagaagatcaccattgctgactgtggacaactcgaataaagtttgacttgtggtttatctttaaccaccagatcattcccttctgtagcttcaaggagagcacccctccaccccatttgctcgcaagtatcctagaatctttgtgctctcgcttgcagttcccttttgggttccatgttttccttgttccctcccatgcctagctggattgcagcagttaagtttatgattatgaaataaaaactaaataacaaaaaaaaaa

SEQ ID NO: 118681 - DNA, 615 bp, Homo sapiens
ggccagaatgcataattggcatagacatacttagcagcggacagaacccccacattggctccctgactggtagggtgagggctattatggtgggaaaggccaaacggaagccattagagctgcctctacctagaaaaatattaaatcaaaaacaatatcgcatagctggagggattgaggagattagtgccaccatcaaggacctgaaagacgcaggggtggtgattcctaccacatccctgttcgactctcccatttggcctgtgcagaagacagatggatcttggagaatgacagtggattatcgtcagattaatcaagtggcaactccaattgcagctgctataccagatgtggcttcattgcttaagcaaattaacacatctcctgacacctggccatacgaccccccatatccaatggtgattgaggtgtcagtggcagataggcatgctgtttggagcctttggcaggcccccataggtgaatcacatcagaggcctctaggattttggaacaaggccctgccatcttctgcagataactactctccttttgagagacagctcttggcctgttactgggctttggtggaaattgaacgtttgattatac

SEQ ID NO: 118682 - DNA, 354 bp, Homo sapiens
ctgattcatgggcctgtggccaatggtttggcctggatggtccagggacttggaagaagcatgattggaaaattgaatgacaatgaaatttggggaaagaggtatgtggatagacctctctgagtggtcaaaaactgtgaagatatttgtatcacatgagagtgctcaccatatcacataaaagagctcagcagaggaggattttaataatcaagtggataggatgattcattctgtggacaccactcggcctctttccccagccacccctgtcattgcccaatggacccatgaacaaagtggccatggtggcagggatggaggttacacatgggctcagcaacatggacttcc

SEQ ID NO: 118683 - DNA, 1529 bp, Homo sapiens
atggagaacactgatactgcttggcatgaactgtttagagagttatgcaaaataaatgcatttgacactcctgatttatcgctcatgagaggcaaggaatttagtgactctgtacataatacctttgaccatatgtggagaagcaaggaacataatgaagttggttgtttgctcctaagttcagtggacaaagtgatggaagaaaatgatgaactcagggattttaactcccatcttcagaaacagatactgaccctcaaatctgctaatatcaccttgagtgagagtcttatctcctgtagagaaagagctgaaattgtggaaaaacacacacaagctcttatcatatccaacagtgggagctgcagtcactcaactacaaaatttaactgcaatgggagtaattggatcccatggtgccaggggccaagtagtggcactcaaccgtcaaaggcaaggagacctccaaccttttaccagggtaactgtgcactggggaaaagggaaatgcagatatttgggggactactggacactggctctgagctgacattgattccaggggacccaaaacatcattgtggtcctccagttaaagtaggggcttatggaggtcaggtaattaatggagttttagctcaggtccaaattacagtgggtccccagactcatcctgtggttatttccccagtgccagaatgcataattggcatagacatacttagcagctggcagaacccccacattggctccctgactggtagggtgagggctattatggtgggaaaggccaaatggaagccattagagctgcctctacctagaaaaatagtaaatcaaaaacaatatcacatccttggagggactgtggaaattagtgccaccattaaggacttgaaagacacagaggcggtgactcccaccacatccccattcaactctcccatttggcctgtgcagaagacagatggatcttggagaatgacagtggattattgtaaacttaaccaagtggtgactccaattgcagctgctgtaccagatgtggtttcattgcttgagcaaattaacacatctcctggtacctggtttgagtggagtccaaaagaaggctctgcagcaggttcaggctgctgtgcaagctgctctgccatttgggccatatgacccagcagatccaatggtgcttgaggtgtcagtggcagatagggatgctatttggagcctttggaacgccgccattggtgaatcacagcggaggcctctaggattttggagcaaggctctcctgtcttctgcagataactactctccttttgagaggcagctcttggcctcttactgggctttggtggaaactgaacgtttgacggtgggtcatcaagtcaccctgcgacctgaactgcctatcatgaattgggtgctttctgacccatctagccataaagttagtggtgcacagcagcgttccatcatcaaattgaagtggtatatacatgattgggttcgagcaggtcctgaaggcacaa

SEQ ID NO: 118684 - DNA, 816 bp, Homo sapiens
atgcagctgtcccaggccagctgtccaggccccagctgcccggcggtgctggctccctttgccccaaagggtctgaaggctggcggctggcactcctggattttctggcctctgagtcagggaagctccaggactggcgggatgggctcagcctgtatcaaagtcaccaaatactttctcttcctcttcaacttgatcttctttgtaatgggtccagtgggtccccggactcatcctgtggtcatttccccagtgccagcatgcataattggcatagacatacttagcagctggcagtacccccacattgactccctgactggtagggggtatatcaactctttggctttgtgtcataaccttattcggagagacctcgatcactttttacttctgcaagatatcacactggtccattacattaatgacattatgctaattgggtccagtgagcaagaggtagcaaacacactggacttattgcccaatgggcccatgaacaaagtggccatggtggcagggctggaggttacgcatgggctcagcaacacggacttccactcaccaaggctgacctgcctggctatggccactgctgagtgtccaatttgccagcagcagagaccaacactgagccctcgatatggcaccattccttgggggcatgggacgcacctggagggcgagggtgctggcgtctccagaaggctggagagtagtgtggatcagaggagcctcttagggatgcagatgcttgagtccgttacaacccgaccaagacgctcccagcaggaggccaaggacctgcgtttttaa

SEQ ID NO: 118685 - DNA, 434 bp, Homo sapiens
  misc_feature (1)...(434): n = a,t,c or g
aaccgtctaccgtgccggaattcccgggacgacggctgcgagaagacgacagaaggggaagccccattnnnaccgcaaccctgtccttgtcagaggaattggcaggtattcccgatctgccatgtattccagaaaggccatgtacaagaggaagtactcagccgctaaatccaaggttgnnnnnnnnnnnnnnnnggggccctttttaaaggaccaatttttactcccccgggcgggcaaggaattannnnnnnnnnggggcccccaaattaaattccgggggccgggttttaacaggggggggaggggaaaacccggggggtaaccaattttaatcgctttggggagnnnnnnnnnnntgggggccccttttggcggcttcctggtccgggccgaacanaaacgttgtanccggcaacggggcggagatgaaa

SEQ ID NO: 118686 - DNA, 375 bp, Homo sapiens
atggcaggtgaaaaagttgagaagccagatactaaagagaagaaacccgaagccaagaaggctgatgctggtggcaaggtgcaagagggaactggcaggtattcccgatctgccatgtattctagaaaggccatgtataagaggaagtactcagccgctaaatcaaagattgaaaagaaaaaggagaaggttcttgcaactgttacaaaaccagttggtggtgacaagaatggtggtacccaggttttcccaaattataacttattcgagctacacgcaaaaagttcaactcccaaagtccactctgaagcaaaggcaaggcccctgcccccaaggagccctgtaaatccaaaagccaaagtagcacccttttaa

SEQ ID NO: 118687 - DNA, 905 bp, Homo sapiens
aatcgcgggcctgtctgcaagacttgagttcaggactcccaatccttcgccatccgaacctggagggcatccagtcgacacctacaggggtcggacatgtccaaggctaactgagaggccttccagacgcttcatttttgttgtttgggtttgcggcagggcacaaagaggatggcgggtgaaaaagttgagaagccagatactaaagagaagaaaccacgaagccaagaaggttgatgcatggtggcaaggtgaaaaagggtaacatcaaagcttaaaaagcccaagaagggggaggccccatttgcagccgcaaccctgtcctttgttcagagggatttggcaggtattcccgatcttgccatgtattccagaaaggccattttaccaagaggggagtactttcagcccgcttaaatccaaggttgaaaagaaaaagaaggagaaggttctcgcaactgttacaaaaccagttggtggtgacaagaacggcggtacccgggtggttaaacttcgcaaaatgcctagatattatcctactgaagatgtgcctcgaaagctgttgagccacggcaaaaaaacccttcagtcaagcacgtgagaaaactgcgagccagcattaccccccgggaccattcttgatcatcctcactggacgccacaggggcaaagagggtggttttcctgaaagcagctggctaagttggcttatttactttgttgacttggacctctggtcctcaatcgagttcctctacgaagaacacaccagaaattttgtcatttgccactttcaaccaaaatcgatatcagcaatgtaaaaatcccaaaacatcttactgatgcttacttcaagaagaagaagctgcggaagcccagacaccaggaaggtgagatcttcgaca

SEQ ID NO: 118688 - DNA, 413 bp, Homo sapiens
tttcgtggccttggcggccgtgctctgcaggcagtgcctccctcgggcgtgggtctgcaggagagccggacagggcagcggccggcactaccgcgctgcgatttgcgcagagctgaagaagcccctgaccattgaagaggtggcccccgccccgtcgggcctcacgaggtcagagttgatgtccatttctgtggagttaactttggtgatattttgatctgccgtgatcaatatcaggaaaggccccatcttcccttcacacctggacctgtggcagattccagaaaaggtctccctataagaagctgctgtcctccctataacttatggcactgcgatttttgctcttgagcatcgggcccgtacccagcctgggtaatatagctgctgctggaagtgacgagaagtgcaag

SEQ ID NO: 118689 - DNA, 708 bp, Homo sapiens
atggggctgaaactgaatacacacatggaccagacaagaggaagcttgtctggagacaccttggaagggtctccatccaaaagggctaaaataattctgaagaggggtggatttcggggaatcttggggggcgtgggtgtgcaggaacgccggacagggcagcggccggcactaccgtgccacgatttgcgcagagctgaagtagtccctgaccatcgaagaggtggcccccgccccgtcgggcctcacgaggacctgtggcagattccagaaaaggtctccctacaagaagctgctgtcctccctataacttatggcactgagagttttgctcttgagcatcgggcccgtacccagcctggagaaattgttttagtgacggcagcagctggagccacaggccttgcagtgatgtggcaacaaatttcttcaggccaaggtaatatagctgctgctggaagtgacgagaagtgcaagctggcgatggcagaagggtgcgcagtccagcgtgaactacagtcagggcagcctgaaggattcagccacggaccagtagcagtccatggtcggtccatggcctgggagtttagagtattctgggtcctcttattgctccatgacagcacccagaggaagtccaaggaagaaggcttacaagtgagggcaaagttcccagtatttcatactgacatgctaacccacacttga

SEQ ID NO: 118690 - DNA, 142 bp, Homo sapiens
ccattcctgttatcgcccaatgggcccatgaacaaagtggccatggtggcaggtcaacaggccaagaagggagttacagtgttggctggggtgattgacccggactatcaagatgaaatcagtttactactctacaacagag

SEQ ID NO: 118691 - DNA, 368 bp, Homo sapiens; identical to SEQ ID NO: 118592

SEQ ID NO: 118692 - DNA, 526 bp, Homo sapiens
ccacaaagtgggtcatgcacagcaccattccttcatcacatggaagtggtatacacgtgattggtctcgagcaggtcctgaaggcacaaggagttccctatgatcagttgacagaggaagagaagactagggcctggttcacagatggttctgcacgatatgcaggcaccatccgaaggtggacagctgcagcactacagcccctttctaggacatccctgaaggagagcggtgaagggaaatcttcccagtgggcagaagttcgagcagtgcaccttgttgtgcattttacatggaaggagaaatgaccagatgtgcgattatatactgattcatgggctgtggccaatggtttggctggatggtcagggacttggaagaagcatgattggaaaattgatgacaatgaaatttggggaagaggtatgtggatagacctctctgagtggtcaaaaactgtgaagatatttgtatcacatgagagtgctcaccatatcacataaaagagctcagccccacgcgtccg

SEQ ID NO: 118693 - DNA, 843 bp, Homo sapiens
atgcgacctgaactgcctatcatgaactgggtgctttctgaaatgagtcatgcacagaagcattccatcatcaaatggaagtggtacatatgtgatcagactcaggcaggtcctgaagtcacaagcaccacccgaaagtggacagctgcagaactacagcccctttataggacatccctgaaggacagcggtgaagggaaatcttcccaccacccctgtcatcaccaatgggcccatgaacaaagtggccatggtggcagggattcaggttatacctgggctcagcaacatggacttctgatcaccaaggctgacctggctatgaccactgctgagtgcctaattagccagcagcagagaccaagactgagccttcaatatagctccattccttggggcaatcagccagccacctggtggcaaattgattatattagacctcttccatcatggaaagggcagagccaggattcacaggaccggtccaggaatcaaggggtgaaagtgaaagtggcaccactcaccatcacccctagtgatacaacagcaaaatttttgctccatgttcctgcagcattacattctgctggtgtagatgtcttagttccagagggaggaatgctgccaccaggaggtacaacaacgattccattaaactggaagttaagattgccacctggacactttgggctcctcatacctttaagtcaacaggctaagaagagagttacagtgttggctggggtgattgacctggactgtcaagatgaaatcagtctactactctacaacagagatgccaaagagttgtataggtatactgcacatcgtgtcagtgattaa

SEQ ID NO: 118694 - DNA, 507 bp, Homo sapiens
tcagcagggtaagttgttcacctcctcctctttctcctcctcctcctctctctcctcctcctcctctctctcctcctcctcttctttctcctcctcctccgcctctttctcctcccccttctcctcctcctcctgtttctcttccccctccccctccagtattttccttcccctcctcttgccctcccctttccctcctccccttcttcctcctttacctcctccccctcctctttcgcctccgcctccgcctccaccttggtctccctctcctccaatctgacagatgaaccgaagcagcagaaacacttctgtgttcagcagtttagttagttcttcaaggacctgggagcttccagagccttgacatctctgtcttttaccatcagagggatgactattacctccctgtttgctctcttccttctgctccagccatgtaggacgttcctgcttcccctctgccttctgccatgattgtaagtttcctgaggcttccccagccat

SEQ ID NO: 118695 - DNA, 531 bp, Homo sapiens
atggggtccagccactgcacacagccaggcatgctggctgctgcggtggggcaggcagttccaggcactgacacgggtgccgactccgtgagcctgtctgcctcctgctgccatcaacatgccatccactgtgcacaggccattcgtgccaaggggcacttgcaggcccacactgagctgccctcagcccccactcagcctccctcctgtgcacgtcagtgcccaaagtcaggaggggacctaggtggcagggagctgtataataatcatgaaattcgttctggaaaacatattggtgtctgcatctcatttgccaacaataggctttttgtggtctctattcctaagagtaaaaccaaggaacagattcttgaagaatttatcaaagtaacaggcagttactgggtgctggggctgtcctttgatttccggaaatggccggtcgccagtgttgtcagagtttccacggaagactgcgcgctactccggccaggagggcggagcggcgagacgctagaagctttgcgctga

SEQ ID NO: 118696 - DNA, 2407 bp, Homo sapiens
  misc_feature (1)...(2407): n = a,t,c or g
agagaggagccgactcggcagggactgggggaccgggccgagagtgcgagcgagcgagggagggagtgagggagcgtgcgagccagaaggggaaaggcggccactcgtgcctgagcgaccgcagaggggagtgggagcagtggggtaaaggagcggggggcgggaataagaaaggccgagagaaggcggacagaggctagtggtggtggtggtggtagggggagaaggaggagctggaggagggcaggggctgagggagtgagtgaagcggacgcgcgagggaggggagggaagggaagggaagggaagggggggtcacgcgggggcgcgcgcgcgcaccgggagcgcgctcggaggcgagtggaactggatcgggtttgctgccagcggcgtgagcttcggccgccattttacaacagctccactcgcgccggacacagggagcagcgagcacgcgtttcccgcaacccgataccatcggacaggatttctccgcctcagcccaacggggagatctctggaaacatggctacagaacatgttaatggaaatggtactgaagagcccatggatactacttctgcagttatccattcagaaaattttcagacattgcttgatgctggtttaccacagaaagttgctgaaaaactagatgaaatttacgttgcagggctagttgcacatagtgatttagatgaaagagctattgaagctttaaaagaattcaatgaagacggtgcattggcagttcttcaacagtttaaagacagtgatctctctcatgttcagaacaaaagtgcctttttatgtggagtcatgaagacttacaggcagagagaaaaacaagggaccaaagtagcagattctagtaaaggaccagatgaggcaaaaattaaggcactcttggaaagaacaggctacacacttgatgtgaccactggacagaggaagtatggaggaccacctccagattccgtttattcaggtcagcagccttctgttggcactgagatatttgtgggaaagatcccaagagatctatttgaggatgaacttgttccattatttgagaaagctggacctatatgggatcttcgtctaatgatggatccactcactggtctcaatagaggttatgcgtttgtcactttttgtacaaaagaagcagctcaggaggctgttaaactgtataataatcatgaaattcgttctggaaaacatattggtgtctgcatctcagttgccaacaatagtgctttttgtgggctctattcctaagagtaaaaccaaggaacagattcttgaagaatttagcaaagtaacagagggtcttacagacgtcattttataccaccaaccggatgacaagaaaaaaaacagaggcttttgctttcttgaatatgaagatcacaaaacagctgcccagggcaaggcgtaggtttaattgagtgggtaaagttcaaggtctnggggggaatgttggaactgttgaatgggctgatcctatagaagatcctgatcctgaggttatggcaaaggtaaaaagtgctgtttgtacgcaaccttgccaatactgtaacagaagagattttagaaaaggcatttagtcagttttgggaaactggaacgagtgaagaagttaaaagattatgcgttcattcattttgatgagcgagatggtgctgtcaaggctatggaagaaatgaatggcaaagacttggagggagaaaatattgaaattgtttttgccaagccaccagatcagaaaaggaaagaaagaaaagctcagaggcaagcagcaaaaaatcaaatgtatgacgattactactattatggtccacctcatatgccccctccaacaagaggtcgagggcgtggaggtagaggtggttatggatatcctccagattattatggatatgaagattattatgattattatggttatgattaccataactatcgtggtggatatgaagatccatactatggttatgaagattttcaagttggagctagaggaaggggtggtagaggagcaaggggtgctgctccatccagaggtcgtggggctgctcctccccgcggtagagccggttattcacagagaggaggtcctggatcagcaagaggcgttcgaggtgcgagaggaggtgcccaacaacaaagaggccgcggggtacgtggtgcgaggggtggccgcggtggaaatgtaggaggaaagcgcaaagctgatgggtacaaccagccagattccaagcggcgccagaccaataatcagaactggggctcccaacccattgctcagcaaccgctccaaggtggtgatcattctggtaactatggttacaaatctgaaaaccaggagttttatcaggatacttttgggcaacagtggaagtag

SEQ ID NO: 118697 - DNA, 369 bp, Homo sapiens
aaaaggttttaaatttgattcttcagttttctccacttggagtttagttcatactgtacttctgccattagctccttattattctgcgggacagcaggctgagtctaaaaatctgaaagaatctgttgtcccacccacagcgccaactgaaaataaaaaacaggtgagggaggataaaaattggcctataccgcctcctccaatcgcagaaacatctgtactgcctccttcagtagcagaaatagagaccccaaaacaaacaactttatgctctgctgccatagctggagaacccttaggaccttgcacttttcctatttccgtaaggcccgattcaaataatccacagcagtttattcatgaacacac

SEQ ID NO: 118698 - DNA, 1002 bp, Homo sapiens
atgaacgcaggatgtgggcaaactcacgactgcgcctaccgccagaagagaccggaggacgtgaacgaagaaggtcggctggagcagaggaaccgaaaacgacaagatgaatggggaccccgagacaagcctgccagcagcggatataaggcaggcactcttgatgtggaaaactggaacagagcgggagaaggattgaaacatgctcatcaaaaaggtcttaaagttgattcttctgctttctgtacttgcagtctaattcgtactgtacttatgccgttatctccttattattctgcgggacagcaggctgagtctaaaaatctgaaagaatctgttgtcccacccacagcttcaattgaaaataaaaaacaggagagggaggataaaaattggcctatactgcctcctccagttgcagaaacatctgtgccgcctccttcggtagcaggaatagagaccccaatacaaagaattttacgctctgctgccatagctggagagccctcaggaccttgtgcttttcctatttccgtaaggcccgattcaaataatccacagcagtttattcatgaacacaccccactagagtttaagttgttgaatgaattaaaaaccagtgtagttaatatcggggtacagagcccattcactttaggattgccagaatctgcatttggtgctatgcgtcttctaccctttgatgtaaaacactgggctcgaacttgcttgtctgctagtgcatatctgacatggaatttaaatgggcaagaaatgtgtacagaccaggttagacagaatcgtgctgctggacacggagacatcgcagaggatatgctattgggtaatggcccttattcagacctggaacatcaaatggaactaaacgcgcctgggccacaattcctgaagagggagtcccagtacaatcctttttacctttcatggaagggtcacaggagccctctgcacaatttcttgcaagattacgagaggcagtga

SEQ ID NO: 118699 - DNA, 575 bp, Homo sapiens
atggactcgcgactctacatgctctccttcctgcccttcctggtgctgctggtcctcatccggaacctcaggatcttgaccatcttctccatgctggccaacatcagcatgctggtcagcttggtcatcatcatacagtacattacccagattattactatgactgcagtcacaggaatttccaacacccatgaccactgtccattcaaaggtgttcgtgggctcgttgggtcagtgctaatctgtggaaatccagaccccagccggttgccactggtagcaagctggaagacctaccctctctcttcggaacagccattttttcttttgaaagcattggtgtgctgtaccagtctgtcaagcttctctacattgccggcatcctgtgcaccttgccctgcagttctacgtccctgcagaaatcatcatcccctttgccatccccgggtgtcaacacgctgggcactgcctctggatctgtccattcgcctgtcatggtctgcctgacatcagcccccatgacccgagtacccctttctgcaagtattccaccagaggccgaaggagatggctag

SEQ ID NO: 118700 - DNA, 778 bp, Homo sapiens
gtggtcctcatgcggaacctcatgagcgggaccatcttctccatgctggccaacatcagcatgctgggcagcttggtcatcatcatacagtacattacccaggaaatcccagaccccagccgggtgccactggtagcgagctggaagacctaccctctcttcttcggaacagccattttttcttttgaaagcattggtgtggatctgcctctggaaaacgagatgaagaatgcccgccactttccacccatcctgactttggggatgcccatagtcactaccctagacattggcatggcggctctgggctacctgcggtttggagaccgacaccaagggcagcataatcctcagcctgcctatctgctggtatcttcatgggctgtcaggtgaaggtccctctcagtcattttcagaaagggaaacaaaagcccaagtcattgtcccaaggtcagaggttaatgttccaaggaggccagtgtcagaacacagtggccgtggagagcagctctgtggtttgtcttgcaggctgtaccagtctgtcaagcttctctacattgccggcatcctgtgcacctatgccctgcagttctacgtccctgcagaaatcatcatcccctttgccatctcccgggtgtcaacacgctgggcactgcctctggatctgtccattcgcctcgtcatggtctgcctgacatcagcccccatgacccggagtacccctttctgcaagtattccaccagaggccgaaggagatggctagagattcctgtgtag

SEQ ID NO: 118701 - DNA, 1890 bp, Homo sapiens
atgggcaaggacttcatgtctaaaacaccaaaagcaatggcaacaaaaaccaaaattgacaaatgggatctaattaaacgaaagagcttctgcacagcaaaagaaactaccatcatagtgaacaggcaacctacagaatgggagaaaatttttgcaacctactcatctcacaaagagctaatatccagaatctacactgaactcaaacaaatttacaagaaaaaaacaaacaaccccatcaacaagtgggcgaaggatatgaacagacacttctcaaaagaagacatttatgcatccaaaaaacacatgaaaaaatgctcatcatcactggccatcagagaaatgcaaatcaaaaccacaatgagataccatctcacaccagttagaatggagatcattaaaaagtcaggaaacaacagacagcctattgtgggaccttgtgataattcagtcatcctcctctataaaatactggcaaaccgaatccagcagcacatcaaaaagcttatccaccatgatcaagtgggcttcatccctgggatgcaaggctggttcaacacatgcaaatcaataaatgtaatccagcatataaacagaaccaaagacaaaaaccacatgattatctcaatagatgcagaaaaggcctttgacaaaattcaacaacccttcatgctaaaaactctcaataaattaggtattgatgggatgtatctcaaaataataatagctatctatgacagacccacagccaatatcatactgaatgggcaaaaactggaagcattccctttgaaaactggcacaagacagggatgccctctctcaccactcctattcaacatagtgttggaagtgctggccagggcaatcaggcaggagaaggaaataaagggcagtcaattaggaaaagaggaagtcaatttgtccctgtttgcagataacatgattgtatatctagaaaaccccatcatctcagcccaaaatctccctaagctgataaacaacttcagcaaagtctcagtatgcaaaatcaatgtgcaaaaaccacaagcattcttatacaccaataacagacaaacagagagccaaatcatgagtgaactcccattcacaattgcttcaaagagaataaaatacctagtaatccaacttacaagggatgtgaaggacctcttcaaggagaactacaaaccactgctcaatgaaataaaaggatacaaacaaatggaagaacattccatgctcatgggtaggaagaatcaatatcgtgaaaatggccatactgtccaagtaacgaccgggggtaccgagctgattgggatttgtttagcggcttctcaaccccctgttcacgttgtggggagtcttacactgtgtgttggtttaattgacccggtattcgaatatgttgggcccaagttttattcccccagtgggtcttcaaatatggtcaacaatgacatgattgtatatttagaaaaccccattgtctcagcccaaaaactccttaagccgataagcaacttcagcaaagtcttagtacacaaaatcaatatgcaaagatcacaagcagcatttgtatacaccaagagtagacaaacagagagccaaatcacaaggaaactcccattcacaattgctacagagagaataaaatacctagaaatacaattcacaaggaatgtgaaggacctcttcgaggagaactacaaactactgctcaaggaaataaaagaggacacaaacaaatggaaaaacattccatgctcatggacaagaagaatcaatatcgtgaaaatggccatactgcccaaagtgatttatagattcagtgctacacccatcaagctcctattgacttttttcacagaattagaaaaactgctttaa

SEQ ID NO: 118702 - DNA, 752 bp, Homo sapiens
atggaatcgaagaagaccctgtatagccaagacaatcctaagcaaaagaacaaagctggaggcatcacactacctgacttcaaagtatactgcaagtctacagtaaccaaaacagcatggtactggtaccaaaacagacatatagaccgatggagcagaacagagacttcagaaataacaccacacatttacaaccatcagatcgttgacaaacctcataaaaacaagcaatggggaaaggatctcttattcagtaaatggtgctgggaaaactgggtagccatatgcagaaaactgaaactgaacctcttccttacacgttatacaaaaattaactcaagatggattaaagacttacatgaaaaactcaaaaccataaaaaccctagaagaaaacctaggcaataccatccaggacataggcataggcaaagacttcatgacgaaaatgccaaaagcaattgcaacaaaagcaaaaattgacaaatgggatctaattaaactaaagagcttctgcacagcaaaagaaactatcatcagagtgaacaagcaacctacagaatgggagaatatttctgcaatctacccatctgacagaagtctaatatccagaatttacaaggaatttaaaaaatatttacaagaggctggatgcagtggctcacacctgtaatcccatcactttaaaaggccaaggcaggtggatcacttgaggtcaggagttccagaccagcctggtcaacatgatgaaac

SEQ ID NO: 118703 - DNA, 579 bp, Homo sapiens
atgagagtaatatcttccttaccattcagtgccacaaaggaatctgaaagacaaaagggaggagaaggttacttaatgttttacgctctgcttggggcgacttacataagtgggaatgagctaacacagaactatgccagcgtatggtccccgatactaaatgatggtcaagaggaacagaatacctcacgcagcaacgttgatgtcctgtacctgggtagtataaaggttccctcagaaccttcaagggcaggcagggaccatatttatactgttgatatagacacatcacacacggaagaaatttattgtagcaaaaaactgacatggaaatctagacaggccgatgtagacacatgcagaatgaagggaaaacataagctgctaggcctgcatcatgaactacttaggcgcacacaggattatggacacaaagccggctgcccagagtcttgtcttctgagtgtacgccgatgcccacctccgcagtccaaggcccacagggagtctgtggaagagctcataaaaggctgccgcagacatgcagggttttgtgcctgtggtcatataacaacataa

SEQ ID NO: 118704 - DNA, 774 bp, Homo sapiens
atggtgacatcatgcaatggattatggaagcacaacacaaaagttcctgccatgcatgagatggatacattggaaccattcggggatgaattcagcggaatggccagatgcccatatgatgccaaacatgccaacgttgcactgtttgcaggctgcttcaggctcctgcggggctttgagatggtggagaggagacgtaaggaattggaaactgtcatatttcacttccatagccgtaacccacgttgttaccttctggttggacagattcccaatggagacctttcggttggtctctgtgtgggtcattctctctttggagactttaactgcagtggaaatcacctttcctccttcagcccttgctcattcagtgccccactggccctgttgggtcccatctcccttccaggtgtgagtctgaccccgcctgctgaaggggacacaggtcaagctctccaagtggttcttttaaagcctatctcagctggattgaaaagagggaagtcacccttccttctcaaccccaatgcagggagagagcatttgtccacaagactcagagcacactctcaactctcttggaaggaaggcagcttccttaaccccaaccatgttacagcctctaggcagattatggccaggggacaaaacttcataatggctgccataggtggtctagaacttcactttggattggggctttcttggcttctaatgttcactgatacttctcagcctctggagcctcagccaaaactgaaacacagttga

SEQ ID NO: 118705 - DNA, 889 bp, Homo sapiens
ttcccagaagattctgagccaatcagtatttcgcatggcaactatacaaaacagtatccggtgtttgtgggccacaagccaggacggaacaccacacagaggcacaggctggacatccagatgattatgatcatgaacggaaccctctacattgctgctagggaccatatttatactgttgatatagacacatcacacacggaagaaatttattgtagcaaaaaaactgcatgggaaatcttagacaggccgatggtagccacatgcagaatgaagggaaaacataaggatgagttgccacaactttattaaagttcttctaaagaaaaacgatgatgcattgtttgtctgtggaactaatgccttcaacccttcctgcagaaactataagatggatacattggaaccattcggggatgaattcagcggaatggccagatgcccatatgatgccaaacatgccaacgttgcactgtttgcagatggaaaactatactcagccacagtgactgacttccttgccattgacgcagtcatttaccggagtcttggagaaagccctaccctgcggaccgtcaagcacgattcaaaatggttgaaagaaccatactttgttcaagccgtggattacggagattatatctacttcttcttcagggaaatagcagtggagtataacaccatgggaaagctgctaggcctgcatcatgaactacttaggcgcacacaggattatggacacaaagccggctgcccagagtcttgtcttctgagtgtacgccgatgcccacctccgcagtccaaggcccacagggagtctgtggaagagctcataaaaggctgccgcagacatgcagggttttgtgcctgtggtcatataacaacataa

SEQ ID NO: 118706 - DNA, 3039 bp, Homo sapiens
atggtcctccttaaggtggacccaggcttatgggggtcctccttaagggtcctccttaaggcggaccctccttatgggacccaagctcatgccgaacgacacggcagggccttggcgggggggttgggggtaggagaacaaagccagagtttggaccttctgaggatgtcccacacatacggtgctttgttcttgcccagagcagctgttagttcatggtgtgcctctgtgagaattagaaaaataaagaaatctccccttctagatggtgctccactgctctatgagcctgacacctggcttggtaagtggagctccagctggactctcgtctttactcaccccttcagcgccgcactgacgcacagcgctttgactgcccggtctgacacagggtccctgactctgtctccagatggaaaactatactcagccacagtgactgacttccttgccattgacgcagtcatttaccggagtcttggagaaagccctaccctgcggaccgtcaagcacgattcaaaatggttgaaagaaccatactttgttcaagccgtggattacggagattatatctacttcttcttcagggaaatagcagtggagtataacaccatgggaaaggtagttttcccaagagtggctcaggtttgtaagaatgatatgggaggatctcaaagagtcctggagaaacagtggacgtcgttcctgaaggcgcgcttgaactgctcagttcctggagactctcatttttatttcaacattctccaggcagttacagatgtgattcgtatcaacgggcgtgatgttgtcctggcaacgttttctacaccttataacagcatccctgggtctgcagtctgtgcctatgacatgcttgacattgccagtgtttttactgggagattcaaggaacagaagtctcctgattccacctggacaccagttcctgatgaacgagttcctaagcccaggccaggttgctgtgctggctcatcctccttagaaagatatgcaacctccaatgagttccctgatgataccctgaacttcatcaagacgcacccgctcatggatgaggcagtgccctccatcttcaacaggccatggttcctgagaacaatggtcagataccgccttaccaaaattgcagtggacacagctgctgggccatatcagaatcacactgtggtttttctgggatcagagaagggaatcatcttgaagtttttggccagaataggaaatagtggttttctaaatgacagccttttcctggaggagatgagtgtttacaactctgaaaaatgcagctatgatggagtcgaagacaaaaggatcatgggcatgcagctggacagagcaagcagctctctgtatgttgcgttctctacctgtgtgataaaggttccccttggccggtgtgaacgacatgggaagtgtaaaaaaacctgtattgcctccagagacccatattgtggatggataaaggaaggtggtgcctgcagccatttatcacccaacagcaggacacagagaggctttgttgtctttgtggtcaccgggtccactttacacagatgcctattaatcacttcactatggagacagacacatccatcatatcacagcagctcagaaacgggccgtccagtgaaagggggtgagaggggaaagtgcacacttaaccatttcgagttaggttactggttgcctgtgtcttacacgcttagggtggtaattggggtggggttgcttaaaaggcaaacacttttccccagacggaggctccggtggccacaagggggtcgtcggaaaagatcccaactggaagcccagagagtgattcgggaaagttacctcaaaggccacgaccagctggttcccgtcaccctcttggccattgcagtcatcctggctttcgtcatgggggccgtcttctcgggcatcaccgtctactgcgtctgtgatcatcggcgcaaagacgtggctgtggtgcagcgcaaggagaaggagctcacccactcgcgccggggctccatgagcagcgtcaccaagctcagcggcctctttggggacactcaatccaaagacccaaagccggaggccatcctcacgccactcatgcacaacggcaagctcgccactcccggcaacacggccaagatgctcattaaagcagaccagcaccacctggacctgacggccctccccaccccagagtcaaccccaacgctgcagcagaagcggaagcccagccgcggcagccgcgagtgggagaggaaccagaacctcatcaatgcctgcacaaaggacatgccccccatgggctcccctgtgattcccacggacctgcccctgcgggcctcccccagccacatccccagcgtggtggtcctgcccatcacgcagcagggctaccagcatgagtacgtggaccagcccaaaatgagcgaggtggcccagatggcgctggaggaccaggccgccacactggagtataagaccatcaaggaacatctcagcagcaagagtcccaaccatggggtgaaccttgtggagaacctggacagcctgccccccaaagttccacagcgggaggcctccctgggtcccccgggagcctccctgtctcagaccggtctaagcaagcggctggaaatgcaccactcctcttcctacggggttgactataagaggagctaccccacgaactcgctcacgagaagccaccaggccaccactctcaaaagaaacaacactaactcctccaattcctctcacctctccagaaaccagagctttggcaggggagacaacccgccgcccgccccgcagagggtggactccatccaggtgcacagctcccagccatctggccaggccgtgactgtctcgaggcagcccagcctcaacgcctacaactcactgacaaggtcggggctgaagcgtacgccctcgctaaagccggacgtaccccccaaaccatcctttgctcccctttccacatccatgaagcccaatgatgcgtgtacataa

SEQ ID NO: 118707 - DNA, 483 bp, Homo sapiens
atggagggtgtagaagagaaagagaaggttcctgctgtgccagaaacccttaagaaaaagcaagggaatttcgcagagctgaagatcaaaacccaaaatggcatttgtcctcaggatcagaggtgtcagtggtgtgagcccaaaggtccgaaaggtgttgcagcttcttcgccttcatcaaatcttcagtggaacctttgtgaagctcaacaggcttcagttaacatgctgaggattgtagagccatatatagcatgggggtacccaaatctgaagtcagtaaatgaactaatctacaagcgtggttatggcaaaatcaataagaagcgaattgctttaacagataacactttgattgttccatctcttggtaaatatggcatcctctgcatggaggatctgattcatgagatctatactgttggaaaacacttcaaagaagcaaataacttgctgtggcccttcaaattatcttcgccatga

SEQ ID NO: 118708 - DNA, 442 bp, Homo sapiens
  misc_feature (1)...(442): n = a,t,c or g
tggaattcggcaaaatcaataagaagcgaattgctttgacagataacgctttgattgctcgatctcttggtaaatacggcatcatctgcatggaggatttgattcatgagatctatactgttggaaaacgcttcaaagaggcaaataacttcctgtggcccttcaaattgtcttctccacgaggtggaatgaagaaaaagaccacccattttgtagaaggtggagatgctggcaacagggaggaccagatcaacaggcttattagaagaatgaactaaggtgtctaccatgattatttttctaagctggttggttaataaacagtacctgctctcanattgnnnnnnnnnnnnnnnnnnnnnnnnnnnnnnnnnnnnnnnnnnnnnnnngccgcccctttaattaaaagggccctttaaaaccccgttaaaaaccctggggg

SEQ ID NO: 118709 - DNA, 933 bp, Homo sapiens
cctataaggaaaaaacttttaccttgcaagcccgggtaaactttggcccccccaaggattctttaaaacggccgccccttttttttttttttcaaatttgagagcaggtactgtttattaaccaaacccagcttaagaaaaataaccagggtaagacaccttaagttcaatccttcctaataagcctgttggatctggtcctcccctgttgccagcatctcccaccttcctacaaaaatgggtggtctttttttattccgttcccccgtggttgaagaaagccaatttgaaagggccaccaggaagttatttgcctcttttgaagcggttttccaacaggtatagatctcatgaatcaaatcctccatgcagatgatgccgtatttacccaagagatcggagcaatcaaagcggttatctgtcaaagcaattccgcttcttattgattttgccataaccacggcttgtaagattagttcatttactggacttcagattgggggtacccccatggcaatatatggctcctaacaatccctcagcatggttaatcgaagccttggttgagcttcacccaaggttccattgaagatttgacgaaggcgaagaaagctgcaacaccttttcgaacctttggggctcactccattggatacctctgattctgatgacaaacgccgaatttggggttctgcaggtacatagaagttggccagcttttctagccgtcctcgccaagggaaaggcagtttagaacagctgcatagaagccttgtgatagtgctttgctttttcatagattagcttgctgccttgcctttcgaaagcatctgttgggcaaacttctttctcaaggcgcttgatctacagctctgcgaaattccttcgctttttcttaagggtttctggcacagcaggaacctccttcttctc

SEQ ID NO: 118710 - DNA, 404 bp, Homo sapiens
cccatactcttttccacagccaaacatagggtttggcattccctccaatattgcaaaaggaatcgcccacatccttgcctgtggatttcattcacaagtcctgtggctctctctacatcccagccaccatgtgttatttcctgtttatgtatatgacatcaaaggtgcaggaagtaatgaactaaattggaaggataaacatgtagaaaaatagaggtaaatactgactacataaaaccataagaataagaattttggatgatctattatatatctatttatctaacatctatttgttcctccatctgtaatgaaaatattttacagttagagaacagagaaaaaagtaggaatacatgaatttaaattttaattcttctcagattgtctcacagcatcattcc

SEQ ID NO: 118711 - DNA, 990 bp, Homo sapiens
tcatatggcaataccattttgatgttttgaggaactaacatactcttttccacagcaaacatagggtttggcattccctccaatattgcaaaaggaatcgccacatccttgcctgtggattttattcacaagtcctgtggctctctctacatcccggccaccatgtgttatttcctcagccgctctttgcccccgccgccatgggtttttgccgccgcggcttcttgcccccctcgccgcggctttctgcccccgcccccgttgctttttgcccctgccgccacggctttttgcacctgcccccgttgatttttgcccccgccgttgcggctttctgcccctgccgccgagggtttttgcggtttcatgcccccgccgtcgtggccttttgcctccgctgctttttgccccctctgccgcggctttttgcggctttttagccccttcgccgtggctttttgcggcttttggcacccgatgccgcggctttttggggcttttggtccccgccgcagcggcttttttcccccgccgcctcaggtttttcctgccgcggcttttttcccccgccgccgccgtgactttttgccacccctgctttttgcccccgccgccgcggctttctgtcccggccgccgcatctttttgccgccgcggcttccagcaggagatacggacagtggagataagggggtcggggaccagggttgggctccagcaccagactggacatctccctcggggccccagttcactcccggccgagttgcatgcttgagcccgcgtctctcccttggaggcttctcctccctcctgcactcgctgatgcagcagccggaggacctgggaccagccctcaccttgggcaggatttgtggggtgggtgcgtgttgggaactttgatggaggctcgaggggcccgtgggtggggtgggctgtgcgcggacgtccccttacaccccgaatttccatctggtgcagccttctcat

SEQ ID NO: 118712 - DNA, 1182 bp, Homo sapiens
atgaagctgtggaccttcgcggtgagtgttacagctcttaagagtgctgactggtgcatttacaatcctttagctagacacagagcactgattggtgcatttttacagagtgctgattggtgcatttacaatcctttagctagacacagagcgctgattgaacaactaagactttggtacagcccattagctctccctgtggataccgtggactacacaatgccgtgggtgtctgtgagtcaagccattctgactgctgctttgacactgctttccactgtggtgaccacacccacctcatctttggtgattaaggacagcccatgttccctgccaccccaggattcaattatcctcattttacttaaagatcccagtccagtggctgcagttcctgctgtaacattttgcctactgagagcacaagctcaaagctcttccaggatactgggctcctctcacaatattctttctcatgatcgttgtgaggacaagatccaggcagatcacactggactcccagcactgaatctggctcgaggggacatcaaatttgactgggtcatggggctcaggagcatcactctcaaaaatagcagtacaggaagaggcgatggccctaaacagcatttgcaggcagatcccatgttaatcatttatggggagacagagagaaagaggagacactccaggaagacctgcaggtgggagtaccaggttgaaaccaaggacacattcctggaggagctgctgtttgagccagctctgagaacaggtggggacaggactggagaggaggagggggtcccctatgagcaaagactggccaccaccccatctaacacccccacagggcccctgtggcatccctgtccagtccctgtcaccacccagtttttccctctggacccaggaattcaaagtaagcaaggaggtccactgctccagttgactgcaaataattacaaccttgagcccaagcagcactttgggtcctggtttgggaccatgaagcggctcggcagccagaaggggttgtccagccagcacctgggctttggccctcctcaagaaggtggaggaagtttcaggcacctggctcctcaggtgtctgccatccaggtgctcttcaggcctgcccagaagagctctcttgatccagctagaactggccagaactga

SEQ ID NO: 118713 - DNA, 565 bp, Homo sapiens
atgaagctggttgcagtgtttgataagcaagatctacatcatggaggtgatgacatcagtgccagctccatgcatacccagagcccggagagatttactagtgctagtgagcttggcaccaacaatgtctcagccttctcagtctgatcaagcagcaagtgaaattgaggtcacatcttcagtacttcatgcaagcagccagaaggggttgtccagccagcacctgggctttggtgctcctcaagcaggtggaggaagtttcaggcacctggctcctcagcgaaaagaggttttggaggaatattttaagtatgatcctgaacacaaattgatcttcagatttgttcgtactctgtttaaagccatgaggctaacagctgagtttgcaatcgaaataacacatggtggccgggatgtagagagagccacaggacttgtgaataaaatccacaggcaaggatgtggcgattccttttgcaatattggagggaatgccaaaccctatgtttgctgtggaaaagagtatgttagttcctcaaaacatcaaaatggtattgccatatga

SEQ ID NO: 118714 - DNA, 684 bp, Homo sapiens
atgggcaagtacgcagaggccctgagaagccagcagaaggcagtgctgatgagcgtgcgggtgatgggcatcgagcaccccaacaccatccaggaaaacatgcacctggccctgcactgcttcaccagcaggcagctgtccctggccctcagcctgctgcagggcgcccactacctcatgcgctggtgcttggggaagacaccccgaggtggcgtgctggacaacatcaggcgggtgctgcacagggtgatggagtacgacctgtcgctgtgcttcctggacaacgcgctggccgtcagcaccaagtaccaagggcccaaagctctcaaggtggcccttggccaccacctcatcacctcggtctatgagagcaaagctgagtttccggtcggccctgcagcaccagaaggaagggctggctgcacaccctctctgggcgaggaccaggagaagaccaaggagagctctgagtacctcaagtgcctgacccagctggccgtggccctgcggcgcgccatgcatgagatctaccgcaacggctccagcaacaacatcccgcccctcaacttcacagcccccagcatggccagcgtcttggagcagttcaaaggcatcaatggcatcctcttcattcctctcagccaaaaagacttggagagtctgaaagccgaggtggcgcagtga

SEQ ID NO: 118715 - DNA, 443 bp, Homo sapiens
tgtgtggcagtctggcggagattctattacttcaaaaaccaacataattacctgtgttaattgctacttgtatacttgtattgactcatcctttaatcaatatcatagtattttaatagtcagagccagacaagatatttggctccctgtagccttacataggccttgggaatcttccccctttatccatgttattaacaatattctacagaaaattcttaaaaggagtacacaatttatttttacattaattgcaataataatgggcttgattgctgttactgtgattgctgctactgctggagttgcattacgtcaatctattcaaactgttcattttgtggataaatggcaaaaaaattctactcggatgtggaattctcacgtattgatcaaaaattggctaatcaaattaatgatctaagacaaactgttatatggat

SEQ ID NO: 118716 - DNA, 377 bp, Homo sapiens
ctttgctttcacttggactgaccctgacacccatcaggctcagcaaattacctgggctctactgccgcaaggcttcgcggacagcccccattacttcagtcaagctcaaatttcttcctcatctattacctatctcggcataattcttcatgaaaacacccgtgctctccctgctgaccatgtctgactaatctcccaaaccccaatctcttctacaaaacaacaactcctttccttcctaggcatggttaggtacttctgcctttggatacctagttttaccatcctgactaaaccattatattaattcacaaaagcaaacctagctgaccccacagatcctaaatcctttccccactcctctttccgttccttga

SEQ ID NO: 118717 - DNA, 1446 bp, Homo sapiens
atggccaaagccgtcctgagcaaaaagaacaaaactggaagcaccacactacccgacttcaaaatatattacaaggatatagtaactgaagaacctggtattgaaaccctgaggcacacaagtagcacaaagttttccaaaggcctacctagtcgtgaatctttctcagagaagcaaaacaaaacaacaacccacctgcacccaggtgaaataaacagctttattgctcacacaaagcctgcttggaggtctcttcacacggacgcgcatgaaatttggtgccgtgactcggatcaggtgaactcccctgggagatcaatcccctgtcctcctgctctttgctccatgagaaagatccacctacgacctctggtcctcagaccagccagcccaaggaacatctcaccaattttaaatccgctacacctcattgctgcccttcttcccaatccaaagcctccttttcgtcctcctcttgtatcccccgaccttaacccacaagtaaaagatatctctactccctcctgggcaaccgatcatgtacacctcaccgtctcattaaaaccttatcacccttaccctgctcaatgccaatatcccatcccacagcacgctttgaaaggattaaagcctgttatcactcgcctgctacagcatggccttttaaagcctataaactctccttacaattcccacattttacctgtcctaaaaccagacaagccttacaggttagtagttcaggatctgcgccttatcaaccacattgttttgttgcctatccaccccatggtgccaaacccatatactctcctatcctcaatacctgcctctacaacccattattctgttctagatctcaaacatgctttctttactattcctttgcacccgtcatcccagcctctcttcgctttcacttggactgaccctgacacccatcaagctcagcaaattacctaggctgtacagccgcaaagcttcacagacagcccccattacttgaatcaagcccaaatttcttcttcatctgttacctatctcggcataattctcataaaagcacacgtgctctccctgccaatcgtgtccgactgatctctcaaaccccagaaccttctacaaaacaacaactcctttccttcctaggcatggttagtgcggtcagaattcttacacaagagccaggactgcaccctgtaggctttctgtccaaacaacttgaccttactgttttagcctagccctcatgtctgcgtgcagcggctgccactgctttaatacttttagaggccctaaaaatcacaaactatgctcaactcactctctacagttctcataacttccaaaatctattttcttcctcatacctaacgcatatactttctgctccccagctccttcagctgtactcactctttgttgagtctgccacaatcaccattg

SEQ ID NO: 118718 - DNA, 2616 bp, Homo sapiens
acaacataccagaatctctgggatgcattcaaagcagtctgtagagggaaatttatagcactaaatgtccacaagagaaagcaggaaagatccaaaattgacaccctaacatcacaattaaaagaactagaaaagcaagagcaaacacattcaaaagctagcagaaggcaagaaataactaaaatcagagcagaactgaaggaaatagagacacaaaaaacccttcaaaaaattaatgaatccaggagctggttttttgaaaggatcaacaaaattgatagaccgctagcaagactaataaagaaaaaaagagagaagaatcaaatagacgcaataaaaaatgataaaggggatatcaccaccaatcccacagaaatacaaactaccatcagggaatactacaaacacctctacgcaaataaactagaaaatctagaagaaatgcataaattcctggacacatacactctcccaagactaaaccaggaagaagttgaatctctgaatagaccaataacaggagctgaaattgtggcaataatcaatagcttaccaaccaaaaaaagtccaggaccagatggattcacaggcgaattctaccagaggtacaaggaggaactggtaccattccttctaaactattccaatcaatagaaaaagagggaatccatgaacattgatgcaaaaatcctcaataaaatactggcaaaccgaatccagcagcacatcaaaaagcttatccaccatgatcaagtgggcttcatccctgggaggcaaggctggttcaatatatgcaaatcaataaatgtaatccagcatataaacagagccaaagacaaaaaccacatgattatctcaatagatgcggaaaaggcctttgacaaaattcaacaactcttcatgctaaaaactctcaataaattaggtattgatgggacgtatttcaaaataataagagctatctatgacaaacccacagccaatatcatactgaatgggaaaaaactggaagcattccctttaaaaactggcacaagacagggatgccctctctcaccactcctattcaacatagtgttggaagttctggccagggcaatcaggcaggagaaggaaataaagggtattcaattaggaaaagaggaagtcaaattgtccctgtttgcagatgacatgattgtatatctagaaaaccccattgtctcagcccaaaatctccttaagctgataagcaacttcagcaaagtctcaggatacaaaatcaatgtacaaaaatcacaagcattcttatacaccaacaacagacaaacagagagccaaatcatgagtgaactcccattcacaattgcttcaaagagaataaaatacctaggaatccaacttacaagggatgtgaaggacctcttcaaggagaactacaaaccactgctcaaggaaataaaagaggatgcaaacaaatggaagaacattccatgctcatgggtaggaagaatcaatatcgtgaaaatggccatactgcccaaggtaatttacagattcaatgccatccccatcaagctaccaatgactttcttcacagaattggaaaaaaccactttaaagttcatatggaaccaaaaaagagcccacatcaccaaagcaatcctaagccaaaagaacaaagctagaggcatcacactacctgacttcaaactatactacaaggctacagtaaccaaaacagcatggtactggtaccaaaacagagatatagatcaatggaacagaacacagccctcagaaataacgccgcatatctacaactatctgatctttgacaaacctgacaaaaacaagcaatggggaaagggttccctatttaataaatggtgctgggaaaactggctagccatatgtagaaagctgaaactggatcccttccttacaccttatacaaaaatcaattcaagatggattaaagacttaaacgttagacctaaaaccacaaaaaccctagaagaaaacttaggcattaccattcaggacataggcatgggcatggacttcatgtctaaaacaccaaaagcaatggcaacaaaagacaaaattgacaaatgggatctaattaaactaaagagcttctgcacagcaaaagaaactaccatcagagtgaacaggcaacctacaaaatgggagaaaattttcacaacctactcatctgacaaagggctaatatccagaatctacaatgaactcaaacaaatttacaagaaaaaaacaaacaaccccatcaaaaagtgggcgaaggacatgaacagacacttctcaaaagaggacatttatgcagccaaaaaacacatgaaaaaatgctcaccatcactggccatcagagaaatgcaaatcaaaaccacaatgagataccatctcacacctgttagaatggcaatcattaaaaagtcaggaaacaacaggtgttggagaggatgtggagaaataggaacacttttacactgttggtgtgataaactggatgaagaaaacatggcacatatacacaatggaatactatgcatccataaaaaagaatgagttcatgtcctttgcaggggcatagatgaagctggaaaccatcattct

SEQ ID NO: 118719 - DNA, 447 bp, Homo sapiens
atgcagaaccaggagaagtttggagagctcatctctgagtgggcaccctatgggagaccaagacctcagatagctgtgggggaccatcatatctcagtttatgatggggaggtcaactggaggatgtctagtctgcaggcctcagcagctgggaaggattatgctaatcggggaactgagtggggagaggagcctagccagatgctacgtcatgagctgctcagtggagagatgtgcgtgtcaaggaaccgagggcagcctctggccaacagcgagagaagatctgaggccctcagtcccgtaaccccaaagaaactaattcctgccgacggccacaagagtgatccaggaaggacatggatgaagctggaaaccatcattctcagcaaactaacccaggaacagaaaaccaaacaccacatgttctcactcataagtgggagttga

SEQ ID NO: 118720 - DNA, 2553 bp, Homo sapiens
atggaatactatgcagccataaaaaaggatgagttcatgtcctttgcagggacatggatgaagctgacaaccatcattctcagcaaactaacagaagaacagaaaaccagacaccgctgttttcactctaacgcctggatgagctgggtccgccaggctccagggaaggggctggagtgggttggctgtattaaaagcaaagctaatggtgggacaacagactacgctgcacctgtgaaaggcagattcaccatctcaagagatgattcaaaaaacacgctgtatctgcaaatgatcagcctgaaaaccgaggacacggccgtgtattactgtaccacaggcacagtgaggggagatgagcccaccagccccagcactgacctccaagccaagcatgtccctgcctttgctgtggtctccagtgccatgaactcagccgctgtcctgggcaccagcccatcttccccgaccttcaccttcaccctcggacggcattactcgcgggactgcagcagcatcaaggctggccgccgctcctcctacctgctggccatcaccacggagcgctccaagtcctgcgatgatggactcaacaccttccgcgatgagggccaggttctgcggcacctgccaaaccgcatacccagcctgccgttgctccggagcttcttcacagacgggagtcaccagtggtctgtgcgggtggctgatgagaccagaatgaggcaaaggcatctgctcagtgtcgtagtgatggtccaagaaatgatccagattgtctccatgctaatcaaatatgggttcactgtgcccaattccaggtgcagctggtgcagtctggggctgaaggaggaagcttggggcctcagtgaaggtgtcccgcaaagctctggatacaccttcaccagctacgatattcactatcctggtgaggagccaccccacatctgtgccctccttagtgtccacaccatggggtctgtgctgatctgggcttctcttgtcatcactctcaatatccaggttccccgtggatcaggccctgctgtggctgctcaaagggggacaggaggggactgcctggtagatgcttctcagaaccaccagggggtgctcaggacatcagggggcgctaagaaccatcaggagatgctcaggacaccagggggtgctcaggacaccatgggttactcaaaaccaccagggggcgctcagaacacaagggggcactcaaaaccaccagagggtgctcagaaccaccatggggcactgatgacaagaaaggatgttcagaaccacctggggtcatgtgaaatagcatgtgtttgctaccccttgcatcatgattgtaagttttttgtggcctccccagccatgaagaactgtgtccagtgtgaggttcagctggtgcagtctgggggaggcttggtacatcctggggggtccctgagactctcctgtgcaggctctggattcaccttcagtagctatgctatgcactgggttcgccaggctccaggaaaaggtctggagtgggtatcagctattggtactggtggtggcacatactatgcagactccgtgaagggccgattcaccatctccagagacaatgccaagaactccttgtatcttcaaatgaacagcctgagagccgaggacatggctgtgtattactgtgcaagagacacacaccctccagtgtgtcatgtggagactcacctgggaatgcaagtggccaacagtagtgaagaggatgagcttgtgtggtcaaaatgggatgtggatgtgaaatttatcctgtgctgtgcaaagtaccacagagagcagctgcaggagtcagccctggacctgaagagcctgcactgcccctctgcatcacctgcactgtttctggccactccatcacaaccagtccttactactgggcctggatctgccggctcccagggaggggctgaaatgggtgcccacttcctggtgcagctggtgcagtctggggctgaggtgaagaagcctggggcctcagtgaaggtctcctgccaggcttctggatacaccttcacctactgctacttgcactggagagagcctgtctctttcatctgtggcaggtgcatcctgctgacacttttacttggtgattgtttgtggggtgaaggggcttggacacagggggatgttctccaaccttcggaccgagcctccttcttagctatgggtggtgcccagtgtgaggtgcagctggtggagtctgggggaggcttggtacagcctggggggtccctgagactgtcctgtccagcctctggattcaccttcagtaaccactacatgagctgggtccgccaggctccagggaagggactggagtgggtttcatacattagtggtgatagtggttacacaaactacgcagactctgtgaagggccgattcaccatctccagggacaacgccaataactcaccgtatctgcaaatgaacagcctgagagctgaggacacggctgtgtattactgtgtgaaacacacagcgaggggaagtcagtga

SEQ ID NO: 118721 - DNA, 272 bp, Homo sapiens
atggaatactatgcagccataaaaaaggatgagttcctgtcctttgcagggacatggatgacactggaaaccattattctcagcaaactaacacaagaacagaaaaccaaacaccacatgctctcactcctgctaaaagcacttactcaagagcccacagggagactgtggtgcaagatccagctctccgcactccaagcatgcagatttcaaactccacaaatgctggaacagcaaatgcaagccaagacagctcagccagctggtgtgag

SEQ ID NO: 118722 - DNA, 3048 bp, Homo sapiens
atgctttgcgcgctgtccctggcgctgtgcgcgctgtcgctgcccgtccgcgcggccactgcgtcgcggggggcgtcccaggcgggggcgacaaaggggcgggtgcccgaggcgcggcccaacagcatggtggtggaacaccccgagttcctcaaggcagggaaggagcctggcctgcagatctggcgtgtggagaagttcgatctggtgcccgtgcccaccaacctttatggagacttcttcacgggcgacgcctacgtcatcctgaagacagtgcagctgaggaacggaaatctgcagtatgacctccactactggctgggcaatgagtgcagccaggatgagagcggggcggccgccatctttaccgtgcagctggatgactacctgaacggccgggccgtgcagcaccgtgaggtccagggcttcgagtcggccaccttcctaggctacttcaagtctggcctgaagtacaagaaaggaggtgtggcatcaggattcaagcacgtggtacccaacgaggtggtggtgcagagactcttccaggtcaaagggcggcgtgtggtccgtgccaccgaggtacctgtgtcctgggagagcttcaacaatggcgactgcttcatcctggacctgggcaacaacatccaccagtggtgtggttccaacagcaatcggtatgaaagactgaaggccacacaggtgtccaagggcatccgggacaacgagcggagtggccgggcccgagtgcacgtgtctgaggagggcactgagcccgaggcgatgctccaggagcttgcagagctagaaagtgccctccaagagcagcatgaggtgaatgcatctttgcagcagacccagggagatctcagtgcctatgaagctgagctagaggctcggctaaacctaagggatgctgaagccaaccagctcaaggaagagttggaaaaagtaacaagacttacccagttagaacaatcagcccttcaagcagaacttgagaaggaaaggcaagccctcaagaatgcccttggaaaagcccagttctcagaagaaaaggagcaagagaacagtgagctccatgcaaaacttaaacacttgcagaagaaacttgaagatgccaaatctcaggagcaagtttttggtttagataaagaactgaagaaactaaagaaagccgtggccacctctgataagctagccacagctgagctcaccattgccaaagaccagctgaagtcccttcatggaactgttatgaaaattaaccaggagcgagcagaggagttgcaggaagcagagaggttcagcagaaaggcagcacaagcagccagagatctcacccgagcagaagctgagatcgaactcctgcagaatctcctcaggcagaagggggagcaggagaatgaagtttctagattagaagacataatgcagcatttaaaatcaaagaagcgggaagaaagggacttcattgatggaaatgttgagagtcttatgactgaactagaaatagaaaaatcactcaaacatcatgaagatattgtagatgaaattgagtgcattgagaagactcttctgaaacgtcgctcagagctcagggaagctgaccgactcctggcagaggctgagagtgaactttcatgcactaaagaaaagacaaaaaatgctgttgaaaagttcactgatgccaagagaagtttattgcaaactgagtcagatgctgaggaattagaaaggagagctcaggaaactgctgttaacctcgtcaaagctgatcagcagctaagatcgctccaggctgatgcaaaggatttggagcagcacaaaatcaagcaagaagaaatcttgaaagaaataaacaaaattgtagcagcaaaagactcagacttccaatgtttaagcaagaagaaggaaaaactgacagaagagcttcagaaactacagaaagacatagagatggcagaacgcaatgaggatcaccacctgcaggtccttaaagaatctgaggtgcttcttcaggccaaaagagccgagctggaaaagctgaaaagccaggtgacaagtcagcagcaggagatggctgtcttggacaggcagttagggcataaaaaggaggagctgcatctactccaaggaagcatggtccaggcaaaagctgacctccaggaagctctgagactgggagagactgaagtaactgagaagtgcaatcacattagggaagtaaaatctcttctggaagaactgagttttcagaaaggagaactaaatgttcagattagtgaaagaaaaactcaacttacacttataaagcaggaaattgaaaaagaggaagaaaatcttcaggttgttttaaggcagatgtctaaacataaaaccgacttagtagatactggattggcactgaccacctctagtaaagatggctttattagtagtttccacttgttctttcacctaaaggacctgcttcacaccaccaagcatcaggatgtgttgctcagtgagcagacccgactccagaaggacatcagtgaatgggcaaataggtttgaagactgtcagaaagaagaggagacaaaacaacaacaacttcaagtgcttcagaatgagattgaagaaaacaagctcaaactagtccaacaagaaatgatggcaaaccaaaaagatttggagagaagacaaatggaaatcagtgatgcaatgaggacacttaaatctgaggtgaaggatgaaatcagaaccagcttgaagaatcttaatcagtttcttccagaactaccagcagatctagaagctattttggaaagaaacgaaaacctagaaggagaattggaaagcttgaaagagaaccttccatttaccatgaatgagggaccttttgaagaaaaactgaacttttcccaagttcacataatgatcactactagacagcttttgagtcacaacagtcccagattggagtacggcaaagaagtgtccatcagagaggagtgtggcataatgacacaagctaaccatctgctggaagatatagcaaatgtgtga

SEQ ID NO: 118723 - DNA, 334 bp, Homo sapiens
atggaatactatgaagccataaaaaagaatgatcatgtcctttgcagggacatggatgaagctggaagccatcattctcagcaaactaacacaggagcggaaaaccaaacactgcatgttctcactcataagtgggagccaaatatgagattcttttatagcagctatgacattcaaggagctcttacagatgtccccaatactgtcacagtggagtttatcttacagaattgggccactctaagtgactacctgttgcctcaaagggtaacaggtctaacagaaagaactgtactccagaattgtaagtcttctagattctgcaactggaaga

SEQ ID NO: 118724 - DNA, 245 bp, Homo sapiens
atggaatactatgcagccataaaaaaggatgagctcatgtcctttgcagggacatgggtgaagctggaaaccatcattctcagcaaactatcacatggacagaaaaccaaacaccgcatgttctcactcatagacacagtggtagtgggcagtgatgatttcccattgttgcgagtccctggctgctgtgctagctcccttaatgccgcccatacctctgtaaacattaaacttgagcttactcc

SEQ ID NO: 118725 - DNA, 1171 bp, Homo sapiens
atgggcaaggacttcatgactaaaacaccaaaagcaatggcaacaaaagccaaaatagacaaatgggatctaattaaactaaagagcttctgcacagcaaaagaaacgaccatcagagtgaacagccaacctaaagaatgggagaaaatttttgtaacctatccatctgacaaagggctaatatccagaatccacaaagaatgtaaacaaatttacaagaaaaaaacaaacaaccccatcaaaaagtgggcaaaagatataaacaaacacttctcaaaagaagacatttatgcagccaacaggcacatgaaaaaatgctcatcatcactggtcatcagagaaatgcaaatcaaaaccataatgagataccatctcacaccagttagaatggcgatcattaaaaagtcaggaaacaacagatgctggagaggatgtggagaaacaggaatgcttttacactgtgggtgggagtgtaaactagttcaaccattgtggaagacagtatggcaattcctcaaggatctagaactagaaataccatttgactcagccatcccattactgggtatatacccaaaggattataaatcatgctgctataaagacacatgcacacgtatgcttattgtggcagtattcacaatagcaaagacttggaaccaacccaaaggtccatcaatgatagactggattaagaaaatgtggcatgtatacaccatggaatactatgcagccataaaaaaggatgagttcatgtcctttgtggggacatggatgaagctggaaaccatcatgctgagcaaactatcacaaggacagaaaaccaaacaccgcatgttctcactcacagctgcacagaagaaattttacctgagagttcatcaggcgaatggtagtttttgtgcccacatcttgttggaagttggctgtgggtgccccattaaacctcaggactgcgtcatgatcatctataaaccacaaagaaacagaaaagaggtgatgagcactggcaatatgcagaaaaagagaaagacgagaggcgggggagggggcaagggaataatgcttccccatctttaccccatcatgatccacagggcgaaatggcagtatttgtgtggtgctcaggtaaagctcctaggcagagatgaccacctgtctgccagccact

SEQ ID NO: 118726 - DNA, 192 bp, Homo sapiens
cagacttgtgtatgcggatacctgcttcagtaccatcaagttaaaagcagaagatgcttctacgagtgagaacatgcggtgtttggttttctgtgcttgcgatagtttgctgagaatgatagtttccagcttcatccgtgtcccaacaaaggacatgtactcatccttttttatggctgcatagtattccat

SEQ ID NO: 118727 - DNA, 1245 bp, Homo sapiens
tcaactcccacttatgagtgagaatatgcggcgtttggttttctgttcctgtgttagtttgctgaggatgatggcttccagcttcatccatgttccgacttgtgtatgttgaaccagtcttgcatcccagggatgaagctgacttgactgtggtggataagttttttgatgtgctgctgcatttgatttgccagtactttgttgaggatttttgcaccaatcttcgtcagggatattggcctgaagttttgttgtttttactgttgtgtttctgccaagtttcagtgttaggatgatgctggcttcataaaatgagttagggaggagtcccttcttttcaattctttgcaatagcttcagaaggagtagtaccagctcccttttgtacctctggtagaatttgactgtaaatccatctggtcctatgcctccatggacaatctgccttccagttgtccccaccacaggctggacagggtcaagtggcttcctcttgctgctgtggcaatccttcttaaagtgccctagtttgccacacttgtagcaattggcaggtgcaccttggggattctgtgttttataggtctgaagagcagccactagagcctctgcctttctcttatctctcttctctttttcctgggcttcatcctgatcctgtgtcctctgggtcccagcaaccttcatagatgccacacacggatgcaagtgtgacttccagccatggactaggaggattggcaggtagaaatagttgcatttacccatgctgtgccccagccctgtgtgctgactacctttggggttccccagatctatttcttcttttgagcttccaacacaaaggaaatgtaggagttggcttggctcattctccacaatttcaacaggggaattagggctcccctggacatagggctgatagggcttcccacagaaacaaatccttgccttgtcaggtgccttgacaaggtttggaaagttagcctgtaactttgtgtccaaatccttttcagatgtaggtttgaaagagaggtctgaggctttgtggacagcagtgtagaagtgttccctgttcaccatgttcatgctaacatctatttttcgattatggccgttcttgcaggagtaaggttgtattgcattgtggttttgatttgcatttccctgatcattagtgatgttgagcattttttcatgtttgttggccatttgtatatcttcttttgataattgtctattcat

SEQ ID NO: 118728 - DNA, 278 bp, Homo sapiens
atggaatactatgcagccataaaaaaggatgagttcgtgtcctttgtagggacatcgatgaagctggaaaccatcattctcagcaaactatcacaaggacagaaaaccaaacaccgcatgttctcactcataggatccagcctttttagctccctctccagtgccatgaagcaggcccctcaggccacctcaggactgatggagcctccaggtccctccacgcccattgttcaaagacccaggatcctgttggtgatcgatgatgcccatacagactg

SEQ ID NO: 118729 - DNA, 594 bp, Homo sapiens
gaattccctgagcaggccgggctgcctccttcctttacctggaaacaggcgtgtctgaggaagcaggagatgtagggtgcagccctggcctgccgcttgctgccagtaaggaaccaccttcccagacagagcctcagtttccccgattgtgaaataaggatactactggagaccttccttccagtctctgagagaaaataatgaatgtcaaaggaaaagtaattctgtcaatgctggttgtctcaactgtgatcattgtgttttgggaatttatcaacagcacagaaggctctttcttgtggatatatcactcaaaaaacccagaagttgatgacagcagtgctcagaagggctggtggtttctgagctggtttaacaatgggatccacaattatcaacaaggggaagaagacatagaccaagaaaaaggaagagaggagaccaaaggaaggaaaatgacacaacagagcttcggctatgggactggtttaatccaaacttgaaggaatccgaataactaaactggactctggttttctgactcagtccttctagaagacctggactgagagatcatgcggttaaggagtgggg

SEQ ID NO: 118730 - DNA, 891 bp, Homo sapiens
tatgttgcccacgctgatctggaactcccagtctaaggcgatcttctgccacctcagactaccaaagagcctggcgattaccgaagacaggtcatcttttttcattcggaagcatatcctttttcttttattcgcaaacaggtcgggcggggtagacaatccagctcttgaccagcctatgagcgagagcatgcggtgtttggttttctgtccttgtgatagtttgctcagaatgatggtttccagcttcatccatgtccctgcataggacatgaactcatccttttttatggctgcatagtattccatggtgtatatgtgccacattttcttaatccttaaccccactttttccagctggcccacattctgccgctctctatgtgggccgcgcgtcactgtcagcccccaggtaatcagcggcgcggcatcttccggccagcaggtcataatgggaatgcgattgagatcgacgtcatcgccagagacgattttttgttggcagggcgcaccacgcagccgctttgtcggcatgttcaatacttgcttaaactgcggcagtttatcaaacaggtcgcggaaaccttttggcggctccggctctttcagaaacgccaataatttaccaacttcacgcagcgccgaaacatcttcctgccccatgcccatcgccacgcgctttggcgtaccgaacaggttgcacagcaccggcattgagtagcctttagggttttcgaacaacagcgcaggcccaccggcacgcaaagtgcggtcagcaatttcagtgatttccagatgcggatccaccgggagcgtgatacgttttagctcaccctgctgttcaagcagcgtcaagaagtcgcgtaaatcgttatatttcatggcgtccat

SEQ ID NO: 118731 - DNA, 1539 bp, Homo sapiens
atggaatactatgcagccataaaaaatgatgagttcaagtcctttgttgggatatggatgaagctggaaaccatcattctcagcaaactatcacaaggacaaaaaaccaaacaccgcgtgttctcactcagagactataagctctcccattttcttatttctcttggcttcatacttcttaagagaaaagatgtgattgggttgtccagtcatcatccaggtgagcagtgctctcatgactcacctctcaggtccttgatggtctttgggccagagctgatctctggtcatagtcccttagagccagtggtggtgcctcgtcgaagtcatggctgcctgataggggctgtaaatctcaaatccagcaatcgaaccccagtggtacaggaatttgaaagagacttggcgggtcgtgcagaaatactggggaagacatccctgaagatctggaatgtgacacggagagactcagccctttatcgctgtgaggtcgttgctcgaaatgaccgcaaggaaattgatgagattgtgatcgagttaactgtgcaagtgaagccagtgacccctgtctgtagagtgccgaaggctgtaccagtaggcaagatggcaacactgcactgccaggagagtgagggccacccccggcctcactacagctggtatcgcaatgatgtaccactgcccacggattccagagccaatcccagatttcgcaattcttctttccacttaaactctgaaacaggcactttggtgttcactgctgttcacaaggacgactctgggcagtactactgcattgcttccaatgacgcaggctcagccaggtgtgaggagcaggagatggaagtctgtcacactgataaaagaggtgggttcccatggtcttgggcagctccccacctgtggtttttgcaggatacagccttgctccccgctgctctcacgggctggtgttcagtgtctgtggcttttccaggtgcacagtgcaagctgtcagtggatctatcattctggggtctggaggatggtggccctcttctcacagctccactaggcagtaccccagtagggactctgtgtaggggatctgaccccacatttcccttctgcactgccctttattccagttcccaacaagttctttatctccattgagatcgcttcagcctgaactttattgtccatatcactatcagcattttggtcaaagccattcaacaagtctctaggaagttccaaactttcccacatcttcctgtcttctgagctctccaagtctctaggaagtacaaacctctgcctgttacccatttcaaagtcacttccacattttctgtatcttgggaagaggattctagtttctatggctaggcttgggggagcatgggagagtgagaaaatgcggtgtttggttttctgttcctgtgttagtttgctgagaatgatggtttccagcttcatccatgtgcctgcaaaggacatgaactcatccttttttatggttgcatagtattccacggtgtatatgtgccacat

SEQ ID NO: 118732 - DNA, 619 bp, Homo sapiens
  misc_feature (1)...(619): n = a,t,c or g
atgtggcacatatacaccatagaatactatgcagccataaaaaaggatgagttcatgtcctttgctgggacatggatgaagctggaaaccatcattctcagcaaactaacacaggaacagaaaaccaaacaccgcatgttctcactcgtaagtgggagttcaggccactataacaaagtaccacaaggtggtttaagcaacaggaatttaattctttcagttctagaggctggggagtccaagatccccagtgagggctcttcctggctggcagatggccacctcctccctgtatccacacgtgatggagagcaagtaagctactgcctcttcctcttcttaaacccagaagttgatgacagcagtgctcagaagggctggtggtttctgagctggtttaacaatggcaatcggtatgaaaggctgaaggccacacaggtgtccaagggcatccgggacaacgagcggagtggccgggcccgagtgcacgtgtctgaggagggcactgagcccgaggcgatgctccaggtgctgggccccaagccggctctgtctgcaggtaccgaggacaccgccaaggaggatgcggccaaccgcaagctggnccaagctctacaag

SEQ ID NO: 118733 - DNA, 2386 bp, Homo sapiens
gccgtgtcgccaccatggctccgcaccgccccgcgcccgcgctgctttgcgcgctgtccctggcgctgtgcgcgctgtcgctgcccgtccgcgcggccactgcgtcgcggggggcgtcccaggcgggggcgccccaggggcgggtgcccgaggcgcggcccaacagcatggtggtggaacaccccgagttcctcaaggcagggaaggagcctggcctgcagatctggcgtgtggagaagttcgatctggtgcccgtgcccaccaacctttatggagacttcttcacgggcgacgcctacgtcatcctgaagacagtgcagctgaggaacggaaatctgcagtatgacctccactactggctgggcaatgagtgcagccaggatgagagcggggcggccgccatctttaccgtgcagctggatgactacctgaacggccgggccgtgcagcaccgtgaggtccagggctttgagttggccccccttcttgggttacttcaagtctggccctgaagttacaagaaaggaggtgtggcatcaggattcaagcacgtggttacccaacgaggtggtggtgcagagactcttccagggtcaaagggcggcgtgtggtccgtgccaccgaggtacctgtgtcctgggagagcttcaacaatgggcgactgcttcatcctgggacctgggcaaccaacattcaaccagtggtgtggttccaaacagcaatcggtatgaaagactgaaggccacacaggtgtctcaagggcattcggtacaacgagcggagtggccgggcctcgagtgcacgtgtctgaggagggcactgagcccgaggcgattgctccaggtgctgggccccagatgtcgctctgcctgcaggtaccgaggacaccgccaaggaggatgcggccaacccgcaagctggccaagctctacaaggtctccaatggtgcagggaccatgttacgtatccctctgggctgatggagaacgaattcacccagggggcccctgaagtcagaggactgcttcatcctggaccacggcaaagatgggaaaatctttgtctggaaagagcaagcatgcaaacacggaggagaggaaagctgccctcaaaacagcctctggatttcattcaccaagatgggattaccccaagcagattcaggtctcggttcctttccttgagggcggttgagaccccactgttcaagcaggtcttcaagaactggcgggacccagaccagacagatggcctgggcttgtcctacctttccagccatatcgccaacgtggagcgggtgcccttcgacgccgccaccctgcacacctccactgccatggccgcccagcacggcatggatgacgatggcacaggccagaaacagatctggagaatcgaaggttccaacaaggtgcccgtggaccctgccacatatggacagttctatggaggcgacagctacatcattctgtacaactaccgccatggtggccgccaggggcagataatctataactggcagggtgcccagtctacccaggatgaggtcgctgcatctgccatcctgactgctcagctggatgaggagctgggaggtacccctgtccagagccgtgtggtccaaggcaaggagcccgcccacctcatgagcctgtttggtgggaagcccatgatcatctacaagggcggcacctcccgcgagggcgggcagacagcccctgccagcacccgcctcttccaggtccgcgccaacagcgctggagccacccgggctgttgaggtattgcctaaggctggtgcactgaactccaacgatgcctttgttctgaaaaccccctcagccgcctacctgtgggtgggtacaggagccagcgaggcagagaagacgggggcccaggagctgctcagggtgctgcgggcccaacctgtgcaggtggcagaaggcagcgagccagatggcttctgggaggccctgggcgggaaggctgcctaccgcacatccccacggctgaaggacaagaagatggatgcccatcctcctcgcctctttgcctgctccaacaagattggacgttttgtgatcgaagaggttcctggtgagctcatgcaggaagacctggcaacggatgacgtcatgcttctggacacctgggaccaggtctttgtctgggttggaaaggattctcaagaagaagaaaagacagaagccttgacttctgctaagcggtacatcgagacggacccagccaatcgggatcggcggacgcccatcaccgtggtgaagcaaggctttgagcctccctcctttgtgggctggttccttggctgggatgatgattactggtctgtggaccccttggacagggccatggctgagctggctgcc

SEQ ID NO: 118734 - DNA, 5142 bp, Homo sapiens
  misc_feature (1)...(5142): n = a,t,c or g
ctgggccttgggccttgccagatagtttatgccaacagtgtgatttatgactggggccttgtccacgttgtatccgtttgacctcatacccacccccggaatccatgcattctcattgttcaactcccacttatgagtgagaacatatggtgtttggttttctgttcctgtgttagtttgctgagaatgatggtttccagcttcatccatgtccctctggtagaattcggctgtgaatccatctggtcctggactcttttttgttggtaaactattgattattgccacaatttcagagcctgttattggtctattcagagattcaacttcttcctggtttagtcttgggagggtgtatgtgtcgaggaatttatccatttctcctagattttctagtttattggcgtagaggtgtttgtagtattctctgatggtagtttgtatttctgtgggatcggtggtgatatcccctttatcattttttattgcgtctatttgatgcttctctcttttcttgtttattagtcttgctagcggtctatcaattttgttgatcctttcaaaaaaccagctcctggattcattaattttttggagggtttttttttttgtctttatttccttcagttctgctctgattttagttatttcttgccttctgctagcttttgaatgtgtttgctcttgcttttctagttcttttaattgtgatgttagggtgtcaattttggatctttcctgctttctcttgtgggcatttagtgctataaatttccctctacacactgctttgaatgtgtcccagagattctggtatgttgtgtctttgttctcgttggtttcaaagaacatctttatttctgctttcatttcgttatgtacccagtagtcattcaggagcaggttgttcagtttccatgtagttgagcagttttgagtgagtttcttaatcctgagttctagtttgattgcactgtggtctgagagacagtttgttataatttctgttcttttacatttgctgaggagagctttacttccaagtatgtggtcaattttggaataggtgtggtgtggtgctgaaaaaaatgtaaattcttttgatttggggtggagagttctgtagatgtctattaggtctgcttggtgcagagctgagttcaattcctgggtatccttgttaactttctgtcttgttgatctgtctaatgttgacagtggggtgttaaagtctcccattattattgtgtgggagtctacgtctccttgtaggtcactcaggacttgctttatgaatctgggtcctcctgtattgggtgcatatatatttaggatagttagctcttcttgttgaatagcagatgctttgttactctccacctcatgcctctgtgaacttaagtcctctgtaggtgttagatctgcatgtaaataaacgtgccaatagctatgggagctgagcaccttccagatcctcagacctcgcctagatggagccaactccttcctccactgaggagtgtggaatgttcggcagagctgggtacaacaggtttcacctctaattttggaactggaaagtgttcctttttgacaaatgtggacacccttttcgacaggtctattgcactcagtgaataattctgaagccatttggtggctgtaatctctacacatcatcttttcatgggcctgaagatttctctgtcccacctgctttctggcctccctggcctgctgctctcggcatgaatagagaagtagcactgggcctgaggattgggaccacatcatgcacatcctttcgcacacagagatatgggcgaggtgtcctgacacttggacccacagctcagctgctggctctctatgagattgaagcaagtcatgtgaatgttcgggcttccaaacgctagggcagcaacatccacagcgcctttcgcttctcacagcctctgtctctgttttaggattcttttgctccttgggcctggaattaatctggccaatccaagaaatcatctggttcttcaccagaagttcagcattcttggcaggcatttttcccttggccacagaggaaccctgtatttctctggctctggctccttccaagagatgggaatgtaatagcagcagctgaagatatgaaaataactgagcctggggaacagaaagcacttcccacgagtgcccatgtttcagcgaagacgatagtttgctcagaatgatggtttccagcttcatccatgtcccctacaaaggacatgaactcatcctttttttatggctgccatagtattccatgggtgtgtatgtgccacatgttcttcatttccagtctatcattgcttgggcatttggggttgggtcccaagtttttgctattgtaaatagtcctggcaataaacatacggtgtggcatgtgtctttataggtaggaatttataaatcctttggggtattataccccaatangggggatggctgggtcaaatggtatttctagttctagatccctgaggaattgccacaccgacttccacaatggttgaactagtttacagtcccaccaacagtgtaaaagtgttcctatttctccacatcctctccagcacctattgtttcctgactttttaatgatcaccattctaactggtgtgagatggtatctcattgtggttttgatttgcatttctctgatggccagtgatgatgagcattttttcatgtgttttttggctgcataaatgtcttcttctgagaagtgtctgttcatatcctttgcccactttttgatggggttgtttgtttttttcttgtaaatttgtttgagttcattgtagattctggatattagccctttgtcagatgagtaggttgcaaaaattttctcccattctgtaggttgcctgttcactctgatggtggtttcttttgctgtgcagaagctctttagtttaatgagatcccatttgtcaattttggcttttgttgccattgcttttggtgttttcgacatgaagtccttgcccatgcctatgtcctgaatggtattgcctaggttttcttctagggtttttatggttttaggtctaacatgtaagtctttaatccatcttgaattaatttttgtataaggtgtaaggaagggatccagtttcagctttctacatatggctagccagttttcccagcaccatttattaaatagggaatcctttccccattgcttgtttttgtcaggtttgtcaaagatcagatagttatagatatgcggcattatttctgagggctctgttctgttccattggtctatatctctgttttggtaccagtaccatgctgttttggttactgtagccttgtagtatagtttgaagtcaggtagcatgatgcctccagctttgttcttttggcttaagattgacttggcaatgtgggctcttttttggttccatatgaactttaaagtagttttttccaattctgtgaggaaagtcattggtagcttgatggggatggtgttgaatctataaattaccttgggcagtatggccattttcacgatattgattcttcctacccatgagcatggaatgttcttccatttgtttgtatcctcttttatttccttgagcagtggtttgtagttctccttgaagaggtccttcacatcccttgtaagttggattcctaggtatgttattctctttgaagtgattgtgaatgggagtccactcatgatttggctctctgtttgtctgttattggtgtataagaatgcttgtgatttttgcacattgattttgtatcctgagactttgctgaagttgctcatcagcttaaggagattttgggctgagacagtggggttttctagatatacaatcatgtcatctgcaaacagggacaatttgacttcctcttttcctaactgaatgctctttatttccttctcctgcctgattgccctggccagaacttccaacactatgttgaataggagtggtgagagagggcatccctgtcttgtgccgattttcaaaggcaatgcttccagcttttgtccattcagtatgatactggctgtgggtttgtcatagatagctcttattattttgagatatgttacatcagtacctagttcattgagagtttttagcatgaaggggtgttgaattttatcgaaggccttttctgcatctcttgagataatcatgtagtttttgtcgttggttctgtttatgtgatggattatgtttattgatttgcatatgttgaaccagccttgcatcccagggatgtaaccgacttggtcatggtggataagctttttgatgtgctgctggattcggtttgccagaattttattgaggatttttgcatcaatattcatcagggatattggcctgaaattttcttttatgttgtgtctgagtgagaacctgcagtgtttggttttctgttcctgtgttagtttgctgagaaggatggtttccagcttcatccatgtccctgcaaaggacatgaactcattcttttttatggctgcatagtattccatggtatataaccagccttgccctctgaagttgtccaccatggagatgttaaaattcttgtctaatctaactacctccttacaggccctatcactaaatacagctgcactggaggttgaggcttcaacatgaattttggggggacataattcagtccttagcagcatctgagccacaaacacctgtctggttacaaaggaagcagctgccagctcactggtgtgggacgccatgtctggtctgtgctttgctgaactgtgctggaatttcacgggctgaagctggcccagctgcatgaccttggacaatctactgaacttcctgtgccttagtttctttatcctccccgagaaggtaatatctgagctggaagctgcagaattagaaggatctgactggccatggcaagacctgcctttgcatcccttcttattttccaaacgctcgccttctgcttgaagaggcagagtggtggggtagttaagaggatgggctctggcttccaattccagcacggcagcatactggcgatgtaatcttgagtaagtgacataatctctgtgtaccttagttttca

SEQ ID NO: 118735 - DNA, 1806 bp, Homo sapiens
ctcgtgcaagatttactgaaaactttgccacaaatgtttaccaagactctggagacccagagtgccttgggtcctgcactgcaggctgcctttaagctgatgtctccaactggtggtcgaatgtctgtctttcaaacacaactcccaactcttggagtgggagccctgaaaccacgagaggaaccaaaccacaggtcatctgctaaggatatacacatgacaccatccactgacttctataagaaattagccttggactgttctggtcagcaagttgctgttgacttattccttctcagtggacagtattctgatttggcttctctgggttgtatttctcggtattcagcaggtagtgtctattactatccctcttaccatcatcagcacaacccagtccaagtacagaaattacagaaggaactacagagataccttactcggaagattggctttgaggcagtcatgaggattcggtgcaccaaaggtctttccattcatactttccatggaaacttctttgttaggtcaaccgacttactgtctttgcctaacgtcaacccagacgctgggtatgcagtacagatgtcagtggaagagagtcttactgacactcagttggtttcttttcagtcagcactcttgtatacatccagcaaaggcgaaagaagaattcgtgttcatactttgtgtttgccagtagtttcgactctgaatgatgtctttcttggagctgatgttcaagcaatttcagggttattggccaatatggctgttgacagatctatgactgccagtctgagtgacgctcgggatgctctagtgaatgcagtcattgactccctttcagcttaccgttcttcagtcttaagtaaccagcagcctggactcatggttcctttttctttgcggcttttcccactttttgtgttggctctccttaaacagggagcactcaacatcagtgatagaaccatacctcagccccccattcttcagctttcagtggagaagctgagcagagatggagctttcctcatggatgcaggctctactgtggacgggaggatggagtcgatggccgtcgctaccgacggcggggagaggccgggggtcccagcgggctcaggtctgtcggcttcccagcgtcgggcggagctgcgtcggagaaagctgctcatgaactcggaacagcgcatcaaccggatcatgggctttcacaggcccgggagcggcgcggttcatcctacgtgtatcagggactcttgtgctcatatcctagtgtttgtgttcagtgccgtcaacactgtcacctacgggccggctagaaaagaagaagaaagtcaaacaaaatcaaagcagcaggacagtgataaactgaactccctcagcgttccttccgtttcaaagcgagtagtgctgggtgattcagtcagtacaggaacaactgaccagcagggtggtgtggccgaggtaaaggggacccaactgggagacaaattggactcgttcattaaaccacctgagtgcagtagtgatgtcaaccttgagctccggcagcggaacagaggggacctgacagcggactcggtccagaggggttcccgccatggcctagagcagtacctttccagattcgaagaagcaatgaagctaaggaaacagctgattagtgaaaaacccagtcaagaggatggaaatacaacagaagaatttgactcttttcgaatatttagattggtgggatgtgctcttcttgctcttggagtcagagcttttgtttgcaaatacttgcctgccaagtag

SEQ ID NO: 118736 - DNA, 504 bp, Homo sapiens
atgactttccagtgtgtggtaaatactcactatctcacatatccccggccccaacgtttcctctacctagtcgtcgtccgtccgtcatgcgcatcgtggataatgttcgtcctgatcgacagaggttatgttttcagctactttccccagagctatggaggctttggctcgcggatcctcagtaaacctattgaagtacaagttggaggcaggagtgtggttgctcagatgtggagcaacaagtgtggacagtattctgatttggcttctctgggttgtatttctcggtatcagcaggtagtgtctattactatccctcttaccatcatcagcacaaccagtccaagtacagaaattacagaaggaactacagagataccttactcggagattggctttgaggcagtcatgaggattcggtgcaccaaagcaaagccaacaagacacaggcactacggggagctcgaaataagcataacaattattcgagccattggcaaataa

SEQ ID NO: 118737 - DNA, 3247 bp, Homo sapiens
cgctgggatggccgccacagctgtaggtgctgctagtgtttagcgctggtctttgccgggcgttgagggcagctcagcctccttgtttgtccggttcgcctgtgcgtggtactcaagggcaccagtattcccgcggtcggcagcatgggtcgggagtcacgccactatcgaaaacgatcggcatcccggggtcgctctggaagtcggtctagaagtcgctcaccctcagacaaaagaagtaaacgtggagatgacagacggtctagaagtagagatagagataggaggagagagaggtctcgtagcagggataaaagaagatctcggtcaagggacaggaagcgtctgagacgttccagaagtagagagagagacagaagccgagagcgaagaagatctcgaagtagagacaggagacgctcaaggagtagaagccggggccggcgatcccgatcctccagtcctggaaataaaagcaagaaaactgagaatagatctaggtccaaagagaaaactgatggtggggaaagttctaaagagaagaaaaaagacaaagatgacaaggaggatgaaaaagaaaaagatgctggcaactttgaccagaataagctggaagaagaaatgagaaagcgaaaagaaagagtagaaaaatggcgagaagagcaacgtaaaaaggctatggaaaacataggagaactgaaaaaggaaatcgaagagatgaaacaagggaaaaagtggagtttagaggacgatgatgatgacgaagatgatcctgcagaagctgaaaaggagggaaatgaaatggagggtgaggagttagatccattagatgcttacatggaagaagtgaaagaggaagtaaaaaaatttaacatgagaagtgtaaaaggtggtgggggaaatgaaaagaagtctgggccaacggtcacaaaagttgtcactgttgtgacaaccaaaaaagcagttgtggattctgataagaagaaaggtgagctgatggagaatgaccaggatgccatggagtattcttcagaggaggaagaagttgatcttcagacagcccttacagggtatcaaacaaaacagcgaaagcttctagaaccagttgatcatggaaaaattgagtatgagccatttaggaaaaacttctatgttgaagttccagaactagcaaaaatgtctcaagaagaggtaaatgtgtttcgattggaaatggagggcattacagttaaaggaaaaggttgccccaaaccaattaaatcctgggtccagtgtggaatttccatgaagatcttaaattccctcaagaagcatggctatgaaaagcccacgcccatccaaacccaagctattcctgctataatgtctggacgagatttgattggcattgccaaaacaggaagtggaaagaccattgcttttctgttgcccatgtttagacacatcatggatcagaggtcattagaggaaggagaggggccaatagctgtcatcatgactccaactcgagaactggctttacagattactaaagagtgtaagaagttttccaagactttgggacttagagtggtctgtgtttacggaggaacaggaatcagtgagcagattgctgagctgaaaagaggtgctgaaattattgtttgcacacctggtcgaatgattgacatgttagccgctaacagtggtcgggtcacaaatcttcgaagagtgacatatgttgttttagatgaagcagacagaatgtttgacatgggttttgaaccccaggtcatgcgcatcgtggataatgttcgtcctgatcgacagacggttatgttttcagctaacttttcccagagctatggaggctttggctcgcaggatcctcagtaaacctattgaagtacaagttggaggcaggagtgtggtttgctcagatgtggagcaacaagtgattgtgattgaagaagaaaagaaattcttgaaagttactttgagcttctaggccattatcaagaagtcaggatctgtcattatatttgtggataagcaggaacatgctgatggtcttcttaaggatttaatgagagcatcttatccttgcatgtctcttcatggaggcattgatcaatatgacagagatagcatcataaatgactttaagaatgggacctgcaaacttcttgtggctacctctgttgcttgccgaggtctagatgtgaaacatctgattcttgtagtaaattatagctgccccaaccattatgaggattatgtacacagagcagggcggactggaagagcaggaaacaagggttatgcttatacttttatcacagaggatcaagctcgctatgctggtgacataattaaagctcttgaattgtcagggactgcagtacctcctgatttagagaaactgtggagtgatttcaaagatcagcagaaagctgaggggaaaataattaaaaagagtagtgggttctctggtaagggattcaagtttgatgaaacagaacaagctttggctaatgagaggaagaagttacaaaaagcagctcttggtctacaagattcagatgatgaggatgctgcagttgatattgatgagcaaattgaaagcatgtttaattcaaagaagagagtaaaggatatggctgctcctggaacatcaagtgttcctgctccaactgcaggaaatgctgagaaattagaaattgctaagagattggctcttagaatcaatgcccagaagaatttgggcatcgagtctcaggtagatgtgatgcagcaggccaccaatgcaattcttaggggtggcaccattctggctcccactgtttctgcaaaaaccattgcagaacaacttgctgaaaagatcaatgccaagctcaattatgtgccgttagagaaacaagaagaagagagacaggatggtggacagaatgaatcttttaagagatatgaagaagaattagagatcaatgacttcccacagactgctaggtggaaagttacctctaaggaagctctgcagagaatcagtgaatactctgaagccgcaattacaatcagaggaacctacttccctcctggcaaagaacccaaggaaggcgagcggaagatttacttggcaattgaaagtgccaatgaactggctgtgcagaaagcaaaggcagaaatcaccaggctcataaaagaagagctgatccggctgcaaaattcataccaaccaacaaataaaggaagatacaaagtcttatag

SEQ ID NO: 118738 - DNA, 3255 bp, Homo sapiens
  misc_feature (1)...(3255): n = a,t,c or g
cctccaggcccagaacggagccgccttggcctcggggtctccctacaccaacggtcctgtccaaaatgcattgctgtcttcacaagagtcagtgagccaaggatacaatttccagcttccaggatcctaccctcatccaataccagcaaagactttgatccagtctctggccagtctaactatggtggttctcagggatctgggcagactcttaatagaccacctgtggcctctaatccagtgacaccttcgcttcatagtggtcctgctccccgaatgccattacctgcttctcagaacccagctactacaccaatgccttctagtagctttcttcctgaagccaacctgccaccacctttgaattggcaatataactatccatccacagcctcacaaacaaaccattgtcctcgtgcatcatcccaaccaactgtatctggaaatacaagtttaaccacaaatcatcaatatgtttcttctggatatccttcacttcaaaatagcttcataaagtcaggtccttctgtacctcccttagtgaatccacctctgcctacaacttttcaaccaggagctcctcatgggccccctccagctggaggcccacccccagtgagggccctcacgcccctgacatcatcatatagagatgtaccccagcccttatttaattcagctgtcaaccaagaaggtattacatcaaataccaataacggatctatggtggtccacagtagttacgacgagattgaaggaggtggcttattggcaacaccacagcttactaacaagaatcccaaaatgagccgaagtgttggatattcatatccctccttaccacctggttatcagaacacaacaccacctggtgcaactggagtaccaccctcttccttgaattacccaagtgggccacaagcctttactcagactcccttaggtgctaatcatttaaccacaagcatgagtggattaagtctacaaccagagggtctaagagttgtcaatcttcttcaagaaagaaacatgcttccgtcaacacctttgaagcctccagttccaaatttgcatgaagacatccagaaactcaactgtaacccagagttatttcgatgcacgctgactagcattcctcagacgcaggccttattgaataaagccaaacttcctttggggctgctgcttcatcctttcaaagacttagtgcaattgcctgtggttacctccagtacaattgtgagatgccgttcatgcaggacgtacatcaatcctttcgtcagctttcttgatcaaaggagatggaagtgtaacttatgttatcgagtcaatgatgttcctgaagaattcttgtacaaccctttgaccagagtttatggagaacctcacagaagaccagaagttcaaaatgctactattgagtttatggctccttcagaatacatgttacgaccacctcagcctccagtgtatctctttgtatttgatgtgtctcacaatgcagtcgaaactggatacttgaattcagtttgccagagtttgttagacaatctggatttgcttcctggcaacactagaacaaaaattggcttcataacatttgacagtacaatccatttctacggtcttcaggaaagtctctctcaacctcagatgctaatagtttcagatattgaagatgtttttatacctatgccagagaacttattagtaaacttaaatgaaagtaaagagctcgtgcaagatttactgaaaactttgccacaaatgtttaccaagactctggagacccagagtgccttgggtcctgcactgcaggctgcctttaagctgatgtctccaactggtggtcgaatgtctgtctttcaaacacaactcccaactcttggagtgggagccctgaaaccacgagaggaaccaaaccacaggtcatctgctaaggatatacacatgacaccatccactgacttctataagaaattagccttggactgttctggtcagcaagttgctgttgacttattccttctcagtggacagtattctgatttggcttctctgggttgtatttctcggtatttcagcaggtagtgtctatttactatcccctctttaccatcatcagcacaacccagnttccaagttacagaaattacagaaggaactacagagataccttactcggaagattggctttgaggcagctcatgaggattcggcgcaccaaaggtctttgcattcatactttccatgggaaacttctttgttagggtcaaccgacttactgtctttgcctaacgtcaacccagacggtggggtatggcagtacaggtgttcagtggggaggagagttcttaactggacactcagttggtttcttttcagtcagcactcttgtatacatccagcaaaggcgaaagaagaattcgtgttcatactttgtgttggccagtagtttcgactctgaatgatgactttcttggagctgatgttcaagcaatttcagggttattggccaatatggctgttgacagatctatgactgccagtctgagtgacgctcgggatgctctagtgaatgcagtcattgactccctttcagcttaccgttcttcagtcttaagtaaccagcagcctggactcatggttcctttttctttgcggcttttcccactttttgtgttggctctccttaaacagaaatcattccagactgggacaaatgcacgtctagatgaacgcatttttgctatgtgtcaagtgaaaaaccagcccttggtttaccttatgctcacaactcatcccagtttgtatagagttgacaatctctcagatgagggagcactcaacatcagtgatagaaccatacctcagccccccattcttcagctttcagtggagaagctgagcagagatggagctttcctcatggatgcaggctctgtactgatgctttgggttggaaaaaattgtacacagaattttctcagccaagttctaggagttcaaaactatgcatcaattccacagcctatgacagaccttccagaacttgatacaccagaatctgccagaataatagctttcatctcttggcttagagagcagagaccatttttcccaatactttatgtaataagggatgagagtccaatgaaagcaaacttccttcaaaacatgatagaagacagaacagaatctgcattatcatattatgaattcctgttgcatatacagcaacaagtgaataaatga

SEQ ID NO: 118739 - DNA, 400 bp, Homo sapiens
  misc_feature (1)...(400): n = a,t,c or g
tacagaccccgctccagtccggccagcccttcaagttctcgatcttggagatctgcgaccgcatcaaagaagaattccagtttcttcaggctcaataccacagcctcaagctagaatgtgagaagctggccagcgagaagacggaaatgcagcgacattatgtcatgtattatgagatgtcgtacgggctcaacattgaaatgcataagcagagtgcatctccctcgcccccttgagagtctcgtggaggaggagcgaccgagtggccctggtggtggcgggaagcagagagcagatgagaaggagccatcaggaccttatgaaagccgacgaagaccaagagtgattacnatcttgggtggtggacgaggaccaacccctcagagccccccagcccggg

SEQ ID NO: 118740 - DNA, 1605 bp, Homo sapiens
agtgcatctccctcgccccctgagagtctcgtggaggaggagcgaccgagtggccctggtggtggcgggaagcagagagcagatgagaaggagccatcaggaccttatgaaagcgacgaagacaagagtgattacaatctggtggtggacgaggaccaaccctcagagccccccagcccggctaccaccccctgcggaaaggtacccatctgcattcctgcccgtcgggacctggtggacagtccagcctccttggcctctagccttggctcaccgctgcctagagccaaggagctcatcctggacgcttccacccccgggcccagctcggccagtcacctctgccagcttgctgccaagccagcaccttccacggacagcgtcgccctgaggagccccctgactctgtccagtcccttcaccacgtccttcagcctgggctcccacagcactctcaacggagacctctccgtgcccagctcctacgtcagcctccacctgtccccccaggtcagcagctctgtggtgtacggacgctcccccgtgatggcatttgagtctcatccccatctccgagggtcatccgtctcttcctccctacccagcatccctgggggaaagccggcctactccttccacgtgtctgcggacgggcagatgcagccggttcccttcccctcggatgcactggtaggcgcgggcatcccgcggcacgcccggcagctgcacacgctggcccatggcgaggtggtctgcgcggtcaccatcagcggctccacacagcatgtgtacacgggcggcaagggctgtgtgaaggtgtgggacgtgggccagcctggggccaagacgcccgtggcccagctcgactgcctgaaccgagacaactacattcgttcctgcaagttgctgccggatggccggagtctgatcgtgggcggtgaggccagcaccttgtccatttgggacctggcggcgcccaccccccgtatcaaggccgagctgacttcctcagccccagcctgctacgccctggccgtcagccccgacgccaaggtttgcttctcctgctgcagcgatggcaacattgtggtctgggacctgcagaatcagactatggtcaggcagttccagggccacacggacggcgccagctgcattgatatttccgattacggcactcggctctggacagggggcctggacaacacggtgcgctgctgggacctgcgggagggccgccagctgcagcagcatgacttcagctcccagattttctccctgggccactgccctaaccaggactggctggcggtcggaatggagagtagcaacgtggagatcctgcacgtccgcaagccggagaaataccagctgcacctccacgagagctgcgtgctgtccctgaagtttgcctcctgcggacggtggtttgtgagcaccgggaaggacaacctgctcaacgcctggaggacgccgtacggggccagcattttccagtccaaggagtcgtcctcagtcctgagttgtgacatctccagaaataacaaatacatcgtgacaggctcgggggacaagaaggccaccgtgtatgaggtggtctactga

SEQ ID NO: 118741 - DNA, 774 bp, Homo sapiens
atggtgcttctgacccagtgctgctgggcctcctgtctggggctggctgcagggcggccctccaaagagctccctgtggcaggccagcgggcgtttgctctcctgacggcacaggagtcaggctcagcgaattccagctcagagcgggctctggcggcttccaggagctccacaatgaggcggctgcgcttttccagtctgctcatcaaagcaggccagccttgtgtggcgcggcgtgccgggagtgcatctccctcgccccctgagagtctcgtggaggaggagcgacgagtggccctggtggtggcgggaagcagagagcagatgagaaggagcctcaggaccttatcactcctgcctccaaatcctgtgactctccccgccccaggacgcttccacccccgggcccagctcggccagtcaccctgccagcttgctgccaagccagcaccttccacggacagcgtcggccctgggctggttctggggcccctgaaagaagctggccttggaattgccctcaaggaactcccaggtggcaaaaagggacaggacccagaccccaaactcacagccctgtatagtcagggctggtaccaaggcagccctgaggagccccctgactctgtccagtcccttcacacgtccttcagcctgggctcccacagcactctcaacggagacctctcctgcccagctcctacgtcagcctccacctgtccccccaggtcagcagctcgtggtgtacggacgctcccccgtgatggcatttga

SEQ ID NO: 118742 - DNA, 636 bp, Homo sapiens
tcagaaaatgttgatgatgtttccgtaatgatgggtcgcccgccaataaagcgttattagataccacaggtttctggcatgacgatttaataacgccacgccgaacgatatttgcgtggcaattcgtagcgaagggcggatgcggggatcgcgcaggcgattatgcagcagcttgaagaggcgtaaaacaacaggcgctgatcgcaacctcaacgtgatgatgttctccgataacgtcacgctggaagagaaatccaacttaaaaccgcgcgcgggaaaaaggcttgctggtgatgggccggactgcggtacgtcgatgattgccggcacaccgctggcttttgctacgtgatgccggaaggcaatattggcgtcattggcgcttccggtaccgggttcaggagataagtcctgatggctccttctcatctgctctctgcttcccgccaccaccaggccactcggtcgctcctcctccacgagactctcagggggcgagggagatgacttttcaatacctacaacagggtttttccccccgggcactgtggacactggggccagatccttctctggggggggccatcctgggcactgcagggtgctgagcagtgtccctgacctccaacactccat

SEQ ID NO: 118743 - DNA, 1656 bp, Homo sapiens
atgcagcagcttgaagaggcgctaaaacaactggcgcaggggtcaggcagcagccaggcgttgacgcaggtgcgtcgctgggacagtgcctgtcagaaattacccgatgccaatctggcgctgatttcagtggctggcgagtatgcggcggagctggcaaaccaggcgctggatcgcaacctcaacgtgatgatgttctccgataacgtcacgctggaagatgaaatccaacttaaaacccgcgcgcgggaaaaaggcttgctggtgatggggccggactgcggtacgtcgatgattgccggcacaccgctggcttttgctaacgtgatgccggaaggcaatattggcgtcattggcgcttccggtaccgggattcaggagctgtgttcgcagattgcgctggcaggggagggaattactcacgcgattggccttggcgggcgcgacctcagccgtgaagtgggcggcatcagtgcgctaacagcgctggaaatgctcagtgcagacgagaaaagcgaagtgctggcatttgtttcaaaaccacctgccgaagctgtgcgtctgaaaattgttaatgccatgaaagcaaccggcaaaccgacggtggcgctgtttttaggttataccccggcggtggcccgcgacgagaatgtctggtttgcctcctcgctggatgaggccgcacgcctggcttgcctgctttcacgccagcttgagcgtatccgggctaaaccctttttcgacacgcagctcgtccggcaaccactgatggtggaaacgcggcgcattggtcgcttagagggccaccttctctttcggctacgggctaatggtaacaccgttacattagcgcgagtctacgcaactatcggcagctacggcatttatcgcccactgtcgattaccaaagttgaccccccggttcccggtgaacgtgtcttcccggaatccattgtccgcaccgtggtgcatatgatggaaagcgtggcgctaccgggcggcggcggcgtgaaggcggcgattaaaggctatcgtatcgccattaaaaccggtaccgcgaaaaaggtcgggccggacggtcgctacatcaataaatatattgcttataccgcaggcgttgcgcctgcgagtcagccgcgcttcgcgctggttgttgttatcaacgatccgcaggcgggtaaatactacggcggcgccgtttccgcgccggtctttggtgccatcatgggcggcgtattgcgtaccatgaacatcgagccggatgcgctgacaacgggcgataaaaatgaatttgtgattaatcaaggcgaggggacaggacgcatgtcttcccgcaataatccggcgcgtgtcgccatcgtgatggggtccaaaagcgactgggctaccatgcagttcgccgccgaaatcttcgaaatcctgaatgtcccgcaccacgttgaagtggtttctgctcaccgcacccccgataaactgttcagcttcgccgaaagcgccgaagagaacggttatcaggtgattattgcgggcgcaggcggcgcagcgcatctgccaggcatgattgccgccaaaacgctggtgccggtgctgggcgtgccagtacagagcgccgcactgagcggtgtcgatagcctctactaccatcaggataactaa

SEQ ID NO: 118744 - DNA, 2272 bp, Homo sapiens
ctggggggcttttcgaatcggcaggatgtacccccagggaaggcacccgaccccgctccagtccggccagcccttcaagttctcgatcttggagatctgcgaccgcatcaaagaagaattccagtttcttcaggctcaataccacagcctcaagctagaatgtgagaagctggccagcgagaagacggaaatgcagcgacattatgtcatgtattatgagatgtcgtacgggctcaacattgaaatgcataagcaggcggagattgtgaagcgtctgagcggtatctgcgctcagattatccccttcctgacccaggagcatcagcagcaggtgctccaggccgtagaacgcgccaagcaggtcaccgtgggggagctgaacagcctcatcgggcagcagctccagccgctgtcccaccacgcaccccctgtgcccctcaccccccgcccagccgggctggtgggcggcagtgctacggggctgcttgctctgtctggagccctggctgcccaggctcagctggcggcggctgtcaaggaggaccgtgcgggcgtggaggccgaggggtccagagtggagagagccccgagcaggagtgcatctccctcgccccctgagagtctcgtggaggaggagcgaccgagtggccctggtggtggcgggaagcagagagcagatgagaaggagccatcaggaccttatgaaagcgacgaagacaagagtgattacaatctggtggtggacgaggaccaaccctcagagccccccagcccggctaccaccccctgcggaaaggtacccatctgcattcctgcccgtcgggacctggtggacagtccagcctccttggcctctagccttgcggtcaccgctgcctagagccaaggagctcatcctgaatgaccttcccgccagcactcctgcctccaaatcctgtgactcctccccgccccaggacgcttccacccccgggcccagctcggccagtcacctctgccagcttgcgctcaagccagcaccttccacggacagcgtcgccctgaggagccccctgactctgtccagtcccttcaccacgtccttcagcctgggctcccacagcactctcaacggagacctctccgtgcccagctcctacgtcagcctccacctgtccccccaggtcagcagctctgtggtgtacggacgctcccccgtgatggcatttgagtctcatccccatctccgagggtcatccgtctcttcctccctacccagcatccctgggggaaagccggcctactccttccacgtgtctgcggacgggcagatgcagccggttcccttcccctcggatgcactggtagacgcgggcatcccgcggcacgcccggcagctgcacacgctggcccatggcgaggtggtctgcgcggtcaccatcagcggctccacacagcatgtgtacacgggcggcaagggctgtgtgaaggtgtgggacgtgggccagcctggggccaagacgcccgtgcgccagctcgactgcctgaaccgagacaactacattcgttcctgcaagttgctgccggatggccggagtctgatcgtgggcggtgaggccagcaccttgtccatttgggacctggcggcgcccaccccccgtatcaaggccgagctgacttcctcagccccagcctgctacgccctggccgtcagccccgacgccaaggtttgcttctcctgctgcagcgatggcaacattgtggtctgggacctgcagaatcagactatggtcaggcagttccagggccacacggacggcgccagctgcattgatatttccgattacggcactcggctctggacagggggcctggacaacacggtgcgctgctgggacctgcgggagggccgccagctgcagcagcatgacttcagctcccagattttctccccctgccactgccctaaccaggactggctggcggtcggaatggagagtagcaacgtggagatcctgcacgtcggcaagccggagaaataccagctgcacctccacgagagctgcgtgctgtccctgaagtttgccccttgcggacggtggtttgtgagcaccgggaaggacaacctgctcaacgcctggaggacgccgtacggggccagcattttccagtccaaggagtcgtcctcagtcctgagttgtgacatctccagaaataacaaatacattgtgacaggctcgggggacaagaaggccaccgtgtatgaggtggtctactgaagacatgacccccc

SEQ ID NO: 118745 - DNA, 1374 bp, Homo sapiens
atgttcggaggggaaaaacccatcgatctgtttgcgctacgccatgacacatataaactagcagaatcagagcactatatctgtcatgctgcggagcgcaatgaccactacaatggcggcagacttaataactgctatcagggacagaggaaacaacacatcgacacaggtttctggcatgacgattttaataacgccacgccgaacgatatttgcgtggcaattcgtagcgaagcggcggatgcggggatcgcgcaggcgattatgcagcagcttgaagaggcgctaaaacaactggcgcaggggtcaggcagcagccaggcgttgacgcaggtgcgtcgctgggacagtgcctgtcagaaattacccgatgccaatctggcgctgatttcagtggctggcgagtatgcggcggagctggcaaaccaggcgctggatcgcaacctcaacgtgatgatgttctccgataacgtcacgctggaagatgaaatccaacttaaaacccgcgcgcgggaaaaaggcttgctggtgatggggccggactgcggtacgtcgatgattgccggcacaccgctggcttttgctaacgtgatgccggaaggcaatattggcgtcattggcgcttccggtaccgggattcaggagctgtgttcgcagattgcgctggcaggggagggaattactcacgcgattggccttggcgggcgcgacctcagccgtgaagtgggcggcatcagtgcgctaacagcgctggaaatgctcagtgcagacgagaaaagcgaagtgctggcatttgtttcaaaaccacctgccgaagctgtgcgtctgaaaattgttaatgccatgaaagccaccggcaaaccgacggtggcgctgtttttagggtataccccggcggtggcccgcgacgagaatgttggtttggctcctcgctggatgaggcgacgcctggctggctgcttcagcgtacgagcgagatcgccattaacccgcatcgacgggatgatgatcctcggtatgtttggcggctgctttgccgcatcgctgtgggccaacaatgtcaaactgcgaatgccgcgcagccgtatccgcattatgcaagccatcattggcggcattatcgccggttttggcgcgcgtctggcaatgggctgtaacctggcggcgttctttaccggtattcctcagttctcgctgcatgcctggttctttgccaatccgctacttataggtcagactctagaggatccccatgaatatatcgactatctggacaaggagtttccactctatcaacttgtagagtgtgtggtcagcctaaactactcgtaccactgggaatgcactgagatagctggcgttactctgtattag

SEQ ID NO: 118746 - DNA, 1125 bp, Homo sapiens
atggaggcggaggtcgataagctggaactgatgttccagaaagctgagtctgatctggattacattcaatacaggctggaatatgaaatcaagactaatcatcctgattcagcaagtgagaaaaatccagttacactcttaaaggaattgtcagtgataaagtctcaatatcaaactttgtatgcccgctttaaaccagttgctgttgagcagaaagagactaagagccgcatttgtgctggtatgactaaaactatgaatgtgatacaaaaactacagaagcaaacagacctggatctgtcaccactgactaaagaagagaaaactgcggcagagcaattcaaatctcactcattcggtatgtggccttgtaaattaaagtataggcaaaacaaaaaaaagaagaagaaactcagtcaaaaccgctcaactacatggaaactgaacaacctgctcctgaatgactactggatacaaaacgaaatgaaggcagaaataaagatgttctttgaaaccaatgaaaacaaagacacaacataccagaatctctgtgacacattcaaagcagtgtgtagagggaaatttatagcactaaatgcccacaagagaaagcaggaaagatctaaaattgacaccctagctctgcaattaaaagaactagaggagcaagagcaaacacattcaaaagctagcagaaggcaagaaataactaagatcagagcagaactgaaggaaatagagacacaaaaaaaccttcaaaaaatcaatgaatctaggagctgcttttttgaaaagatcaacaaaatggatagactgctagcaagactaataaagaagaaaagagagaagaatcaaatagacgcaataaaaaatgataaagggggtatcaccaacgatcccacagaaatacaaactaccatcagagaatactataaacacctctatgcaaataaactagaaaatctagaagaaatggataaattcctcgacacatacaacctcccaagactaaaccaggaagaagttgaatctctgaatagaccaataacaggctctgaaattgaggcaagaattaatagcttaccaaccgaaaaaaagtccaggaccagatggatttacagctga

SEQ ID NO: 118747 - DNA, 421 bp, Homo sapiens
  misc_feature (1)...(421): n = a,t,c or g
cggacgcgtgggcggacgcgtgggcaagatcagaacataactaaattaaattgaaacaaaaaaatacaaaagataaaatgaaacaaaaagctggttctttgaaaagattaaaatggatagaccattagcaagattaaccaagaaaagaataaaggaaatccaaataacttcactaagaaatgaaacaggaaatattataactgacaccactgaaatacataagatcattcaaggctaannnnnnnnnnnnnnnnnnnnnnnnnnnnnnnnnnnnnnnnnnnnnnnnnnnnnnnnnnnnnnnnnnnnnnnnnnnnnnnnnnnnnnnnnnnnnntcagatacatttaaaagaccaataacaggcatcaagattgaaatggtattttaaaaattaccaaccaaaaagtccaggattagcctgan

SEQ ID NO: 118748 - DNA, 654 bp, Homo sapiens
atggaatactatgcagccataaaaaataacacgttcatgtcctttgcagcgacatggatgaagctggaagccatcattctcagcaaactaacaaaagaacagaaaaccaaacgccacatgttctcactcgtcagcactcttgaactgggggctctcactgctttggtgagatgtggcaggtggcgaagacagtgtgatgatgaagcaatggcgtgtgtgactcaaggcagaccattagcaagattaaccaagaaaagaagagagaaaatccaaataacctcactaagaaatgaaacaggagatattacaactgacaccactgaaatacaaaagatcattcaaggctatgacgaacacacttatgcacataaagtagaaaaccttgaagggatggataaattgctggaaaaatacaaccctcctagattaaatcaggaagaattaggcaccctgaacagaccaataacaagctatgagatggaaatgataattaaaaaattactaacgaaaaaagcccaggaccagatggattcacagcagagttctaccaaacattcaaagaagaattggtaccaatccttttggcactattccacaagacagaaaaagaaggaatcctccctaattcattctatgaagccagcatcaccctaa

SEQ ID NO: 118749 - DNA, 789 bp, Homo sapiens
atgcccccatccttggcctataaaaacccgaggccccagcaggcagacacacaggtggccagatgtccagaggagtacattggcgaaagaagatgcaagcggctggtcctcgagaggatgtcaagaggagcacgcaggcagaagagcacacagacaggcaccagcataccagcaggccatcagctgttactgatgagaatttttgaaatgggatggaaaaagccatctcctttccaagaagagagcattcccattgctttatctggtagggatatcttagctagagcaaaaaatggaacaggcaagagcagtgcccatgacattcccctacttaaaaggctagacctgaagaaggacactatacaaacaatagtgattgttcccacaggaggacctgctctacaggtcagtcaaatttgcatccaggtcagcaaacacatgggaggagtcaaagtggtgatgaccacaggaggaaccaattcaggagatgacgtactgaggctggatgatacagtgcacatggtgattgctgcccctgggagaatcctgaatcttattaagaaaggagtagcaaagctagaagagacctatctccgtcatattggaagaccaggtcactttggccattttggcttagccatcaacttgatcacatatggcgatcacttcaacctgaaaggtattgaggagcagctgggaaaagaaataaaacctattccaagcaacattgacaagagcctgcatgtggcagaattccacagcaaggctgtagaaaatgagaagccttaa

SEQ ID NO: 118750 - DNA, 576 bp, Homo sapiens; identical to SEQ ID NO: 116601

SEQ ID NO: 118751 - DNA, 573 bp, Homo sapiens
ctattccgcatgcttttttctcttttctatagcaatggggatcttattgacggtccctccttccttctggattcctacttctttttctgccttcttgggcttcttctcctccttttctttacttgttctccaccaacctgatttttcttttgtgcttggcttgtggaggattatttccttgctggttttgaagatagtcgaagggtcctcaaaccaaggcatgcagatggcttctagaagctgggaatggccctcatccagcaggaaaatggcaacctccgtccggacgctccctgaacccgtccctctggctgccgagcccccagcgccttcccgtttcggaaagaagcgggcgcagacccctcggggtgccccgggggacggcaggtcccgctggttgctataggaagaggcggggcgctggaaccccagcgctgggagctgcgcgcaccgggatccgctggccgccttccgcgtgagggtggccgcaccttcccgggcgcacagagcccagcaggcgcacagagcccagcaggcaaacagagcccgccaggcgcacagagccctctgcat

SEQ ID NO: 118752 - DNA, 427 bp, Homo sapiens
  misc_feature (1)...(427): n = a,t,c or g
acccccaataaacatatccgtgccccactgttaancctttggaggcaaccccttgaaattttaattccagccccggagcgctcttcacatgtcttgtcccagagcccagttcggactcattcttcagccgtgcatcagtcagtgggggctagcttaaactgtggtgacaaacaacctccaaatttcagtggctcaaaaatcttcttcctcatttatttacatctcatgactggtcaggtgagaggtagctctgtgctgtgtcatcctaacacaggaatccagaaggaaggagggaccgtcaatgagatccccattgctatagaaaagagaaaaaagcatgcggaatagaacgctgtttcttggagatttctcctgaaaaagtcacatgttatttcttctcacctccatcggcaaaaaaaaaaaaaaa

SEQ ID NO: 118753 - DNA, 468 bp, Homo sapiens
atgaggcgggcaggcgggggcgctccgggagccacggccggcgccgcccccaccgtcgtcctctgccccgcccgcctgcggcagagccgggaccctccccagtctccgctcacctgccagggccgccgtcgccgccgccaccgcgggttaaaccgcagccgcgcccacacttccggggtccgccaggcccgccccctaccggatgtgacccccttgcaacgtccggcgccccagtggcgcgcgtgctcgccccgcgaccccgttggccgccccgcctcgcgcgcctctgagttaccacgacatcgtgccacacacacacgctcgcggccgcccgggccacaaccacgggagcgcccacgagacccctccagcgctcgccgcacgcctcggccccgcccccgtcttccgtccacacccgaacacaccatcgtcaaccaggccatcgaggccacaagttacacaccatga

SEQ ID NO: 118754 - DNA, 284 bp, Homo sapiens
ggaaactggggagtttacccagcttaaggaactcaacattcagggcaactgctggacccttctgctcccagaactaggaaacttatatttaactggtcagaagaaggtatgcaaagtggagaacagcccctgggttaccccaattgctggccagttccagcttgatgtgtcctgtgtgtctgaatgtgtctgttctgagacatatgagtacctctatgggcagcacatgcagggcaaatccaggaaccaccaaaacataataatcacaaatcaggaaaagatga

SEQ ID NO: 118755 - DNA, 449 bp, Homo sapiens
ctgagaattcggcacgagttcctcaggagagacaacatataaaaagacaacctcatcagccttgaaaggtgccatccagttaggcattacccacactgtggggagcctgagtaccaaaccagagcgtgatgtcctcatgcaagatttctacgtggttgagagtatcttctttcccaggtacagagtttaatgttcaggagcatgtcctggaaatgtggccttttcaaatcagcccagggcagttttaggggttcaggtcggacaatttagacatgtgtccatttcttaacctggttacaatcagggcgatgtgtgactagagagttcggagagcagatactgtcctctagatgcttccattagcctctgtcctatggattgacccgtaaaaaacaacctaatgcattggataggaggcagtgtgatttcttcttcttcttatgtcttgg

SEQ ID NO: 118756 - DNA, 207 bp, Homo sapiens
atgcgtctcttagaatggcaaaaatccagaacattgacaacaccaaatgctggcaaggatgtggagcaacaggaactctcattcattgctgccacagctggagcagctgggatgcaggatgccaagtccagaggctgcacagagcagaagagtcctaggtctggcccaggaaactactttttcctcctaggccttcagacctgtgat

SEQ ID NO: 118757 - DNA, 885 bp, Homo sapiens
atggccgtcggtctcctcagggcctcctcggcggtcagtttttcatcctttgatccaggggtcgcttcctgtacctcgtcctcagcatctggaatccagagacctatggcgtctgaggtgccttgtgcctcgggcatacccatcaagaaaataggccatcgaggtgttgattcctcaggagagacaacctatagaaagacgacctcatcagccttgaaatgtgccatccagttgtgcattactcacactgtggggagcctggatcccacaccagagcgtcatgtcctcattgagccactgattgaactcagtagctctggagctgatggttccctgttacatgtgtccatccacgatgaattcattattaaaacagtccaacataaacaggcggagtttctgcagaagctgattccaggataccacatcgacctcaaccagaactcttggactttgctgcctaaattctatggactgtgctgtgtgaaggcaggtggcaagaacacgcagattgcggtgatgaagaatctcttactaagactgaatagtgagggggaaagaatcctgctttgtattggcatcactgacattctacagtcttacaggtttgttaagaagctggagcattcttggaaagccctggtatgtgatggggacactgtctcagtgcatcgcccaggcttctacactgaacggttccagtgcttcatgtgcaacacagcatttaagaagatcccggccagaacattgacaacaccaaatgctggcaaggacgtggagcaacaggaactctcatcattgctgatgggaatgcgaagtggcacagccactgtggaagacagcttggtggtttcctacaaaactaaacatactctcaccatatga

SEQ ID NO: 118758 - DNA, 410 bp, Homo sapiens
caacctccaaagtgggggcttctcctgcaccatcatgtaccggaagattggccccctggtggacaagcagatctacaggttctccgaggaaggcatggtcaatgccaggtttgactacacctatcatgacaacagcttccgcatcgcaagcatcaagcccgtcataagtgagactcccctccccgttgacctctaccgctatgatgagatttctggcaaggtggaacactttggtaagtttggagtcatctattatgacatcaaccagatcatcaccactgccgtgatgaccctcagcaaacacttcgacacccatgggcggatcaaggaggtccagtatgagatgttccggtccctcatgtactggatgacggtgcaatatgacagcatgggcagggtgatcaagaggg

SEQ ID NO: 118759 - DNA, 728 bp, Homo sapiens
acttcgtcgctttgaccgcccgacctggcgctacagctatgaccttaatgggaatctcctcttactgaacccaggcaacagtgtgcgcctcatgcccttgcgctatgacctccgggatcggataaccagactcggggatgtgcagtacaaaattgacgacgatggctatctgtgccagagagggtctgacatcttcgaatacaattccaagggcctcctaacaagagcctacaacaaggccagcgggtggagtgtccagtaccgctatgatggcgtaggacggcgggcttcctacaagaccaacctgggccaccacctgcagtacttctactctgacctccacaacccgacgcgcatcacccatgtctacaatcactccaactcggagattacctcactgtactacgacctccagggccacctctttgccatggagagcagcagtggggaggagtactatgttgcctctgataacacagggactcctctggctgtgttcagcatcaacggcctcatgatcaaacagctgcagtacacggcctatggggagatttattatgactccaaccccgacttccagatggtcattggcttccatgggggactctatgaccccctgaccaagctggtccacttcactcagcgtgattatgatgtgctggcaggacgatggacctccccagactataccatggggaaaaacgtgggccagggggccgggccccctt

SEQ ID NO: 118760 - DNA, 1227 bp, Homo sapiens
atgaagatggagaaagtgaacacaagctggcttctgcccccaagcagcatctctgtattaatcaggagaggtgcagggtccatggtcctcctgcttcagagccaacgtcagtatatatttgagtatgactcctctgaccgcctccttgccgtcaccatgcccagcgtggcccggcacagcatgtccacacacacctccatcggctacatccgtaatatttacaacccgcctgaaagcaatgcttcggtcatctttgactacagtgatgacggccgcatcctgaagacctcctttttgggcaccggacgccaggtgttctacaagtatgggaaactctccaagttatcagagattgtctacgacagtaccgccgtcaccttcgggtatgacgagaccactggtgtcttgaagatggtcaacctccaaagtgggggcttctcctgcaccatcaggtaccggaagattggccccctggtggacaagcagatctacaggttctccgaggaaggcatggtcaatgccaggtttgactacacctatcatgacaacagcttccgcatcgcaagcatcaagcccgtcataagtgagactcccctccccgttgacctctaccgctatgatgagatttctggcaaggtggaacactttgatcatcaccactgccgagatgaccctcagcaaacacttcgacacccatgggcggatcaaggaggtcctagctttgagatgttccggtccctcatgtactggatgacggtgcaatatgacagcatgggcagggtgatcaagagggagctaaaactggggccctatgccaataccacgaagtacacctatgactacgatggggacgggcagctccagagcgtggcctgcaatgaccgaccgacctggcgctacagctatgagcttaatgggaatctgcacttactgaacccaggcaacagtgtgcgcctcatgcccttgcgctatgacctccgggatcggataaccagactcggggatgtgcagtacaaattgacgacgatggctatctgtgccagagagggtctgacatcttcgaatacaatttcaatggcgcccctacaaagaccctcagccaagccagcggcatcctacaaagccttcagggcctccacgaagtccacagaaatccggcttgctcagactttgctggccgggaaggccaacccaaatgccacgtttgatgtctctagagctctttag

SEQ ID NO: 118761 - DNA, 1006 bp, Homo sapiens
  misc_feature (1)...(1006): n = a,t,c or g
atgatgctacttctgctggccctgctgggggctggcctactgggggcttccctgctcacctcgtggcatgctccagcccggaacaagatccccagggcccagaagtggagggaggagccagatctggaccccaagccaatcctggagctgcccctggcagagctggcccagcagcttcggaccgaagagctgagtctggagagcatcctctgtagctacttaaagcaggcactgaaggtgcaccaggaggtgaactgcctgatggatttcctgggggaatgtgaggaggaactgcaggcattaaagaagcttaagaagagtgagagaggccttctctatggggtccccatgagcctcaaggacacctatgacagcatgttcctggagaagcctgcgaccaaggacggggtcattatgaaagtgctcaaggcccaaggagccatcccctttgttaagaccaacatcccactgacgctgctcaggtctctgaagcgggctagctgggctttgaatgcggcaactcccatctatggccagatgttgagcccactgaacttaaagaagacatgtgggggctcctcaggggtgaccacggtggctggccccatggcccaggacgtggagagcctggcgctgtgccctgcaaagccctgcctgagtgaaagacatgtacccgactggacccccactgtgctcccagatgcccttttagggaggaggtgaagaccccctttccccacccccaggctgcagtgagtgagaagcccacatgctcagtccagtttgtttccttcccctgctggacaccagctgctttggcttcttggctatctggagccatagcttgtaaagttncccccaaagagggccttccagtgccatattacccaacccatggcagtttagaattattcaggcaagtgtggatgagagggtgtggcatccagttaagctgggtttttaaccctctaggtaaccctggccaagtcacatctcttctttcagc

SEQ ID NO: 118762 - DNA, 682 bp, Homo sapiens
gtctgatgcccgtcttcataaagacgacactgacatttgcttcagtaaaacactcaactcctgcaaagtgccccagatccgttatgccagcgtggagcgcctcttggaacgactgacagacttgcggtttcttagtattgatttcctcaacacctttctgcacacctatcgtattttcactactgccgctgtggtgctggggaaactctccgacatatacaagaggcctttcacctccatccctgtcagtgagggccagaaagctgtctttgacttctcccttgaactcaaagataggagcattggacctgacaacttccagcagtcccaccaccaccacccagagtcccgctgcgtctccaccaccacacactggtcagataccactggatctcagcagaggcctctcttctccagagcaaagcccgggaacgcaacccgaagtatcgggcagttctccacactctacggcgcaatcgaagatatggtcgttggtctggaagcagtattggctgatggcaccgtcacacgcattaaaaacgtgccacgccgcgcggctggcccggacattcgtcacatcatcatcggcaacgaaggtgcattgtgctatatcactgaagtaacagtgaaaatctttaaattcaccccggaaaacaacctcttctacggctatatgtgctag

SEQ ID NO: 118763 - DNA, 522 bp, Homo sapiens
ttcggcagagggatcagcttttggctggaacgtggaaactcacaggtgcagacgccagaagtgagatttcagcagcagctggagcagctcaactccatgggcttcatcaatcgtgaggctaacctgcaggccctgattgccacaggaggggacatcaacgcagctatcgagagactgctgggctcccagctctcctaatccctcggcccatgcctcctgcctctcccctccctcgatgtcagcattcggttcttctgtcaatccttaccctctgcagcttgtcctccaaccccttagctctgtctgagaattatggttttactgctacgtctctaacagactcttctctcctggtctccttgagcagtgctacttaaacagttttcacagtttcattgattgactctacctccttgccccacaccacttttgcaatctttaaactttcagtggctgtgcagagtcgagggaggaaccagctctctggtttactggaacatagtcttccatctataccactag

SEQ ID NO: 118764 - DNA, 1848 bp, Homo sapiens
atggcagaagccgagccgggccggccgggcgagcggggaggaggaggagccgggcgggctggcgggcggccgggtggcggcggcggcatggcggagccgagcggggccgagacgaggccccccattcgggtcaccgtcaagacccccaaggacaaggaggaaattgtgatctgcgatcgagcctcggtcaaggagttcaaagaggaaatctcccggaggtttaaggctcagcaggatcagctggtcctgatcttgtcaggcaagatcctcaaggatggggacacactgaaccagcacggaatcaaggacgggctcactgtccatctggtcatcaagacccctcagaaggctcaagatccagctgctgccactgcttcttccccctccacacctgaccctgcctcagcaccctccaccacgcctgcttcacccaccacccctacccagccctccacctctgacagtgcctcttcggatgctggcagtggaagccggaggagcagtggtggggggccctctccagggactggggagggatcccccagtgctactgcgtccatactctctggctttgggggcatcctggggctgggcagcctgggcctgggctctgccaacttcatggagctgcagcagcagatgcagaggcagctgatgtccaatcctgagatgctgttgcagatcatggagaaccccctggtccaggatatgatgtctaaccctgacctgatgcgtcacatgattattgccaaaccccagatgcagcagttgatggagcggaaccctgagatcagccacatgctcaataaccctgaactcatgaggcagacaatggagcttgctcggaatccagccgtgatgcaagagatgatgcggaaccaggaccgggccctgagcaaccttgagagcatccctggagggtataatgccctccgccgcatgtacacggacatccaggagcccatgttcagtgctgcccgggaacagtttggcaacaatcccttctcttccctggccgggaactccgacagctcatcctcacagcctctgcggactgagaatcgagagcccctccgtaaccccggagcccctcgccccccacctcccaggcccccgggtccggtggggagggcaccggaggatcggggaccagccagcctgaggtcagggatgttcaatagcccagaaatgcaagccctcctccagcagatctctgagaacccccagctgatgcagaatgtgatctcagcaccctacatgcgcagcatgatgcagacgcttgcccagaaccccgacttcgctgctcagatgatggtgaatgtgccgctcttcgcggggaacccccaactgcaggagcagctccgcctgcagctcccagtcttcctgcagcagatgcagaacccagagtcactctccatccttaccaatccccgagccatgcaggcattgctgcagatccagcagggactacagaccttgcagaccgaggcccctgggctggtacccagccttgtctccttcgggatgtcccggaccccagcaccctcagcaggcagcaacgcagggtctacgcccgaggcccccacttcctcaccagccacgccagccacatcttctccaacaggggcttccagcacccagcagcaactcatgcagcagatgatccagcttttggctggaagtggaaactcacaggtgcagacgtcagaagtgagatttcagcagcagctggagcagctcaactccatgggcttcatcaatcgtgaggccaacctgcaggccctgattgccacaggaggggacatcaacgcagctatcgagagactgctgggctcccagctctcctaa

SEQ ID NO: 118765 - DNA, 464 bp, Homo sapiens
  misc_feature (1)...(464): n = a,t,c or g
ggtgggaattcgccagcccatcttctccacaggggcttccagcgcccagcagcaactcatgcagcagatgatccagcttttggctggaagtggaaannnnnnnnnnnnnnnnnnnnnnnnnnnnnnnnnnnnnnnnnnnnnnnnnnnnnnnnnnnnnnnnnnnnnnnnnnnnnnnnnnnnnnnnnnnnnnnnnncccagctactgtatcccannnnnnnnnnnnnnnnnnnnnnnnnnnnnnnnnnnnnnnnnnnnnnnnnnnnnnnnnnnnnnnnnnnnnnnnnnnnnnnnnnnnnnnnnnnnnnnnnnnnnnnnnnnnnnnnnnnnnnnnnnnnnnnnnnnnnnnnnnnnnnnnnnnnnnnnnnnnnnnnnnnctctactttattaaacaaaattannnnnnnnnnnnnnnnnnnnnnnnnnnnnnnnnnnnnnnnnnnnnnnnnnnnnnnnnnnnnnttct

SEQ ID NO: 118766 - DNA, 2395 bp, Homo sapiens
atggcagaagccgagccgggccggccgggcgagcggggaggaggaggagccgggcgggctggcgggcggccgggtggcggcggcggcatggcggagccgagcggggccgagacgaggccccccattcgggtcaccgtcaagacccccaaggacaaggaggaaattgtgatctgcgatcgagcctcggtcaaggagttcaaagaggaaatctcccggaggtttaaggctcagcaggatcagctggtcctgatcttgtcaggcaagatcctcaaggatggggacacactgaaccagcacggaatcaaggacgggctcactgtccatctggtcatcaagacccctcagaaggctcaagatccagctgctgccactgcttcttccccctccacacctgaccctgcctcagcaccctccaccacgcctgcttcacccaccacccctacccagccctccacctctgacagtgcctcttcggatgctggcagtggaagccggaggagcagtggtggggggccctctccagggactggggagggatcccccagtgctactgcgtccatactctctggctttgggggcatcctggggctgggcagcctgggcctgggctctgccaacttcatggagctgcagcagcagatgcagaggcagctgatgtccaatcctgagatgctgttgcagatcatggagaaccccctggtccaggatatgatgtctaaccctgacctgatgcgtcacatgattattgccaaaccccagatgcagcagttgatggagcggaaccctgagatcagccacatgctcaataaccctgaactcatgaggcagacaatggagcttgctcggaatccagccgtgatgcaagagatgatgcggaaccaggaccgggccctgagcaaccttgagagcatccctggagggtataatgccctccgccgcatgtacacggacatccaggagcccatgttcagtgctgcccgggaacagtttggcaacaatcccttctcttccctggccgggaactccgacagctcatcctcccagcctctgcggactgagaatcgagagcccctccctaacccctggagcccctcgccccccacctcccaggcccccgggtccggtggggagggcaccggaggatcggggaccagccaggtgcacccgacagtcttgaacccctttgggatcaatgcggctagcctgaggtcagggatgttcaatagcccagaaatgcaagccctcctccagcagatctctgagaacccccagctgatgcagaatgtgatctcagcaccctacatgcgcagcatgatgcagacgcttgcccagaaccccgacttcgctgctcagatgatggtgaatgtgccgctcttcgcggggaaacccccaactgcaggagcagctccgcctgcagctcccagtcttcctgcagcagatgcagaacccagagtcactctccatccttaccaatccccgagccatgcaggcattgctgcagatccagcagggactacagaccttgcagaccgaggcccctgggctggtacccagccttgtctccttcgggatgtcccggaccccagcaccctcagcaggcagcaacgcaggggtctaccccccgaggcccccacttcctcacccagccacgcccagccacatcttctccaacaggggcttccagcgccccagcagcaactcatgcagcagatgatcccagcttttggctggaagtggaaactcacaggtgcagacgccagaagtgagatttcagcaagcagctggagcagctcaactccatgggcttcatcaatcgtgaggctaacctgcaggccctgattgccacaggaggggacatcaacgcagctatcgagagactgctgggctcccagctctcctaatccctcggcccatgcctcctgcctctcccctccctcgatgtcagcattcggttcttctgtcaatccttaccctctgcagcttgtcctcccttccgtcttctccctcatcctttccaaacagcagggtgactttagaggcatgggctccaaccccttagctctgtctgagaattatggttttactgctacgtctctaacagactcttctctcctggtctccttgagcagtgctacttaaacagttttcacagtttcattgattgactctacctccttgccccacaccacttttgcaatctttaaactttcagtggctgtgcagagtcgagggaggaaccagctctctggtttactggaacatagtcttccatctataccactagggttttgtcttatgtttacttttggtaactctcttccttctttttctccctaccccccaacccctagcccaaccaatgctagaatttcttggctctgaaggaggagcaggt

SEQ ID NO: 118767 - DNA, 840 bp, Homo sapiens
acacgttaagtgcttaaaacatggcgcgtgacagagtaagttctgtatacctggaaatgttagctgtcctcatcatcatcaaacccaaggctgagcaggctgactcctcatactcttcattacccagagcatagttccatttcctctcactgtcccacttaggccttcaggatactttgagatccccggagaagctggccagatttcctgcagtggtagggggtgcccaggggagtctgaggctgtggggggaattcttagggtgaaaaggcccagggtctccccctgctacctttcaccctgggcagatgatgggtggaatgttgccgctctttcgcgggggaacccccaactgcaggcagcagctccgcctgcagcttcccagtcttcctggcagcagatgcaggaacccagagtcactctccatccttaccaaatcccccgaagccatgcaaggaattgctgcaagatccaagcagggactaacaagaccttgcagaccgaaggcccctgggctggtaccccaggtgagggtaaggggggcaggagggcagcaaggttctagcaacttctccccttcaactcttctctctgccactctctcagcatcctttgtgtctctgagggtctgttttcctgtttcttccaactgcttttccttctggatctcacattctcatccctttcttggatgccatctcctacctcttggtctctcttgcctacagccttggctcctttgggatgtcccggaccccagcaccctcagcaggcagcaacgcagggtctacgccgaggcccccacttcctcaccagccacgccgagccctatgcagtctc

SEQ ID NO: 118768 - DNA, 2507 bp, Homo sapiens
ccagatcgccgcgcgagggtggtgggcatcgaggtcccagcagcggaggagggaggtgccgccgtcgcccaggatgggctgggaatgaagcgatgtagccttttaagagatttgctctgacccatctgaagtccatatggctctgtatgatgaagacctcctgaaaaatcctttctatctggctctgcaaaagtgccgccctgacttgtgcagcaaagtggcccaaatccatggcattgtcttagtaccctgcaaaggaagcctgtcgagcagcatccagtctacttgtcagtttgagtcctacattttgattacctgtggaagagcattttcagaccttaaatggaaagaaggaaaactaccaaacagaaaggaatagcatcaacatcaacaaaaaggacatctacaccaaaacctcatctgtagctcaccaacatcaaagaccaaaggtagataaaaccacaaagatggggagaaaccagagcaaaaaggctgaaaattccaaaaaccagaacgtctcttctcctccaaaggaacacaactcctcgccagcaacagaacaaaactggatggagaatgagtttgatgagttgacagaagtaagcttcagaaggtcagtaataacaaacttctctgagctgaagaagcatgttctaacccatcgtaaggaagctaaaaaccttgaaaaaaggtcagatgaatggctaactagaataaccagtgtagagaagagcttaaatgacctgatggagctgaaaaccacagtacgggaacttcgtgatgcatgcacaagcttcaacagccaattcgatcaagtggaagaaaggatatcagtgattgaaggtcaaattaatgaaataaagcttaaatctcttcaagctcaggaggatgcccgccacagaaacacagatcagaggagctcagagaataggcggtcagagccttggagcttggaggagcggaagcgtgagcagtggaactcactcaagcagaatgcagaccagcaggacacagaagccatgtccgattataagaaacagctccgaaacctgaaggaggagatagctgttctgtctgctgagaaaagtgcactccaaggaaggaccctgaaagaaggatcagagagaaacaagaaatcagaaaggactgggtttcttaagggacagaccccagtgggtctcagggaaaatgaagcaagagtgtttacaacttggaacgccatggccataaataatcatcgggcagtggcaatatttcccaagagacggcatgggcgtgaggacggacttttgtcgaatcttccaacgtttggctcgtatgcgcctttgcgaagggtgtctaatgaattcatagcttctgccgtccaacgaattctccttgagagacgggcgcttcctcatggaaactgtaaacttggaggtttgaccccccaatttatgaaccggaaaaatgctctagtgttggaagttctggccagggcgatcaggcaggagaaggaaataaagggtattcaattaggaaaagaggaagtcaaattgtccctgtttgcagacgacatgattgtttatctagaaaaccccatcgtctcagcccaaaatctccttaagctgataagcaacttcagcaaagtctcaggatacaaaatcaatgtacaaaaatcacaagcattcttatacaccaacaacagacaaacagagagccaaatcatgagtgaactcccattcacaattgcttcaaagagaataaaatacctaggaatccaacttacaagggatgtgaaggacctcttcaaggagaactacaaaccactgctcaatgaaataaaagaggatacaaacaaatggaagaacattccatgctcatgggtaggaagaatcaatatcgtgaaaatggccatactgcccaaggtaatttacagattcaatgccatccccatcaagctaccaatgactttcttcacagaattggaaaaaactactttaaagttcatatggaaccaaaaaagagcccgcatcgccaagtcaatcctaagccaaaagaacaaagctggaggcatcacactacctgacttcaaactacactacaaggctacagtaaccaaaacagcatggtactggttccaaaacacagatatagatcaatggaacagaacagagccctcagaaataatgccgcatatctacaactatctgatctttgacaatcctgaaaaaaacaagcaatggggaacggatttcctatttaataaatggtgctgggaaaactggctagccatatgtagaaagctgaaactggatcccttccttacaccttatacaaaaattaagtcaagatggattaaagacataaatgttagacctaaaaccataaaagccctagaagaaaacctaggcaataccatccaggacataggcatgggcaaggacttcatgtctgaaacaccaaaagcaatgacaacaaaagtgaaaattgacaaatgggatctcattaaactgaagagcttctga

SEQ ID NO: 118769 - DNA, 372 bp, Homo sapiens
tcagcgtcggcgtcgcgctgcgaccctggaagcgggagccgccgcgagcgagaggaggagctccagtggcggcggcggcggcggcggcggcggcggcggcggcggcggcggcggcagcggcagcgggcagcagctccagcagcgccagcaggcgggatcgaggccgtcaacatggcgagcgcctcgtaccacatttccaatttgctcggggttctcgcagccgcggccctggccgtcacgcaggccttgccccaccccttcggccgtagccggtagcttctctgccccgaagtctccagcccaccggtccgctggcctcccgatccctgcggagcccctttcctctcccctcttgcaaccccctccccccat

SEQ ID NO: 118770 - DNA, 1011 bp, Homo sapiens; identical to SEQ ID NO: 115933

SEQ ID NO: 118771 - DNA, 2622 bp, Homo sapiens
atgatcaaaccactgtctcccgtctgggtgactacagttgcccagagcccagactacactagcaagaccctgtctcttaacaacaacaaaaatctcaaagaagtaggggaagactgttttcccttggaacccagccaccagattgtgacagcactcaggccacaaagagaacctggcagtgccagtgtcagtgttcatgctgcctgtcccaaccaaggttccagccaatggccagcatcaaccatcaaacagcagtgtgtccccgagaaagtgtcagagcctttacgtggaccttcccatggaaaaggaaacagaatagtcaatggaaaaggagaagctgtgtattcttattacaaccaaggcattttaccagagcaaggcatacaagattcattcaaaaaagcaacactgggaagatatgggagctgtggccttgaaaatatatgcttatggaaaaactgggaaagtataggtgaaggtgaaggacaaaaggaatgttataatctatgtagccaatatttgacaactagtcataacaaacatttaactgtgaaaggagacaaagaatatagaatatttcagaagaagcctcagtttctgtcagctgctcctacagaaccatgtattcctatgaataaatatcaacataaatttttgaaatctgtcttttgtaataaaaatcagataaattttaaccatgactcaaatattagtaaacatcatagtactcattttctagaaaactattacaattgtaatgaatgtgaaaaagtattttaccaatcctcaaagcttattttccctgaaaatatccatattcaaaaaaagccttacaactctaatgaatgtggtgaaacttctgacccattctcaaagcttactcaacatcaaagaatttatattggagagagctcacaaagatgtaataaaaaatgtataatagtctttagtcaatcacatctaaagggacataagataattaacactggagaaaaatcagtgaaatataaagaacgtggcaaagcttttaccaggggcttacatcttggacatcagaaaattcatactggagagaaaccttacaaatgtaaaaaatgtgacaaagcctttaacaagagttcacaccttgctcaacatcagagaatccatactggagagaagcctttcaagtgtaaggaatgtggcaaagcttttaacagaggctcataccttactcaacatcagagaatccatactggagagagagctttcaaatgtgaagaatgtggcaaagcctttaacagggggtcataccttactcaacaccagagaatccataccggagagaaacctttcagatgtaaggaatgtggcaaagcctttaatagaagctcatacgttactcagcatcagagaatgcatactggagagaaacctttcaagtgtaaggaatgtggcaaagcttttaacagagcttcacaccttactcaacatcagagaatccatactggagagaaacacttcaaatgtaaagaatgtggcaaagcctttaacaggggctcacaccttactcgacatcaaagaatccatactggagagaagtctttcaaatgtgaagaatgtggcaaagcttttatctggggctcacaccttactcaacatcagagagtccatactggagagaaattcttcaaatgtaaagaatgtggcaaagcttttaccaggagctcacaccttactcaacatcagagaattcatactggagagaaacctttcaaatgtaaagaatgtggcaaagcttttaacagacgctcaacccttactcaacatcaaataattcataccagtgcaggcgtggtggggcagcaggaggagcccgtggtgcccaccttccagagctgccacctcttttacctcctcatgttccttcctgtgcacctagagagagttcacccccacccaacagctcctggacctgctgcccaaaagtgcagcatagagagagatgcagcccactcgggggaaagaagtgggaagtacataaaggactttgacttagagcccagtgctgggcccatcatggcaaaacccagtaccaggcagaaacccatggcccctgacctcaggccaggtcctctcacaccactgctagccttccacagtggccttaggccacgagtgaaccccactggcagacaggccatgtcagcctgggccacaagagcacccagggctgtgttggtcctggcagcatgggatttggatgtgacccagatgagcatcagccttggcaaccaagagactgctcctaccttttctcccccagtcctgggcagcacagtgcagagtgactctatccactggcagggagggagagagaaacatcagcaagtctcagggtctctgcctccagcacaggtcctggacttcaccccatctctccatcgttacctccactgccccctaggtcaatccatcaccttcctcaacttcgattcactgccatcacggctctgcccggtaaccgtggatcctactggaacaacaaacaccaaagaacatcccaacattccacctgaaacccagccatcaactggcagcctgaattggtcagttttaccgtcagagaagatttacaaataa

SEQ ID NO: 118772 - DNA, 801 bp, Homo sapiens
atgctcacgggtaggaagaatcaatatcgtgaaaatggccatactgcccaagaaattaattcacgatggattaaagacttacatgttagatctaaaaccataaacaccctagaagaaaaaccaggcaataccattcaggacataggcatgggcagagacttcatgtctaaaacaccaaaagcaatggcaacaaaagctaaaattgacaaatgggatctaattaaactagggaggttctgcacagcaaaagaaaccaccatcagagtgaacaggccacctacagtatgggagaaaagttttgcgacctcctcatctgacaaagggctaatatccagaatctacaatgaactcaaacaaattcacaagaaaaaaacaaacaacaccatcaaaatcattttgcatgaactgtgtgtggattcattgcctacattggatgatgaagtcttgagtgttgctactaagcagtatgtcccggagaaagtgtcagagcctttacgtggaccttctcatgaaaaaggaaacagaatagtcaatggaaaaggaaaagctcaccatgcaccccctgtcctgtacccatatatgacccagaccccaggctccagaagcagacaagcagatgaggagatgaacagaagagcagaattgcagaatgatgtggcagaaaaaagagaaggagcatctgaatgccaagaggagtttggctggcagtggttggagagatcagcctctggatggcaaagctcccggggaagatcatcttcccattccatcccctttccagctccccatccatcccattga

SEQ ID NO: 118773 - DNA, 1495 bp, Homo sapiens
atgcctgggcggcagcggctaagtctggtagttggccaggcggccaaaggacgggaactggccgttcacgccatcccagtttccacggagaactcaaccatcatggcccctgagaggaccctcaggcctgggctgtgctctgtgcctgcaaacctgacgccatccaggggagctccgccttcccacgccagcgcctcagctgctgcagaaaactgcaaaagtgcagagccagccctggtggcccctgagttcttggaggaggccaagtcacagcaacccctcaagtgggcgggcgatgcacttgaccctgaggacatcaggtaccaggcccgccagctgatgccgacatcggagccgcagctgcagtctagacgtggtgcaccggcattattcggcttcgggagccgcaggagccaaacggcccacggctccatagaacatgtctacacgggttccggataccgaatcccggactccgaactgcagaagatccacagggcagctgccaagggcgaccccgcgggggtggagcgctgcctggcgcgcaggagcggagacctggatgccctggacaagcagcacagaactgctctacacttggcctgtgccagtggccatgtgcaagtggtcactctcctggttaacagaaaatgccagattgatgtctgtgacaaagaaaacagaacgcctttgatacaggctgtccattgccaggaagaggcttgcgccgttattctgctggaacatggcaccaatccaaaccttaaggatatctaccgcaacactgctctccagtatgctgtgtatagtgagagcacctcactggcagaaaaactgcttttccatggtgcaaatattgaagcactggacaagctgtccactccccatcggaggccgagagcagccagccgtgctccctggtccagctcaccaagccccgcagctctcctcctccacggacgggaaagcctgcgctgcgccaccagagtcactcgcctccgccctgtcctcagaggagtagctcccaggctgctgcctccaggacacaggttcctcttcaggggtggggcgctgccccttcccaagtggctcaatttctggcggaacggcctcggggctgtagcccccccaggagctgtccctgtcagcctcctggcagccgtgggccggccggctcccagggcttttctggtcccaggtcccgcgtctggggtaggggctggtggagccggcgagctcttttacgactcgccgtaggcggccgggctgccgggtcccctgcaatcgccttcccctggtgaagacactttgggttttgtggtggttgtggtggttgtggtggttgattgttgttatgagatggagtctcactcttcctgcccagttttgtcaaatgatgagaaatagtgtaatcttctgcatctcgtccacacgtctttagtgaagacatcaatattttgcttaagaaggatattgacaatacctggtgagtcat

SEQ ID NO: 118774 - DNA, 846 bp, Homo sapiens
atgtctacacgggttcggataccgaatccgggactccgaactgcagaagatccacagggcagctgtcaagggcgacgccgcgggggtggagcgctgcctggcgcgcaggagtggagacctagacgccctgaacaagcagcacagatagcgggggctcagcccagggaagaggcttgcactgttattctgctggaacatggcaccaatccaaaccttaaggatatctaccgcaacactgctctccattatgctgtgtatagtgagagcacctcactggcagaaaaactgcatttccatggtgcaaatattgaagcactggacaaggtattgtcaatatccttcttaagcaaaatattgatgtcttcactaaagacgtgtggacgagatgcagaagattacactatttctcatcatttgacaaaaattcaacaacaaattttggaacgtaaaaagaagatacttaaaaaggagaaacgaggtaaggcttctgagagtgaatttcttaattctcttggtggtcctactcttgataagaaaataagaaatgttgaaatttctgatgaatctgcagtcagcattttgcatgaactgtgtgtggattcattgcctgcattggatgatgaagtcttgagtgttgctactaagtgtgtccccgagaaagtgtcagagcctttatgtagaccttcccatgaaaaaggaaacagaatagtcaatggaaaaggagaaggaagtgaggagtgtctctgcccggctgcccatcgtctgagatgcggggagcgcctctacctgccgccccgtctaggatgtgagcgcctctgcctggccacgaccccgtctgagaagtga

SEQ ID NO: 118775 - DNA, 1050 bp, Homo sapiens
gcaatatttaaaataaaatcttagacaattatttcaaaataatttgcatttgcattcagggaatggttgagcttccaaatataaaaaattgacccttacctgtgtcaatgttaaaacaaatattttggaaagaaagttgattgatctataccttgtccagtgcttcaatatttgcaccatggaaatgcagtttttctgccagtgaggtgctctcactatacacagcataatggagagcagtgttgcggtagatatccttaaggtttggattggtgccatgttccagcagaataacagtgcaagcctctcctggttagcagaaaatgccagattgatatctgtgacaaagaaaatagaacgcctaaaatacaggaagaggcttgtgccgttattctgctggaacatggtgccaatccaaaccttaaggatatctacggcaacactgctctccattatgctgtgtatagtgagagcacctcactggcagaaaaactgcttttccatggtgaaaatattgaagcactggacaaggacagtaataccccacttttattcgctataatttgcaagaaagagaaaatggtggaatttttattgaaaaagaaagcaagtacacatgccgttgataggctgagacggtcagctctcatgcttgctgtatactatgactcaccaggtattgtcagtatccttcttaagcaaaatattgatgtcttcgctcaagacatgtgtggacgagatgcagaagattacgctatttctcatcatttgacaagaaatgagtggtcaggcagagttagtgatgatggagtttgtgatggtggtgatggtggcgatgatgatgatagtaaggaggatgatgatggtggtgatagtgatgataatgatggtgatgggtgtgatgacaatgatggtgtggccatgttggtgataatggtgctggtggtgatgatagtggttgagatgatgggtgataatgctggcatggtggtgttggtggtgatggtggtggtgatgatgacagtggttgagatgatgatgacaataatg

SEQ ID NO: 118776 - DNA, 735 bp, Homo sapiens
gtgtgccactgcacctggccattattatggaaaattttaggcatatacaaaagtagagacaggggtgtcttacatgctcatgaacccatgatccagtgacatccgttaatggcattttggaatcatatttcatctgtttttgtcctcaaatgttttgaagcaaatttcagcattacatcatttcactcttaaatatctcagtatggttctctaatagttgaagactccatttacatttatataaggagcataatttacacttgtgtaacccaaaggaatgaccaagcctgtgcttctctccccagatagcaaagccattgtggatgggaacctgaagctcatcttgggtctggtgtggacgctgatcctccactactccatctccatgcccgtgtgggaggatgaaggggatgatgatgccaagaagcagacgccaaagcagaggctgctggggtggattcagaacaagatcccctacttgcccatcaccaactttaaccagaactggcaagacggcaaagccctgggagccctggtagacagctgtgctccaggtaagagggcagggcttgcctaaacattttgtcaagatggggggggtggggcccacaattctggtttaaaggggatgcgttctttgctttagtaacggatttctccgggcctttccctttatagccctttttagggaaaaaaaatggggttggggccctccagggccaattttagttttct

SEQ ID NO: 118777 - DNA, 9475 bp, Homo sapiens
ggcggccaggggcgggcggccgcagagcagcaccggccgtggctccggtagcagcaagttcgaaccccgctcccgctccgcttcggttctcgctccttcggcccttgggcctccaaacaccagtccccggcagctcgttgcgcattgcgctctccccgccaccaggatgccggtaaccgagaaggatctagctgaggacgcgccttggaagaagatccagcagaacacgttcacacgctggtgcaacgagcacctcaagtgcgtgaacaaacgcatcggcaacctgcagaccgacctgagcgacgggctgcggctcatcgcgctgctcgaggtgctcagccagaagcgcatgtaccgcaagtaccatcagcggcccacctttcgccagatgcagctcgagaatgtgtccgtggcgctcgagttcctggaccgtgagagcatcaagctcgtgtccatcgatagcaaagccattgtggatgggaacctgaagctcatcttgggtctggtgtggacgctgatcctccactactccatctccatgcccgtgtgggaggatgaaggggatgatgatgccaagaagcagacgccaaagcagaggctgctggggtggattcagaacaagatcccctacttgcccatcaccaactttaaccagaactggcaagacggcaaagccctgggagccctggtagacagctgtgctccaggtctgtgcccagactgggaatcctgggacccgcagaagcctgtggataatgcacgagaagccatgcagcaggcagatgactggctgggtgtcccacaggtcatcactcctgaagaaatcattcacccggatgtggacgagcactcagttatgacttacctgtcccagttccccaaagccaagctcaagccgggggctcctctcaaacccaaactcaacccgaagaaagccagggcctatggcagaggaatcgagcccactggaaacatggtgaagcagccagccaagttcactgtggacaccatcagcgccgggcaaggagacgtgatggtgtttgttgaggacccagaagggaacaaagaggaggcacaagtgacccctgacagtgacaagaacaagacatactctgtggagtatctgcccaaggtcaccgggctacacaaagtcacagtcctctttgcaggacagcacatctccaagagcccatttgaagtgagtgttgacaaggcccagggagatgccagtaaagtcactgcaaaaggtccagggttggaagctgtagggaacatcgccaataagcccacctactttgacatctatacggcaggagctggtgtgggtgacattggtgtggaggtggaagatccccaggggaagaacaccgtggagttgctcgtggaagacaaaggaaaccaggtgtatcgatgtgtgtacaaacccatgcagcctggccctcacgtggtcaagatcttctttgctggggacactattcctaagagtcccttcgttgtgcaggttggggaagcctgcaatccaaatgcctgccgggccagtggccgaggcctacaacccaaaggcgtccgtatccgggagaccacagatttcaaggttgacaccaaagctgcaggaagtggggagctcggtgtaaccatgaagggtcctaagggtctggaggagctggtgaagcagaaagactttctggatggggtctacgcattcgagtattaccccagcaccccggggagatacagcattgccatcacatgggggggacaccacattccaaagagcccctttgaagttcaagttggccctgaagcgggtatgcagaaagtccgtgcttggggccctgggctccatggtgggattgtcgggcggtcagcggacttcgtggtagaatccattggctctgaagtggggtctctggggtttgccattgaaggcccctctcaggcaaagattgagtacaacgaccagaatgatggatcgtgtgatgtcaaatactggcccaaggagcctggcgaatatgctgttcacatcatgtgtgacgacgaagacatcaaggacagcccgtacatggccttcatccacccagccacgggaggctacaaccctgatctggttcgagcatacgggccaggtttggagaaatctggatgcattgtcaacaacctggccgagttcactgtggatcctaaggatgctggaaaagctcccttaaagatatttgctcaggatggggaaggccaacgcattgacatccagatgaagaaccggatggacggcacatatgcatgctcatacaccccggtgaaggccatcaagcacaccattgctgtggtctggggaggcgtgaacatcccgcacagcccctacagggtcaacatcgggcaaggtagccatcctcagaaggtcaaagtgtttgggccaggtgtggagagaagtggtctgaaggcaaatgaacctacacacttcacggtggactgtactgaggctggggaaggtgatgtcagtgttggcattaagtgtgatgcccgggtgttaagtgaagatgaggaagacgtggattttgacattattcacaatgccaatgatacgttcacagtcaaatatgtgcctcctgctgctgggcgatacactatcaaagttctctttgcatctcaggaaatccccgccagccctttcagagtcaaagttgacccttcccacgatgccagcaaagtgaaggcagaaggcccagggctcagcaaagcaggtgtggaaaatgggaaaccgacccacttcactgtctacaccaagggggctgggaaagccccgctcaacgtgcagttcaacagccctcttcctggcgatgcagtgaaggatttggatatcatcgataattatgactactctcacacggttaaatatacacccacccaacagggcaacatgcaggttctggtgacttacggtggcgatcccatccctaaaagccctttcactgtgggtgttgctgcaccgctggatctgagcaagataaaactcaatgggctggaaaacagggtggaagttgggaaggatcaggagttcaccgttgataccaggggggcaggaggccaggggaagctggacgtgacaatcctcagcccctctcggaaggtcgtgccatgcctagtgacacctgtgacaggccgggagaacagcacggccaagttcatccctcgggaggaggggctgtatgctgtagacgtgacctacgatggacaccctgtgcccgggagcccctacacagtggaggcctcgctgccaccagatcccagcaaggtgaaggcccacggtcccggcctcgaaggtggtctcgtgggcaagcctgccgagttcaccatcgataccaaaggagctggtactggaggtctgggcttaacggtggaaggtccgtgcgaggccaaaatcgagtgctccgacaatggtgatgggacctgctccgtctcttaccttcccacaaaacccggggagtacttcgtcaacatcctctttgaagaagtccacatacctgggtctcccttcaaagctgacattgaaatgccctttgacccctctaaagtcgtggcatcggggccaggtctcgagcacgggaaggtgggtgaagctggcctccttagcgtcgactgctcggaagcgggaccgggggccctgggcctggaagctgtctcggactcgggaacaaaagccgaagtcagtattcagaacaacaaagatggcacctacgcggtgacctacgtgcccctgacggccggcatgtacacgttgaccatgaagtatggtggcgaactcgtgccacacttccccgcccgggtcaaggtggagcccgccgtggacaccagcaggatcaaagtctttggaccaggaatagaagggaaagatgtgttccgggaagctaccaccgactttacagttgactctcggccgctgacccaggttgggggtgaccacatcaaggcccacattgccaacccctcaggggcctccaccgagtgctttgtcacagacaatgcggatgggacctaccaggtggaatacacaccctttgagaaaggtctccatgtagtggaggtgacatatgatgacgtgcctatcccaaacagtcccttcaaggtggctgtcactgaaggctgccagccatctagggtgcaagcccaaggacctggattgaaagaggcctttaccaacaagcccaatgtcttcaccgtggttaccagaggcgcaggaattggtgggcttggcataactgttgagggaccatcagagtcgaagataaattgcagagacaacaaggatggcagctgcagtgctgagtacattcctttcgcgccgggggattacgatgttaatatcacatatggaggagcccacatccccggcagccccttcagggttcctgtgaaggatgttgtggaccccagcaaggtcaagattgccggccccgggctgggctcaggcgtccgagcccgtgtcctgcagtccttcacggtggacagcagcaaggctggcctggctccgctggaagtgagggttctgggcccacgaggcttggtggagccagtgaacgtggtggacaatggagatggcacacacacagtaacctacaccccatctcaggagggaccttacatggtctcagttaaatatgctgatgaagagattcctcgcagtcccttcaaggtcaaggtccttcccacatatgatgccagcaaagtgactgccagtggccccggccttagttcctatggtgtgcctgccagtctacctgtggactttgcaattgatgcccgagatgccggggaaggcctgcttgctgttcaaataacggaccaagaaggaaaacccaaaagagccattgtccatgacaataaagatggcacgtatgctgtcacctacatccccgacaagactgggcgctatatgattggagtcacctacgggggtgacgacatcccactttctccttatcgcatccgagccacacagacgggtgatgccagcaagtgcctggccacgggtcctggaatcgcctccactgtgaaaactggcgaagaagtaggctttgtggttgatgccaagactgccgggaagggtaaagtgacctgcacggttctgaccccagatggcactgaggccgaggccgatgtcattgagaatgaagatggaacctatgacatcttctacacagctgccaagccgggcacatatgtgatctatgtgcgcttcggtggtgttgatattcctaacagccccttcactgtcatggccacagatggggaagtcacagccgtggaggaggcaccggtaaatgcatgtccccctggattcaggccctgggtgaccgaagaggcctatgtcccagtgagtgacatgaacggcctgggatttaagccttttgacctggtcattccgtttgctgtcaggaaaggagaaatcactggagaggtccacatgccttctgggaagacagccacacctgagattgtggacaacaaggacggcacggtcactgttagatatgcccccactgaggtcgggctccatgagatgcacatcaaatacatgggcagccacatccctgagagcccactccagttctacgtgaactaccccaacagtggaagtgtttctgcatacggtccaggcctcgtgtatggagtggccaacaaaactgccaccttcaccatcgtcacagaggatgcaggagaaggtggtctggacttggctattgagggcccctcaaaagcagaaatcagctgcattgacaataaagatgggacatgcacagtgacctacctgccgactctgccaggcgactacagcattctggtcaagtacaatgacaagcacatccctggcagccccttcacagccaagatcacagatgacagcaggcggtgctcccaggtgaagttgggctcagccgctgacttcctgctcgacatcagtgagactgacctcagcagcctgacggccagcattaaggccccatctggccgagacgagccctgtctcctgaagaggctgcccaacaaccacattggcatctccttcatcccccgggaagtgggcgaacatctggtcagcatcaagaaaaatggcaaccatgtggccaacagccccgtgtctatcatggtggtccagtcggagattggtgacgcccgccgagccagagtctatggccgcggcctgtcagaaggccggactttcgagatgtctgacttcatcgtggacacaagggatgcaggttatggtggcatatccttggcggtggaaggccccagcaaagtggacatccagacggaggacctggaagatggcacctgcaaagtctcctacttccctaccgtgcctggggtttatatcgtctccaccaaattcgctgacgagcacgtgcctgggagcccatttaccgtgaagatcagtggggagggaagagtcaaagagagcatcacccgcaccagtcgggccccgtccgtggccactgtcgggagcatttgtgacctgaacctgaaaatcccagaaatcaacagcagtgatatgtcggcccacgtcaccagcccctctggccgtgtgactgaggcagagattgtgcccatggggaagaactcacactgcgtccggtttgtgccccaggagatgggcgtgcacacggtcagcgtcaagtaccgtgggcagcacgtcaccggcagccccttccagttcaccgtggggccacttggtgaaggaggcgcccacaaggtgcgggcaggaggccctggcctggagagaggagaagcgggagtcccagctgagttcagcatttggacccgggaagcaggcgctggaggcctctccatcgctgttgagggccccagtaaggccgagattacattcgatgaccataaaaatgggtcgtgcggtgtatcttatattgcccaagagcctggtaactacgaggtgtccatcaagttcaatgatgagcacatcccggaaagcccctacctggtgccggtcatcgcaccctccgacgacgcccgccgcctcactgttatgagccttcaggaatcgggattaaaagttaaccagccagcatcctttgctataaggttgaatggcgcaaaaggcaagattgatgcaaaggtgcacagcccctctggagccgtggaggagtgccacgtgtctgagctggagccagataagtatgctgttcgcttcatccctcatgagaatggtgtccacaccatcgatgtcaagttcaatgggagccacgtggttggaagccccttcaaagtgcgcgttggggagcctggacaagcggggaaccctgccctggtgtccgcctatggcacgggactcgaagggggcaccacaggtatccagtcggaattctttattaacaccacccgagcaggtccagggacattatccgtcaccatcgaaggcccatccaaggttaaaatggattgccaggaaacacctgaagggtacaaagtcatgtacacccccatggctcctggtaactacctgatcagtgtcaaatacggtgggcccaaccacatcgtgggcagtcccttcaaggccaaggtgacaggccagcgtctagttagccctggctcagccaacgagacctcatccatcctggtggagtcagtgaccaggtcgtctacagagacctgctatagcgccattcccaaggcatcctcggacgccagcaaggtgacctctaagggggcagggctctcaaaggcctttgtgggccagaagagttccttcctggtggactgcagcaaagctggctccaacatgctgctgatcggggtccatgggcccaccaccccctgcgaggaggtctccatgaagcatgtaggcaaccagcaatacaacgtcacatacgtcgtcaaggagaggggcgattatgtgctggctgtgaagtggggggaggaacacatccctggcagcccttttcatgtcacagtgccttaaaacagttttctcaaatcctggagagagttcttgtggttgcctttgttgcttgtttgtaattcattttatacaaagccctccagcctgtttgtggggctgaaaccccatccctaaaatattgctgttgtaaaatgccttcagaaataagtcctagactggactcttgagggacatattggagaatcttaagaaatgcaagcttgttcagggggctgagaagatcctgagtacactaggtgcaaaccagaactcttggtggaacagaccagccactgcagcagacagaccaggaacacaatgagactgacatttcaaaaaaacaaaactggctagcctgagctgctggttcactcttcagcatttatgaaacaaggctaggggaagatgggcagagaaaaaggggacacctagtttggttgtcatttggcaaaggagatgacttaaaaatccgcttaatctcttccagtgtccgtgttaatgtatttggctattagatcactagcactgctttaccgctcctcatcgccaacacccccatgctctgtggccttcttacacttctcagagggcagagtggcagccgggcaccctacagaaactcagagggcagagtggcagccaggcccacatgtctctcaagtacctgtcccctcgctctggtgattatttcttgcagaatcaccacacgagaccatcccggcagtcatggttttgctttagttttccaagtccgtttcagtcccttccttggtctgaagaaattctgcagtggcgagcagtttcccacttgccaaagatcccttttaaccaacactagcccttgtttttaacacacgctccagcccttcatcagcctgggcagtcttaccaaaatgtttaaagtgatctcagaggggcccatggattaacgccctcatcccaaggtccgtcccatgacataacactccacacccgccccagccaacttcatgggtcactttttctggaaaataatgatctgtacagacaggacagaatgaaactcctgcggctctttggcctgaaagttgggaatggttgggggagagaagggcagcagcttattggtggtcttttcaccattggcagaaacagtgagagctgtgtggtgcagaaatccagaaatgaggtgtagggaattttgcctgccttcctgcagacctgagctggctttggaatgaggttaaagtgtcagggacgttgcctgagcccaaatgtgtagtgtggtctgggcaggcagacctttaggttttgctgcttagtcctgaggaagtggccactcttgtggcaggtgtagtatctggggcgagtgttgggggtaaaagcccaccctacagaaagtggaacagcccggagcctgatgtgaaaggaccacgggtgttgtaagctgggacacggaagccaaactggaatcaaacgccgactgtaaattgtatcttataacttattaaataaaacatttgctccgtaaaaaaaaaaaaa

SEQ ID NO: 118778 - DNA, 316 bp, Homo sapiens
cgtgattctgaaggccagcatcgtacaaaaacgcattatttattttcaagatgagggctctctgaccaagaaactttgtgaacaagattccacatttgatggggtgactgacaaacccatcttagactgctgtgcctgcggaactgccaagtacagactcacattttatgggaattggtccgagaagacacacccaaaggattaccctcgtcgggccaaccactggtctgcgatcatcggaggatcccactccaagaattatgtactgtgggaatatggaggatatgccagcgaaggcgtcaaacaagttgcagaa

SEQ ID NO: 118779 - DNA, 420 bp, Homo sapiens
tcacttttcttctcccgtgggcccactgtcttgggcttcctggatacttgttaactcttgaacatacctccatttcttgagacccaccactgtgcttgggtcttctttcttcacagggccagcatcgtacaaaaacgcattatttattttcaagatgagggctctctgaccaagaaactttgtgaacaaggtaagaccctgaaacacagtcaacaaatgtttttcaagtagacagaggcaagctgatccacttctctgctgttgttcacttctcgacccccaccaaaatggctcttgagtcttgacagtttctgcaatggcctccgcgttgtccgtgcacactccatcatcttgcacacattcctcagtatcgcagagggagctgaccactccctgattcctagaatattctcttctcat

SEQ ID NO: 118780 - DNA, 1045 bp, Homo sapiens
atggagttagaatggaaagtaaatgtaaaagttaatagccaagataccaaccatcacggcagtttgcaacttgcacggggagaagctgcagctgtgaagtttgggaggatgtccaagaagcaaagggacagcctgtatgctgaggtgcagaagcaccagcagcggctgcaggaacagcggcagcagcagagtggggaggcagaagcccttgccagggtgtacagcagcagcattagcaacggcctgagcaacctgaacaacgagaccagcggcacttatgccaacgggcacgtcattgacctgcccaagtctgagggttattacaacgtcgattccggtcagccgtcccctgatcagtcaggacttgacatgacctggaatcaaacagataaagcaagaacctatctatgacctcacatccgtacccaacttgtttacctataggctctttcaacaattgggcagttagcaccagggataacccatgactgaaatcgaaattgttgctgctgagaaatttcccttgatttataagcagtcctttttgctcactgtgctctcttttggtggtggtggctctgtgatctgtggacctacctttgccaaggtctcatcatccagaagatttatacaccacggtgacaaaattcagcccagcatcaatgccttaggttggacctttatggaagagacaccccaaatcttcaaatgccgaacaaatactcatggaaaagaactcgaacatgatcttcctgaacacagttcaggtcaggggtctacaagaagaaaaagcagctgtttgagaagagataataatcctatgcttctctccggtgggcggttttatgagaaaattcacaattttataactggtacatttgatgttagaaaaatggaacatgcagagggtaaaactagtgatcttgttcatgtgggcttccaggccatcaagatgccctccagcctaaagcaggaagccagcaatggtttgatcaaattggaagaagcttcaggagcacgaatgaaaacagggcacataaagtga

SEQ ID NO: 118781 - DNA, 925 bp, Homo sapiens
cagagccccacgaaggaccagaacaagacagagtgcctcctgccgatccaaacatgagccgcctgcccgtcctgctcctgctccaactcctggtccgccccggactccaagctcccatgacccagacaacgcccttgaagacaagctgggttaactgctctaacatgatcgatgaaattataacacacttaaagcagccacctttgcctttgctggacttcaacaacctcaatggggaagaccaagacattctgatggaaaataaccttcgaaggccaaacctggaggcattcaacagggctgtcaagagtttacagaacgcatcagcaattgagagcattcttaaaaatctcctgccatgtctgcccctggccacggccgcacccacgcgacatccaatccatatcaaggacggtgactggaatgaattccggaggaaactgacgttctatctgaaaacccttgagaatgcgcaggctcaacagacgactttgagcctcgcgatcttttgagtccaacgtccagctcgttctctgggccttctcaccacagagcctcgggacatcaaaaacagcagaacttctgaaacctctgggtcatctctcacacattccaggaccagaagcatttcaccttttcctgcggcatcagatgaattgttaattatctaatttctgaaatgtgcagctcccatttggccttgtgcggttgtgttctcatttttatcccattgagactatttatttatgtatgtatgtatttatttatttattgcctggagtgtgaactgtatttattttagcagaggagccatgtcctgctgcttctgcaaaaaactcagagtggggtggggagcatgttcatttgtacctcgagttttaaactggttcctagggatgtgtgagaataaactagactctgaaca

SEQ ID NO: 118782 - DNA, 1797 bp, Homo sapiens
atgaagggcgcgggcggccagctccggctccggctccggctccggctcccgcgaggccggacacttccctctgtgaccatgaaactctgggtgtctgcattgctgatggcctggtttggtgtcctgagctgtgtgcaggccgaattcttcacctctattgggcacatgactgacctgatttatgcagagaaagagctggtgcagtctctgaaagagtacatccttgtggaggaagccaagctttccaagattaagagctgggccaacaaaatggaagccttgactagcaagtcagctgctgatgctgagggctacctggctcaccctgtgaatgcctacaaactggtgaagcggctaaacacagactggcctgcgctggaggaccttgtcctgcaggactcagctgcaggttttatcgccaacctctctgtgcagcggcagttcttccccactgatgaggacgagataggagctgccaaagccctgatgagacttcaggacacatacaggctggacccaggcacaatttccagaggggaacttccaggaaccaagtaccaggcaatgctgagtgtggatgactgctttgggatgggccgctcggcctacaatgaaggggactattatcatacggtgttgtggatggagcaggtgctaaagcagcttgatgccggggaggaggccaccacaaccaagtcacaggtgctggactacctcagctatgctgtcttccagttgggtgatctgcaccgtgccctggagctcacccgccgcctgctctcccttggtaaggagattctaggggaagttacgaccaacgtactctggttagatgctgtggaaggtagaatgcagcatgcagacccaagccacgaacgagctggagggaatctgcggtactttgagcagttattggaggaagagagagaaaaaacgttaacaaatcagacagaagctgagctagcaaccccagaaggcatctatgagaggcctgtggactacctgcctgagagggatgtttacgagagcctctgtcgtggggagggtgtcaaactgacaccccgtagacagaagaggcttttctgtaggtaccaccatggcaacagggccccacagctgctcattgcccccttcaaagaggaggacgagtgggacagcccgcacatcgtcaggtactacgatgtcatgtctgatgaggaaatcgagaggatcaaggagatcgcaaaacctaaacttgcacgagccaccgttcgtgatcccaagacaggagtcctcactgtcgccagctaccgggtttccaaaagctcctggctagaggaagatgatgaccctgttgtggcccgagtaaatcgtcggatgcagcatatcacagggttaacagtaaagactgcagaattgttacaggttgcaaattatggagtgggaggacagtatgaaccgcacttcgacttctctaggcgaccttttgacagcggcctcaaaacagaggggaataggttagcgacgtttcttaactacatgagtgatgtagaagctggtggtgccaccgtcttccctgatctgggggctgcaatttggcctaagaagggtacagctgtgttctggtacaacctcttgcggagcggggaaggtgactaccgaacaagacatgctgcctgccctgtgcttgtgggctgcaagtggggtttttttctgctgttattaccatccagccatgtaatgtccatgcagctggtaaatgccaaggcagctggttggaaacactcagagatacacaggaagctgaagaaggcctga

SEQ ID NO: 118783 - DNA, 1797 bp, Homo sapiens
ggggaaggaacactgtaggggatagctgtccacggacgctgtctacaagaccctggagtgagataacgtgcctggtactgtgccctgcatgtgtaagatgcccagttgaccttcgcagcaggagcctggatcaggcacttcctgcctcaggtattgctggacagcccagacacttccctctgtgaccatgaaactctgggtgtctgcattgctgatggcctggtttggtgtcctgagctgtgtgcaggccgaattcttcacctctattgggcacatgactgacctgatttatgcagagaaagagctggtgcagtctctgaaagagtacatccttgtggaggaagccaagctttccaagattaagagctgggccaacaaaatggaagccttgactagcaagtcagctgctgatgctgagggctacctggctcaccctgtgaatgcctacaaactggtgaagcggctaaacacagactggcctgcgctggaggaccttgtcctgcaggactcagctgcaggttttatcgccaacctctctgtgcagcggcagttcttccccactgatgaggacgagataggagctgccaaagccctgatgagacttcaggacacatacaggctggacccaggcacaatttccagaggggaacttccaggaaccaagtaccaggcaatgctgagtgtggatgactgctttgggatgggccgctcggcctacaatgaaggggactattatcatacggtgttgtggatggagcaggtgctaaagcagcttgatgccggggaggaggccaccacaaccaagtcacaggtgctggactacctcagctatgctgtcttccagttgggtgatctgcaccgtgccctggagctcacccgccgccatgctctcccttgacccaagccacgaacgagctggagggaatcctgccggtactttgagcagttattggaggaagagagagaaaaaaccgttaacaaatcagacagaagcttgagctaacaaccccagaaggcatctatgagaggcctgtggactacctgcctgagagggatgtttacgagagcctctgtcgtggggagggtgtcaaactgacaccccgtagacagaagaggcttttctgtaggtaccaccatggcaacagggccccacagctgctcattgcccccttcaaagaggaggacgagtgggacagcccgcacatcgtcaggtactacgatgtcatgtctgatgaggaaatcgagaggatcaaggagatcgcaaaacctaaacttgcacgagccaccgttcgtgatcccaagacaggagtcctcactgtcgccagctaccgggtttccaaaagctcctggctagaggaagatgatgaccctgttgtggcccgagtaaatcgtcggatgcagcatatcacagggttaacagtaaagactgcagaattgttacaggttgcaaattatggagtgggaggacagtatgaaccgcacttcgacttctctaggaatgatgagcgagatactttcaagcatttagggacggggaatcgtgtggctactttcttaaactacatgagtgatgtagaagctggtggtgccaccgtcttccctgatctgggggctgcaatttggcctaagaagggtacagctgtgttctggtacaacctcttgcggagcggggaaggtgactaccgaacaagacatgctgcctgccctgtgcttgtgggctgcaagtgggtctccaataagtggttccatgaacgaggacaggagttcttgagaccttgtggatcaacagaagttgac

SEQ ID NO: 118784 - DNA, 2433 bp, Homo sapiens
atgctaagcacaggaaccaagtaccaggcaatgctgagtgtggatgactgctttgggatgggccgctcggtctacaatgaagggggctattatcatacggtgttgtggatggagcaggtgctaaaggagcttgatgccgtggaggtggcaccacaaccaagaaaaggtgaaatgcttctggtcctggaatgtgtgagagatgacccagaggtttcagaagttctgctgtttttgatgtcccgaggctctgtgaagcagcatttttgcacagattatgaacttatttggcataaccggagctttccttcatcggccctcaaaccccgtctagggagcagtgtgttgggggcgttcagcgttcgggctgggggcttggtcctaagagagcttgcactgtggatgatgtccgccctctttgcgcccgcaaaacaaagacgagttctgagtttcaggagggacctggacgaggcaagcacagcactctgctttcggcgcctgtcgcctcgagtttggggacgagctgacgctagtctttggggctccctgcagccgacaaagcggcgccaaccccaggcctgccacctgaggactttgtgcccgcaactcttgcgggagcggaaagccgccgaggcagtgtcgcttccgccgagctttcctccagtgaaaaacagcgccggcagcttggtctgttaccttcgtaaatttgttgcaagcctgtgcaccaggaattgtactagatggggcccccgagatacaaacatccgtccaggttctctgggccaaacagtaaacagaatttcaataggtggtgaagtaactgccagccaaaatgttcaccgggaatgggcctgtgtcacaatctgtgaggggaaaagacggatcaatgtagccgccgcacgtctagccatcttgggcccggactctgggccatggcttgggagggctctgacctctggctggagtccccataggactcctccagtggaaaggggtggttactttgcccgggcctgtctctataagctggccaaaactggctggcttgaggtctatggctatttatcagcgaagcaagtaaggccaattctctgtcccatcagaattgtggcaggaccatggtgggcagccagcagatcggtcggctggtgtcaagtagtagtctatcagggtcaacaggaaatttccagctgtagtttctgtgatgtttttcaggacctggtttctgcttacaggaaagaaaaccttatggtagttagtaacacagggatacatgaccaagccctcatcttgctgtggccgttagattctggttttgagcaggtttgcccctctgaggttcggactacactcctatatgtagcccccagaagacaccaggagcttcaggctggctccagggctgttgctgcatccatctcagtggcacctggaacaccagcaagacagaacggttcactaccctggaaagggggcttaagccagggagccaagtggtctagctcagtgggtcccacccccatggaagcccgtaagtctagtgttaactctgtggacactgtaggctctcataggtcaacagcagaacttgaccgctttctgccggagggagagcagcttaaggctgcagctgctgtgccgcctgacctccagaggggggattcaggagaaacccttttttatatctcttttgtccctggtttcaaggcgtttcactactttgagctttttcatttcgatgggctagcggtcttgactatatcggcactgtgctctaaagttgcagaatccagaaataaagacaaatacttacagccaactgatcttcgacaaagcaaacaaaaatataagcaaatggtctccatgtctctgcctatgagtgtgggccttgtgctccctgtcccccaccccatgggaccaccagaagttagctctccgagtgcaaggggcctccaggtgatcagcatttcccaacttcctgaccccaagacaatggaaaatgctaggatagcaggaacagatatgggttcaaattctggttctgcggtcactgattgtgtggactgggctgaccactggtctcccagatctcaggtccccagagataacaagaaccctcatcaagggttggacagctaccacacagacatgtaccgctgccagatctgtctcctgtacatgcagactctgaaactccaaaacttcccgtgggcctcacgctctgaagatctgctcctttgtcccctgggtcctcaacttagccatgtggacagtgattctaactcctcttactcacattcaaagcacactttgccttgcatcccagaaaatgaagccgagttgattgtggtggataacctttctgatgtgctgctagatttggtttgccagtattttattgagggttttcgcattgatgttcatcagggatattag

SEQ ID NO: 118785 - DNA, 1081 bp, Homo sapiens
atgaacaccaggccgggtgtggtggctcacgcctgtaatcccagcactttgggaggccaaggcgaggaacaagattccctggacacctccagtgagatcaggtgtctggaggttgctgagcagcgcaagctcctatttacgggcctcgtgtcgggggtcgtccttgtgttccccctgaattccaggcaggacgtgatatgcattccccctcccgaggcccggaaagcaatcaactgcatgtccctgagcaagtgcgaggaccgcctggccatcgcctatgacaacatcgtcctggtgctggacatcacctccggggacccctgcccggtcatcgatgggccaagatacaccttttacactcagctgcccgagaccctctccagcgtggccattctgacggactaccgcgtggtctacagcatgaccaatggggacctcttttctttacgagtgtgcaaacttccaaagcgtttcccttggagacccacaggagccgagttgcctgtgtggaggtcagccacaaggagcagctggtgggtcaagcgggtctgaggatgccctgctgtgtctctgggacctgcaggcacgcaagtggaaattcgagatgagctacacgtcagggaacatcaggggttccagcttctgccagtttaagtcatcttttctggtgtatttcaaagccttactgaaatttcgagaactcttcgcccagttcaagtctttcatgggggaaaagaagctgtccttggcgccacccatgagcgacagttccggggatgggataatccggaaaattgattatgcttcgtgcaagcgcagtggcatccagtatccgggcactccccaaaacctaccagcagcccaagtactgaacgacacctgggtctccttcccttcctggtctgaggactccacgttcgtcagctccaagaagacaccgtacgaggagcagcttcaccgctgtgaggacgagcgcttcgaggaaatgaagacagcaggttttgcctcctttggggaacgatctaagacaggggtccccaacctccgggtcacagactggtaccggttggtggcctgttag

SEQ ID NO: 118786 - DNA, 427 bp, Homo sapiens
atggggctagctcagaagaagcagagggcgcctccgaggggccacggagccccaggaggctggggagccccaggaagccagggagcccaggaaggcggggatctgcaggaagccgaggagtcccaggaaggcggggaccccaggaagccgaggagccccaggaaggtggagcgccacaggaaggcgggagccccaggaagagacctggggaggccttctctgaccgtgctgctgagaccactgcgtgctgcagcggcttcggaagatctaccactcatccatcaagcctctggagcagtcctacaagtacaatgagctccggcagcatgagatcacaggccagcggtgcccctgctgtgaggagccgaaaccacagcaccaggaaagggccctgtttgtggttgtctcggagaaccggaacatctag

SEQ ID NO: 118787 - DNA, 1056 bp, Homo sapiens
atgagtcagaagtatctttttatcgatcgcgatggaaccctgattagcgaaccgccgagtgattttcaggtggaccgttttgataaactcgcctttgaaccgggcgtgatcccggaactgctgaagctgcaaaaagcgggctacaagctggtgatgatcactaatcaggatggtcttggaacacaaagtttcccacaggcggatttcgatggcccgcacaacctgatgatgcagatcttcacctcgcaaggcgtacagtttgatgaagtgctgatttgtccgcacctgcccgccgatgagtgcgactgccgtaagccgaaagtaaaactggtggaacgttatctggctgagcaagcgatggatcgcgctaacagttatgtgattggcgatcgcgcgaccgacattcaactggcggaaaacatgggcattactggtttacgctacgaccgcgaaaccctgaactggccaatgattggcgagcaactcaccagacgtgaccgttacgctcacgtagtgcgtaataccaaagagacgcagattgacgttcaggtgtggctggatcgtgaaggtggcagcaagattaacaccggcgttggcttctttgatcatatgctggatcagatcgctacccacggcggtttccgcatggaaatcaacgtcaaaggcgacctctatatcgacgatcaccacaccgtcgaagataccggcctggcgctgggcgaagcgctaaaaatcgccctcggagacaaacgcggtattcgccgctttggttttgtgctaccgatggacgaatgctttgcccgctgcgcgctgaatatctctggtcgcccgcacctggaatataaagccgagtttacctaccagcgcgtgggcgatctcagcaccgaaatgatcgagcacttcttccgttcgctctcatacaccatgggcgtgacgctacacctgaaaaccaaaggtaaaaacgatcatcaccgtgtagagagtctgttcaaagcctttggtcgcacctgcgccagccatccgcgtggaggaccaggattactagatactgtgtaa

SEQ ID NO: 118788 - DNA, 511 bp, Homo sapiens
ctaagctttgccagctgctgctggatcacagctgctttctgttgtcattgctgttgtccctctgctacgttcctggtacagatcatttctcatgttgataatgtcatcagaaatcaaaccagatgtgacttctagtagatccctcacaagttgagaatgaaggtggatgattgctaagtgtaagacacgtagtgcgtaatacccaagagaccgcaaatgacgttcaagtgtggtggatcgtgaaggtggcagcaagattaaacaccggcgtttgctttcttgatcatatgctggatcagatcgccacggcggtttcccgcatggaaaatcaacgtcaaaggcgacctctatatcgacgatcaccacaccgttcgaagataccggcctgggcgctgggcgaagcgctaaaaatcgcccccggagacaaacccggtatttgccgctttggttttgtgctacccgatggacgaatgcctgagcctgcgcgctggatatctctggcggcccgcac

SEQ ID NO: 118789 - DNA, 852 bp, Homo sapiens
agcggccgccctttttttttttttttgcttttccttttattataaaagtaaaataaaaaatagcatttataaatccaacattttttcctttaaagtatttgatctaaaaaacatatttacaatagcaaaatgcagaaaagggggaaaataccattttcagcaatgattgtaaccatgtttaaatattgacaagtattttttttttttttttttttgcaaatcagaaaaataaccacattagaaaaagcaatatgccttttttttttaaaaatggcaacatcaagtgactctcattttaaaatatctcttttcttaacccttaatttgaatgcaaaatgatgctgtggtcagaaggaaatgcccaggtggcgaccgtcgataccttttaatgacaataggaacgtaggcagagggacaacagcaatgacaacagaaagccagctgtgaatccagcagcagctgccaaaagcttaggtaaggcaacctcatccccaggatggcatccgctcaggccagtgttgtgattgctaggatactatctggtaaggtggaaccaaactaaaattcatttatgaaccaagaaaggaaggccaagttggaaaagggtctcgagtttaaatcgagaattgattcagggcgggccggctctctgagcacctttggatgcacttcagcttctgtcttgtggacaacgcagtggaattttagggctttggtttacacggtgtgggaaattgtcagcaggctaaattttgctttctagaggtccttcctgcccataatcatggggcattttgttgagagttagcagtgaggccccactggtcagagactcggtaaagctgagttgcg

SEQ ID NO: 118790 - DNA, 1647 bp, Homo sapiens
atgaggcggctgcccgctgggtggcgccgatttcccggggaggtcccttctgggcccccggcggaggtgggagagagtcaggcaggagccgaggccggggagccctcttcgtcagctggtgctcactgcgccgcgccagcgccagccgggactcacccgcagctccatgcttgtgcccggttcgactcgtccatcctccaagaagaggcaggtacgtgccacctgtcggggatccgggagggaggattcggggatcagtgccggtttggagctcagaaaggagtttgtggtcagcgagtgggcccttgggggtcttgggctgtcacagggactccagaaagccatgcagagccttgtgccatgaaggacttctcagatgtcatcctctgcatggaggcaacagaatcgagcaagaccgagttctgcaatcctgccttcgagcctgagtctgggccaccctgccctcccccagttttcccagaggatgccagctacagcgtcccagctccctggcatggtcggcgtcctcgagggctacggccagactgccgcttctcctggctctgtgtcctcctgctctccagcctgctcctcctgctgcttgggctgctggtggccatcatcctggcccagctgcaggctgcacccccatctggggcgtcccatagcccactgcctgccggaggccttaccacgaccaccaccacccccaccatcaccacctctcaggcagctgggacccctaaagggcagcaggagtcaggcgtgagcccctccccacagtccacctgtggaggcctcctctctggcccaaggggcttcttcagcagccctaactacccagacccttacccccccaacacccactgcgtgtggcatatccaggtggccacagaccacgcaatacagctcaagatcgaagccctcagcatagagagtgtggcctcttgcctttttgatcgcttggaactctcccctgagcctgaaggccccctcctcagggtttgtggaagggtgcctccccccacgctcaacaccaatgccagccacctcctggtggtcttcgtctctgacagcagtgtggaaggatttggtttccatgcctggtaccaggctatggcccctgggcgcgggagctgtgcccatgatgagttccgctgtgaccagctcatctgcctgctacctgactcagtgtgtgatggttttgccaactgtgctgacggcagtgatgagaccaattgcagtgccaagttctcggggtgtggggggaatctgactggcctccagggcactttctctactcccagctacctgcagcagtaccctcaccaactgctctgcacctggcatatctcggtgcctgccggacacagcatagaactacagttccacaacttcagcctggaggctcaggacgagtgcaagtttgactacgtggaggtgtatgagaccagcagctcaggggccttcagcctcctgggcaggttctgtggagcagagccacccccccacctcgtctcctcgcaccatgagctggctgtgctgtttaggacagatcatggcatcagcagtggaggcttctcagccacctacctggccttcaatgccacggagaggctctgcctggtggaatccacaagttcctag

SEQ ID NO: 118791 - DNA, 550 bp, Homo sapiens
ttcatctcggaatgcatcatcaggtttctgcagagcaagcatccgggggactttggtgctgatgcccagggggccatgaacaaggccctggagctgttccggaaggacatggccccacccatctgggccccgggttcaagagagagcggggtctgatctcgtgtagccatatagagtttgcttctgagtgtctgctttgtttagtagaggtgggcaggaggagctgaggggctggggctggggctcactgtgttctgcatggtttggatctgaattaattgtcctttcttctaaatcccaaccgaacttcttccaacctccaaactggctgtaaccccaaatccaagccattaactacacctgacagtagcaattgtctgattaatcactggccccttgaagacagcagaatgtccctttgcaatgaggaggagatctgggctgggcgggccagctggggaagcatttgactatctggaacttgtgtgtgcctcctcaggtatggcagtgactcacctggttttaataaaacaacctgcaacatctcaaa

SEQ ID NO: 118792 - DNA, 1175 bp, Homo sapiens
ggtagccggccgcaattcccgggtcacacacgcgtccgagcgagcggctggcgaccatgcagtctcaaaccccagctgttggggccagtacacccagtgagcccatacttgctctttttgtcttcttcagactgcgccatggggctcatcgacggggaatggcagttggtgctgaacgtctgggggaaggtggaggctgacatcccaggccatgggcaggaagtcctcatcaggctctttaagggtcacccagagactctggagaagtttgacaagttcaagcacctgaagtcagaggacgagatgaaggcatctgaggacttaaagaagcatggtgccactgtgctcaccgcccctgggtggcatccttaagaagaaggggcatcatgaggcagagattaacgccccgtggcacagtcagcaatgccaccaagcacaagatccccgtgaaagtaacctggcgttcatctccggaatgcatcatcccaggttctgcagagcaagcatcccggggacttttggtgctgaatgcccagggggccatgaaacaaggccctgggagctgtttccggaaggacaattggcctccaacttacaaggaacttgggctttccagggctaagccccttgccggctttcccacccccaacccatcttgggcccccgggttcaagagagagcggggtctgatctccgtgtagccatattagagtttgcttcttgagtgtctgctttgtttaagtagaggtgggcaagaaggagctgaaggggcttggggcttggggtgtttgaagttggcttttcatgcccagccgatgcgcctcccctgtggattgtcatcaccctgggaaccgggaagtggcccttggctcaactgtgttcctgcatggtttggatctgaattaattgtcctttcttctaaatcccaaccgaacttcttccaacctccaaactggctgtaaccccaaatccaagccattaactacacctgacagtagcaattgtctgattaatcactggccccttgaagacagcagaatgtccctttgcaatgaggaggagatctgggctgggcgggccagctggggaagcatttgactatctggaacttgtgtgtgcctcctcaggtatggcagtgactcacctggttttaataaaacaacctgcaacatctc

SEQ ID NO: 118793 - DNA, 550 bp, Homo sapiens; identical to SEQ ID NO: 118791

SEQ ID NO: 118794 - DNA, 1164 bp, Homo sapiens
ggtagccggccgcaattcccgggtcacacacgcgtccgagcgagcggctggcgaccatgcagtctcaaaccccagctgttggggccagtacacccagtgagcccatacttgctctttttgtcttcttcagactgcgccatggggctcatcgacggggaatggcagttggtgctgaacgtctgggggaaggtggaggctgacatcccaggccatgggcaggaagtcctcatcaggctctttaagggtcacccagagactctggagaagtttgacaagttcaagcacctgaagtcagaggacgagatgaaggcatctgaggacttaaagaagcatggtgccactgtgctcaccgcccctgggtggcatccttaagaagaaggggcatcatgaggcagagattaacgccccgtggcacagtcagcaatgccaccaagcacaagatccccgtgaaagtaacctggcgttcatctccggaatgcatcaatccaggttctgcagagcaagcatcccggggacttttggtgctgaatgcccagggggccatgaaacaaggccctggaagctgttccggaaggacaatggcctccaactacaaggagctgggcttccagggctaggcccatgccgcatcccacccccacccatctgggccccgggttcaagagagagcggggtctgatctccgtgtagccatattagagtttgcttcctgagtgtctgctttgtttaagtagaggtgggcaagaaggagctgaaggggcttggggcttggggtgtttgaagttggcttttcatgcccagccgatgcgcctcccctgtggattgtcatcaccctgggaaccgggaagtggcccttggctcaactgtgttcctgcatggtttggatctgaattaattgtcctttcttctaaatcccaaccgaacttcttccaacctccaaactggctgtaaccccaaatccaagccattaactacacctgacagtagcaattgtctgattaatcactggccccttgaagacagcagaatgtccctttgcaatgaggaggagatctgggctgggcgggccagctggggaagcatttgactatctggaacttgtgtgtgcctcctcaggtatggcagtgactcacctggttttaataaaacaacctgcaacatctc

SEQ ID NO: 118795 - DNA, 532 bp, Homo sapiens
catccaccaggatgcaaaagaggaaagtcacttccagggaaaaagatgacggacgtaccactaaaggcagtgtggatgggaaggcggatgcctctggaggcctacctctgggagccctgccagagtctgacggcaggactcaggactgactgggggaagggagtgaggattataggagaccaagagatgtctaggaatccagcttggaggatgcagttgatggtgggtccatcaccgggcaggggaccgtatctgtttcccaggaagggtgtggggattcagtctgggtccaggcatggcgaagctggcacccagtctcaggctccagggatagcgtgtaggagtgattttcctcggagccacagctggcatggggagctggtgtggatgggacaggagctccggggggtcctgcatcgcccttggcccctggcctcttcttacattctaccttcacctggtctctgcagtgtttgtggcaacacagcccgcactcccgacagcggtagccttgcttggtgacaccccagag

SEQ ID NO: 118796 - DNA, 1065 bp, Homo sapiens
atgggcaaggacttcatgtctaaaacaccagaagcaatggcaacaaaagccaaaattgacaaatgggatctcattaaactaaagagcttctgcacagcaaaagaaactgccatcagagtgaacaggcaacctacaaaatgggagaaaatttttgcaacctactcatctgacaaagtgctaatatccagaatctacaacgaacttaaacaaatttacaagaaaaaaacaaacaaccccatcaaaaagtgggtgaaggatatgaacagacacttctcaatagaagatctttatgcagccaaaagacacatgaaaaaatactcatcatcactggccatcagagaaatgcaaatcaaaaccacaatgagataccatctcacaccagttagaatggcaatcattaaaaagtcaggaaacaacaggtctcgtataaacttctgtaaatgcgacccaggaggactaggcaggtcacacagtgaaggagggaaccagaaacttcacttgctaaagagacaccaggaaacccaactaatacaaacgccaagtttaagactagaggagcacgcatttcgcactactcctctgggaatggggaacgtctcccgagaactgtgtgttagcaccgggacacatgggcaaactgagcgacatgagggttgggaacactggtccggccccccgggatcccccgagacccacgggttcctcttcgccctcgcaccgacccgcagggacatagaaccaagccccaagccggcccagctacaggaccctctctgggtgccgcacgtccggaggaaaatggcggagtgggccgggcagcgcaagcgcagagaaaaaagctggttcccaaggtccttgatggtaacatcattggaagatgatttgatcttatatttggaaaaacctaaggactccaccaaaaaacgattagaactgatcaacaaattcagagtcacaggatacaaaatcaaactacaaaagtcagtagcatttctaaatgacaaaaatgaacaatctaaagaagaaaatcaagaatgtaatcccatttacaataactacaaataa

SEQ ID NO: 118797 - DNA, 6477 bp, Homo sapiens
atgcctgcccagcctcaggaccgcctctgggttgagcacttccggaggacaatggtggagtgggcggggcagcgcatgagcagagagaaaaactggttcccaagatccttcatggtaacatcattggaaggtgacactacatttcccatgaggctctacgttcccctgttaggaacgcatgtcggacattctgctttgcccagctgtgatttgatcttatatttggaaaaacctaaggactccaccaaaaaactattagaactgatcaacaaattcagagtcacacgatacaaaatcaaactacaaaaatcagtagtatttctaaatgccaaaaatgaacaatctaaagaagaaaatcaagaactggggcaggtagctccaggtgccaacacgggcgccagctctccgcaaggctatggctggaccacgggcacctcaagcagcttccacagctggcacattgggaacacagtggaacccagaagcttggagataccaggaaccacagggccccaaagagggaatcacagccctggctcagggagctcccaggtcaaacattcagacacttgcaatgactataatgacagcagaagtcttcaggaatcctatgtgagggacaaacactcagaagccagctggagtgttctagaatcctatgtgagggacaaacattcagagcccagcagcagtgttctggaatcctatgtgagggacaaactttcagaccctcgtagcagggttctggaatcctatgtgaggggcaaacatttagaccctcgtagcactgttctggaatactattgttctggagtcctatgtgatgaacaaactttcagaccacagcaggagtcttctggaatcctatgtgagggtcaaacattcagaccccagcagtattgttctggaatcctatgtgaggacaaacattcagacccacgtggcagtgttctggaatcccatgtgagggacaaatattcagaccacaacaggagtgctctggaatcctatgtgaggggcaaacattcagaaccttgtagcagtgttctggaatcttatgtgagggagagacatttagaccctcgcagcagtgttctggtatcccatgtgagggacaaacattcagaccctcccagctgtgttctggaattctatgtgagggaaagacattcaaactccagcagcagttttctggaatccgatttgaggggcagacattcagaccccagcagcagtgttctggaatgctatatgggggacaaacattcagaccccagcagcaggcttctggaatcctatgtgggggacaaacattcagacaatggcagcagtgttctggaatcctatgtgagggacaaacactcagagcctcgtagcagtgctctggaatcctatgtgagggacaaacactcagagcctcatagcagtgttctggaatcctatcaggagtgttctggaatcctatgtgagggcaaacattcagatcacagcaggggtgttctggaatgctatgtgagggacaaatattcagacactagcatcaggcttctggaatcctacatgagggacaaatattcagacaacgacagcagtgttctggaatcctatgtgggggacaaacattcagagcctcgtagtgttgtggaatcctatgtgagagacagacatttaggccacagcagcagtgttctggaatcccatgtgagggacaaacattcagatccgaacaggagtgttctggaatcctatgtgagggacaaacatttagaccgtcttagcagtgttctggaatcctatgtgagggacaaacattcatatcctcgtagcattgttatggaatcctattgttctggaatcctatgtgagggacattcagaatttcatagcagtgttctggaatcctacgtgacggacaaacattcagaccacagcaggagtgttctggaatcctatgtgagggacaaaaattcagaccccagcatgaatcttctggaatcctatgtgagggacaaacattcagactctcatagcagtgttctggaatactgtgtgggggacaaacattcagaccacagcaggagtgttctggaatcctacgtgagggacaaacattcagaccctcgtggcagtgttctggaatcctatgtgagagacaaacattcagaccctcataacagttttccggaatcctatgagtgttctggaatcctatgtgagggcaaacattcagatcacagcaggagtgttctggaatgctatgtgagagacaaacattcagacactcgcagcaggcttgtggaatcctacgtgagggacaaatattcagacaacggcagcagtgtactggaatcctatgtgggggacaaacattcagagcctcgtagtgttgtgggatcctatgtgaggggcagacatttagaccacagcagcagtgttctagaatcccatgtgagagacaaacattcagacccgaacaggagtgttctggaatcctatgtgagggacaaatattcagaccctcttagcagtgttctggaatcctatgtgagggacaaacattcatatcctcgtagcagtgtcatggaatcctatgtgagggacaaacattcagaccttcgcagcagtgttctggaatcctatggatattcagagcccagccgcagtgttctggaatcctatgtgacagacaaacattcagaccacagtagcagcgttctggaatcctatgtgagggtcaaagtatcagaccgcagcaggagtgttctggaatcctatgtgagggacattcagaccattgcaggaatgttctggaatcctatggaccaacattcagaccctcgaagcagtgttctggagttctatgtgagagacaaacattcagaccctagtagcagtgttctggaatcctatgtcagggacattcagacaacagacacagtgttctggaattctgtgacagacaaacattccgaccacagcagaaatgttctggaatcctatagcaggagtgttctggaatcccatgagaggggaaaacattccgactccagcagcagtgtccttgaatgctatgtgagggacaaacattcagaccacagcaggagtgttctggagtcctatgtgagggagaaacattcagaacacagcaggagacttctggaaaccattgtgaaggacaaacatacagacctttgtagcagtgttctggaattctatgtgaggaaaaaacattcagaacacagcaggagtgttctgaaatcctatgtcagggacaaacattcaaaccacagcaggagtgttctggagtcctatgtgagtgtcaaatattccgacaacagcaggagtgttctggaatcctatgtgagggacaaacattcagaccctcgtagcagtgttctggaatcctatgtgagggaaaatcattcataccctcgtagcagtgttctggaatcctatgtgagggttaaaatctcagaatccaggagcagtgttctggaatcctatgtgagggacaaacattcagtccacagcagcagtgttctggaaagctatgtgagggacaaacattcagaccatagcaggagtgttctggaatcctatgtgagggacaaacattcagaccctggtagcagtgttctggaatcctatgtgagggaaaatcattcataccctcgtagcagtgttctggaatcctatgtgagggttaaaaactcagaatccaggagcagtgctctggaatcctatgtgagggacaaacattcagtccacagcagcagtgttctggaaagctatgtgagggacaaacattcagaccatagcaggagtgttctggaatcctatgtgagggacaaacattcagaccctcatagcagtgttctggaatcctatgtgagggaaaatcattcataccctcgtagcagtgttctggaatcctatgtgagggttaaaatctcagaatccaagagcagtgttctggaatcctatgtgagggacaaacattcagtccacagcagcagtgttctggaaagctatgtgagggacaaacattcagaccatagcaggagtgttatggaattctatgtgagagataaacattcagaccacagcgggagtgttctggaatgctatctgaagaacaaaattcagaacccagcagcagtgttctggaatcctatacaaacattcagaccctggtatcagcgttctgccatcctatatcagggacatacttaccccagccacagtgttctggaatcctatgtgacagacaaacatacaaacaacagcaggagtgttctggaatcctatgtgaggaacaaacattcagaccccagcagcagtgttctggaatcttatgtgagggaaaagcattcataccctcgtaggggtgttctagaatcctatgtgagggaaaagaaactcagaatccaggagcactgctctggaatcctttgtgagggacaaatattcagtccacagcagcagtgttctggaatgctattgagggacaaacattcagacaacaaaaggagtgtcctggagtcctatgtgagggacaagcactcagaagcccacagcagtgttatggaatcctatgtgagggacaaacatgcagacctcagcagcagtgttctgggatcctatgtgagggacaaacattcagaccccaggagcagtgttcttggatgccatgtgagagacaaatcttcagaccacagcaggaatgtgctcgaatcctatatgaaggacaagcattctgactcttgtagcagttttctggaatcctatgtgagggacaaaccttcagacctcagcagcagtgttctgggatcctatgtgagggacaaacattcagaccccaggagcagtgttcttggatgccatgtgagagacaaatcttcagaccacagcaggaatgtgctccaatcctatgtgaaggacaagcattctgactcttgtagcagttttctggaatcctatgtaagggagaaacattcagaccccagtagcagcgttgtgaaatcttatgtgagggacaaacattcagaccctcctagcagtgttctggaatcctatgtgagggacaaacattcagaccctcctagcagtgttctggaatcctatgtgagggacaaacattcagaccctcatagcagtgttctggaatcctatgtgaggaacaaacattcagacaactgtaggattgttctggaatcctatgtgagggagaaacgttcagaccctcgtaacagtgttctggaatcctatgtgagggacaaacattcagaccagagcaggagtgttctggaatcgcatgtgacgaaaaaactttcagagcacagtaggagtgttctggaatcctacgtgatggacaaacattcagaacccagcagcagtgttctggaatattatgtgaggggcaaaagctcagactccagcagcagtgttcttgaatgctatctcagagacaaacattcagaccacagttggagtgttctggagtcctatgtgagggacaaacattcagatcacagcaggagtgttctgaaatcctatgtgagggacaaacattcagatcacagcaggagtcttctggaatcccttgtgaaggacaaacattcagacacttgtggtagtgttctggaatcctatgtgagggacaagcatgcagaacactgcaggagtgttctgaaatcctattgttctggaattttatgtgaggcacattcagaccccagcagcagtgtttttgaatgctatgtgagggacaaacattcagaacccagcaacagtgttcttgaatgctatgtgagggacaaacattcagaacacagcagcagtgttctggaatcctatgtgagggacagacattcacacaacagcaggaatgttctggaatcccttgtgaaggagaaacattcagacccttgtagcagtgttctggaatcctatgcgagcgacagacattcagaacacagcaggagtgttctggagtcctatgtgagggtcaaacattcagaccctcgtaacagtgttctggaatcctatgtgaaggacaaacactcagactcgagcagcagttttctagaatcttatttcaggatcaaatattcggaccctcgtagcagtgttctggaatcctatgtgagggacaaacactcagaacccagcagcagtgttctggaatcctatgtgagggagaaacattcagacaacagcaggagtgtggtggaactgtgtgtgaggaacaagcattcagaccacagtaggagtgttcaggaatcctgtgtgagggacaaacattcagaccctcataacagtgttatagaatcccatatgagggacagacaacctagcagcagtgttctggaatcctatgtgagggtcaaacattcagaccacagcaggagtgttctggaaacctgtgtgaggacaaacattcagaccacagcaggagtgttctccaatcctatttga

SEQ ID NO: 118798 - DNA, 625 bp, Homo sapiens
atgagttctgatatttccgaagtagaagataagaatgagtttcttactgaacaactttctaaaccacaaattaaattcaataccttaaaagataagttccttaagacaagagatactctcaagaaaaaagtcattggctttagaaactgtacataacaacctaagccaaacacagcagcaaataaaggaaatgaaagagatgtatgaaaatgcagaagctaaagagaataattccactggaaagtggagctgtgtagaagagagaatatgtcaactccaacatgaaaatccgtgcattgaacagcaactagatgatgttcatcagaaagaatgtttaccatcgaggaaggagaagtttaagtctgaaccaccagctttcctcagtggaaatcaagtgaagtcatcatcttgcagtttacagaccctctttcctcctgatgatttgatcttatatttggaaaatcctaaggactccaccaaaaaactattagaactgatcaacaaattcagagtcacaggatacaaaatcaaactacaaaagtcagtagcatttctaaatgacaaaaatgaacaatctaaagaagaaaatcaagaatgtaatcccatttacaataactacaaataa

SEQ ID NO: 118799 - DNA, 3274 bp, Homo sapiens
atgcaccttaaaacaagaaaatgaagaaaaaacaaatgttaatatgctgtacaaaaaaaatagagaagaattagaaaggaaagagaaacaatataagaaagaagttgaagcaaaacaacttgaaccaactcttcagtcactagagatgaaatcaaagactgcaagaaatactccaaatcgggattttcataatcatgaagaaatgaaaggtctgatggatgaaaattgcattttgaaggcagatattgctatactcagacaggaaatatgtacaatgaaaaatgacaacttggaaaaagaaaataaatatcttaaggacattaaaattgttaaagaaacaaatgctgcccttgaaaagtatataaaactcaatgaggaaatgataacagaaacagcattccggtatcaacaagagcttaatgatctcaaggctgagaatacaaggctcaatgccgaactgttgaaggaaaaagaaagcaagaaaagactggaagctgacattgaatcttatcagtctagactggctgctgctataagcaaacacagtgaaagtgtgaaaacagaaagaaacctaaaacttgctttagagagaacacgagatgtttctgtacaagtagaaatgagttctgctatttccaaagtaaaagctgagaatgagtttcttactgaacaactttctgaaacacaaattaaattcaataccttaaaagataagttccgtaagacaagagatagtctcagaaaaaagtcattggctttagaaactgtacaaaacgacctaacccaaacacagcagcaaacacaggaaatgaaagagatgtatcaaaatgcagaagctaaagtgaataattccactggaaagtggaactgtgtagaagagaggatatgtcacctccaacgtgaaaatgcgtggcttgtacagcaactagatgacgttcatcagaaagaggatcataaagagacagtaactaatatccaaagaggctttattgagagtggaaagaaagacctcgtgctagaagagaaaagtaagaagctaacgaatgaatgtgatcatttaaaagaaagtctctttcagtatgagagagagaaaacagaaggagtacctaaaaaagaaaatgaagaattaagaaaactttttgagttaatatcatcactgaaatataatgtgaatcgaataagaaagaaaaatgatgaattagaagaagaggcaactggatataagaaactcctggaaatgacaataaatatgttaaatgtatttggaaatgaagactttgattgccatggagacttaaaaacagatcaactgaaaatggatattctgattaagaagctaaaacagaagtttgatgatcttaccgcagagaaggaagctttatcttcaaaatgtgtcaatttggctaaagacaatcaagttcttcaacaggagtttttatctatgaaaaaagtacaacagcaatgtgaaaaacttgaggaggataaaaagatgttgaaagaagaaatattaaatcttaagacacatatggaaaacaatagggtagaacttagtaaactacaagaatataaattggagctagatgaaaaggcaatgcaggcagtagaaaaattagaagaaatccatttacaggaacaagcacaatatgaaaaacaattagagcagttaaacaaggataatatggcttcactaaataaaaaggaactcacacttaaagatgtggaatgtaaattctcagaaatgaaaactgcttatgaagaggttacaactgaattagaagaatataaggaagcctttgcagcagcattgaaagctaacaattccatgtcaaaaaaattaacgaaggcttcaaatcaacacactacttcctggggcacaaacctgccaagagggggaattcaacatgtggaagaggtggtcctacgctgtccactggaaaaggagggactcagggaaaagaaactcctacatgaggaaagatcattatggaggcgtcagcccatagtcactggggacgctctcaccagcacctgtgaattttggagacatttgaggatgtcctgtgcaaattgggatgttggaagttctgatgaatctgcagtcagaaaaaagtcattggctttagaaactgtacaaaacgacctaagccaaacacagcagcaaataaaggaaatgaaagagatgtatcaaagtgcagaagctaaagtcagtaaatccactggaaagtggaactgtgtggaagagaggatatgtcaactccaacgtgaaaatccgtggcttgaacagcaactagttgatgttcatcagaaagaggatcataaagagatagtaattaatatccaaagaggctttattgagagtagaaagaaagacctcatgctagaagagaaaaataagaagctaatgaatgaatatgatcatttaaaagaaagtctctttcaatatgagagacagaaagcagaaacagtaatagcacagcccctcaatctgagtgctcagcagagtgcttgtgaaggcagcaccacagcaacagttgctcagagggaacagattcaggagccttggtttagcaatagagtccagggttttcagctcagtgtctttagcctgtctctgctggtcatgtcagttatgtactattccatccaggaggcatctgactctgcatctccccgaggtttggagccccccatgcttcagagagctgctcaaagaatggcccggagtgcggaggccaggatgggaaggcgagcttggaagcagacggtgatgcgcctggggcagaacatctgtgttctctgttgtgagtggttaagacaagaagacagggcctggatgtcccagacagtcccccagggacttggtgggggcagcccctaccccagatcccagttagagagaacagcccagctcttggggctctgggcctggctgagccacctgggatctgggtaccctggtggtcggggaggggcacagactttaagtccagcagaagttgtttccggacagtctatgaaaagctctgctggccacggaggaagtaggcagctgacaaaaagttctgcaattgcctgtgccaaactgtgtaaagcaagtacttacatcaattgggaagataacgctgtcattttcctacttgttcagtccatggtggttgatcttaaggcagaagagcctcatcccattgctaccatcaccacaggcccatggggaataccgccaggctaccaccaatgttcccttaagattcaaggctctttagttcacttgtag

SEQ ID NO: 118800 - DNA, 582 bp, Homo sapiens
atggatgtggaaatcaacatgcagatggtatttaaaaccatggaaatggacgatatcatcgagggagagaatggaagagaaagaagggctagttttgagcccttgggaatctcctgtgttgagagatcagtacagaagcgacaaggagcaaaggaaactgagatggggattcaagccaaaactcgagaatttagggaacgacaagctcgagagcgtgactatgctgaaattcaagattttcatcggacatttggctgtgatgatgagttaatgtatgggggagtttcttcttatgaaggttccatggctctcaacgctagacctcagagcccacgagaagggcatatgatggatgctttgtatgcccaagtcaagaagccgcggaattccaaaccctcacctgtagacagggtttggggcctgaccaagtgtggagcaaacgacagagcagaagcccatggagctcagctcatgaccaaagctgcagagtgtccagatgaaatggtgaacaccaagttcatgaggccagaggattccctgatgtgcacaaattcggacaaaagcttcagtacttggaattga

SEQ ID NO: 118801 - DNA, 510 bp, Homo sapiens
acccatggccgcccacattcccgggtcgagaatttagggaacgacaagctcgagagcgtgactatgctgaaattctttattttcatcggacatttggctgtgatgatgagttaatgcatgggggagattcttcttatgaccgtgccatggctctcaacgctagacctcagagcccacgagaagggcatatgatggatgctttgtatgcccaagtcaagaagccgcggaattccaaaccctcacctgtagacactaacagatcaactcctagcaatcatgatcggatacagcgtctgaggcaagaatttcagcaagcaaagcaagatgaagatgtagaagatcgtcggcggacctatagttttgagcaaccctggccgaacgcacggccggcgacgcatagcgggcgacactcggtgtccgtggaggtgcagatgcatcggcagcggcaggaggagcgcgagagctcccagcaggcccagcgccagtacagctctctgcctcggcaaaggc

SEQ ID NO: 118802 - DNA, 1262 bp, Homo sapiens
atggaggctgttgatactttcctggttttcaatgccctgaattttctactaacatcacaaactacggggtgctcctcctcctgtgaccctgggcatgggcttggacagggctctggaaatagatttcctatagcagctgcttctgcaaggactgcagaagaagcaaaatggttctttagcaacaaagactattcgaatgtgttacaactgcccgaccccaaaaaaacagaataccacatccatgaaaaacggtttagtgattccaggatattgtgttattatcctgagtttggtaaagtagaggaaatcatcttgacagccatgaaacatgattggtttggcaaacatcgaaaagatgacaagattgagaaaacgggtaaaataaaaatacaggaatcctttacatcagaagaggagaggatacgaatgaagcaggagcaggagaggattcaagccaaaactcgagaatttagggaaccgacaagctcgagagcgtgactatgctgaaattcaagattttcatcggacatttggctgtgatgatgagttaatgtatgggggagtttcttcttatgaaggttccatggctctcaacgctagacctcagagcccacgagaagggcatatgatggatgcctttgtatgcccaagtcaagaagccgcggaattccaaaccctcacctgtagacagcaagggtaaagttctgggggaagcagatcctgtttatccaagacggaatcctggaactgaaggcaatgcttcatcattgccttcagtctcattttctgagtctcctccagtcagagctgcttttgcaggatatcattatgttgcttttccctggctgcagaaactgatgagtggcacttctggaaaagatccagagaaagaagctgacttagctagagttgtaactctgagagttgtgacactgaggatagaaacacatgttaagacactcgcgttcacagcagccttattacaacagctagcgtgcatcgacgtgggaatggataaacaaaatgacgtatatacatacaataaaatactactcagcttcaaaaggaaggaaatcctgacacacactacaacacggatgagccttgaggacattatactaagtgaaatcaatcaatggcaagaagataaataccgattcggcttatatgaggtagctcaagtagtcaaactcatagagacagaaagtaaagtggtggtttccagggacgggggaagagggaactggggagatagcggctga

SEQ ID NO: 118803 - DNA, 2213 bp, Homo sapiens
gccttctgattgacagcggaggggctcagtgaaaaaatgagcgagctagaggaagactttgccaagattctcatgctcaaggaggagaggatcaaagagctggagaagcggctgtcagagaaggaggaagaaattcaggagctgaagaggaaactccacaaatgccagtcggtgctcccagtgccctcgacccacatcggcccccggaccacccgggcgcagggcatctcggccgagccgcagacgtacaggtccttccacgacctccgacaggcattccggaagttcaccaagtccgaaaggtccaaggatcttataaaggaagctatccttgacaatgactttatgaagaacttggagctgtcgcagatccaggagattgtggattgtatgtacccggtggagtatggcaaggacagttgcatcatcaaagaaggagacgtggggtcactggtgtatgtcatggaagatggtaaggttgaagttacaaaagaaggtgtgaagttgtgtaccatgggtccaggaaaagtgtttggggaattggctattctttacaactgtacccggacagcgaccgtcaagactcttgtaaatgtaaaactctgggccattgatcgacaatgttttcaaacaataatgatgaggacaggactcatcaagcataccgagtatatggaatttttaaaaagcgttccaacattccagagccttcctgaagagatcctcagcaagcttgctgatgtccttgaagagacccactatgaaaatggagaatatattatcaggcaaggtgcaagaggggacaccttctttatcatcagcaaaggaacggtaaatgtcactcgtgaagactcaccgagtgaagacccagtctttcttagaactttaggaaaaggagactggtttggagagaaagccttgcagggggaagatgtgagaacagcaaacgtaattgctgcagaagctgtaacctgccttgtgattgacagagactcttttaaacatttgattggagggctggatgatgtttctaataaagcatatgaagatgcagaagctaaagcaaaatatgaagctgaagcggctttcttcgccaacctgaagctgtctgatttcaacatcattgatacccttggagttggaggtttcggacgagtagaactggtccagttgaaaagtgaagaatccaaaacgtttgcaatgaagattctcaagaaacgtcacattgtggacacaagacagcaggagcacatccgctcagagaagcagatcatgcagggggctcattccgatttcatagtgagactgtacagaacatttaaggacagcaaatatttgtatatgttgatggaagcttgtctaggtggagagctctggaccattctcagggatagaggttcgtttgaagattctacaaccagattttacacagcatgtgtggtagaagcttttgcctatctgcattccaaaggaatcatttacagggacctcaagccagaaaatctcatcctagatcaccgaggttatgccaaactggttgattttggctttgcaaagaaaataggatttggaaagaaaacatggactttttgtgggactccagagtatgtagccccagagatcatcctgaacaaaggccatgacatttcagccgactactggtcactgggaatcctaatgtatgaactcctgactggcagcccacctttctcaggcccagatcctatgaaaacctataacatcatattgagggggattgacatgatagaatttccaaagaagattgccaaaaatgctgctaatttaattaaaaaactatgcagggacaatccatcagaaagattagggaatttgaaaaatggagtaaaagacattcaaaagcacaaatggtttgagggctttaactgggaaggcttaagaaaaggtaccttgacacctcctataataccaagtgttgcatcacccacagacacaagtaattttgacagtttccctgaggacaacgatgaaccaccacctgatgacaactcaggatgggatatagacttctaatgtatttctcttacctgcttctgccttgctgaagacagctttttctgagacacagctgccagcaaacctgagggaaagagagaagattagtgctcggggtcaccatgatgcctttgatcgatgctgctccagtaactacagtggcattaggacttatcgct

SEQ ID NO: 118804 - DNA, 3740 bp, Homo sapiens
aggaagcctcaagacgcggagcagcggcaggaaggagcccccggcagcccggaggagcatgggcaccttgcgggatttacagtacgcgctccaggagaagatcgaggagctgaggcagcgggatgctctcatcgacgagctggagctggagttggatcagaaggacgaactgatccagaagctgcagaacgagctggacaagtaccgctcggtgatccgaccagccacccagcaggcgcagaagcagagcgcgagcaccttgcagggcgagccgcgcaccaagcggcaggcgatctccgccgagcccaccgccttcgacatccaggatctcagccatgtgaccctgcccttctaccccaagagcccacagtccaaggatcttataaaggaagctatccttgacaatgactttatgaagaacttggagctgtcgcagatccaggagattgtggattgtatgtacccggtggagtatggcaaggacagttgcatcatcaaagaaggagacgtggggtcactggtgtatgtcatggaagatggtaaggttgaagttacaaaagaaggtgtgaagttgtgtaccatgggtccaggaaaagtgtttggggaattggctattctttacaactgtacccggacagcgaccgtcaagactcttgtaaatgtaaaactctgggccattgatcgacaatgttttcaaacaataatgatgaggacaggactcatcaagcataccgagtatatggaatttttaaaaagcgttccaacattccagagccttcctgaagagatcctcagcaagcttgctgatgtccttgaagagacccactatgaaaatggagaatatattatcaggcaaggtgcaagaggggacaccttctttatcatcagcaaaggaacggtaaatgtcactcgtgaagactcaccgagtgaagacccagtctttcttagaactttaggaaaaggagactggtttggagagaaagccttgcagggggaagatgtgagaacagcaaacgtaattgctgcagaagctgtaacctgccttgtgattgacagagactcttttaaacatttgattggagggctggatgatgtttctaataaagcatatgaagatgcagaagctaaagcaaaatatgaagctgaagcggctttcttcgccaacctgaagctgtctgatttcaacatcattgatacccttggagttggaggtttcggacgagtagaactggtccagttgaaaagtgaagaatccaaaacgtttgcaatgaagattctcaagaaacgtcacattgtggacacaagacagcaggagcacatccgctcagagaagcagatcatgcagggggctcattccgatttcatagtgagactgtacagaacatttaaggacagcaaatatttgtatatgttgatggaagcttgtctaggtggagagctctggaccattctcagggatagaggttcgtttgaagattctacaaccagattttacacagcatgtgtggtagaagcttttgcctatctgcattccaaaggaatcatttacagggacctcaagccagaaaatctcatcctagatcaccgaggttatgccaaactggttgattttggctttgcaaagaaaataggatttggaaagaaaacatggactttttgtgggactccagagtatgtagccccagagatcatcctgaacaaaggccatgacatttcagccgactactggtcactgggaatcctaatgtatgaactcctgactggcagcccacctttctcaggcccagatcctatgaaaacctataacatcatattgagggggattgacatgatagaatttccaaagaagattgccaaaaatgctgctaatttaattaaaaaactatgcagggacaatccatcagaaagattagggaatttgaaaaatggagtaaaagacattcaaaagcacaaatggtttgagggctttaactgggaaggcttaagaaaaggtaccttgacacctcctataataccaagtgttgcatcacccacagacacaagtaattttgacagtttccctgaggacaacgatgaaccaccacctgatgacaactcaggatgggatatagacttctaatgtatttctcttacctgcttctgccttgctgaagacagctttttctgagacacagctgccagcaaacctgagggaaagagagaagattagtgctcggggtcaccatgatgcctttgatcgatgctgctccagtaactacagtggcattaggacttatcgcttagatgacaatagtgctctttacatgttttctgtttgaacctaaaatagcagttgacatggtggtcctgaagcaaagcctttcaccagtaaagagatgttttctattgttgcaatgaccttgctttgctctgattataatttgaaagactgtaggaaacacttcaatgtagtataagagtctgtaccttgctggaatattcaagaagatgaaagaataatatattgggtacaatagattactatggtacagaaactgggctattccctttcttcaagtgaaggctgtgggatctattacagctgcaggccggtgtatataccatacaaaagaggaccacacatctgttggtcacagagttcatgtcacaccagtgctagaagtttcatgattttatttcccagcagtgctgatgacaagactgaatgttaccttttctttctgacagattttaaaaattgatatgataaaagcacaactgctatagattctgctgagacctctcatagtaggtatatatgagttttcacagaagactgaaaaataatgcatgatatttgtttgttttttttgataaattggcatgacagagtggggaaaaaaagcaattcacaaaaccatttcatattttttaaaatattgtgcttaaagatggtcctggaagtaaatgactagcagccaattggttttacttaacataccctcaaactgaggcttaaagtattcccttttataaaaataaatgcttggggtagggtggagtggggagggattaaaacccatccaaaaaataaataaaaactatataggtgctatgtatatctttcatctgtaaatgtcagtgtctgaacagcaacacaaattcaaatcattatacgtgtagccagaaactcaagcattttcactaaagttattaaaccaaactcctgtccaatttgacttatacaacatagtcagtctagagttgagagacaaaggtaattataaacctatttgaactagcttcttgtcttaggcctgaaccaaaaaacaacaaacaaacaaaaaacaagaatgaaaaacagaaataaaagaagtagaaaagacaaagaaagaaagcccaaagtcaaagttgttaatatttacaggtttaccagatctggaacattacttatttgaggtcagagaacaaaacaagaacctggccaggtgttgattaccttttagtgaataagctgagtccatatacttgtctaactaagaaagcagtacagaggaaaacaggaacctgatttttttaaaataaattttaaataaaatagaattactacaattctgcaatttcatactacctaaaaaagactagatttgaaaatgtcaagctgatttactttattcacatggagaaaagaatccacaaattaaactgagtccttcactggcatgccagttgactattattagctgtcataagtaaccccg

SEQ ID NO: 118805 - DNA, 861 bp, Homo sapiens
atgtggaactcaaagacactggcagcatttcgcccctgccctaaagatccgttgaactttgaacttgagagagataatttagcgtatctggcagaagagattcctaagcagcaaagcattcagtatataacctggatgattctgaaagcttttagtcatatgcatttacaaagagataatttgaaattggaacttatgtttaaaaggaaagcaaagcataaaggtttgaaaaatttgcatcctgaccatgtaatagaaaagaaaaacctattttctgcggagaaattcaagccagctgcagaaatttacataagtaatgaggagccaaatgttaatagccaagacaatggaaaaaaatgtctccagggcatgtcagagatctttgcagcagcccctgccatcacagataacacctcagataaaactacattgatcaaggtctcctcgtggccctatattgctgacagaagatgccctcttgtaaatgtcactcgtgaagactcaccgagtgaagacccagtctttcttagaactttaggaaaaggagactggtttggagagaaagccttgcaggggtggggccttaatggggatccaccacgtttctgcccaggaacctgtctgcctcctgctgccattcatgacacccaggctgtaggtgccaggggcacctgcaggccagcaccaagctgccgtcagcccaccactggattccctcctatgctcattggcacccaaagcccagaggggggtgagttgtcaggggactggcatgccagcactgccctgagcatgtgcacacctggccggactgtgacagtgcctgggctcagtcccaactttcctccaaaatcagaatag

SEQ ID NO: 118806 - DNA, 471 bp, Homo sapiens
atgcagaagattgaagctggaccccggtccttacaccatatatcaaaaatcaactcaagaagtattaaagagttacatgtaaaactcaaaactataaataccctggaagacaatctaggcaataccatcctggacctaggaatgggcaaagatttcatgacaaagacaccaaaagcaattccaacaaaagcaaaaattgacaaatgggatctaattaaacttaagagcttctgcacagcaaaagaaactaccaacagagtaaatagacaacctaaagaatgggagaaaacatttgcaaactgtgcatctgacgaaggtctaatatccagcatctataaggaacttaaacaaatttacaagagaaaaacaaacaaccccattaaaacatgggcaaaggacatgaacagacacttttcaaaagaagacataaatgcaaccaaaaagcatataaaaaaagctcaatatcactga

SEQ ID NO: 118807 - DNA, 407 bp, Homo sapiens
  misc_feature (1)...(407): n = a,t,c or g
tcgcccacgcgtnnatcagcgctgccggcttgcagcgggctgtgagaggggccggcgccgctttgtcctatgaaacgggctgcgcgtttctctttttcactcttttccatttccaggaaggacttgtaaggacttctgaaacgctgttttcatactcgatcggggatacagtacatacaccgtctaccatctgaggctgggcctctgcctttgtgaagttgaagagccaggagctactcaacaacaattgatttttgaaacttaactcttttggggcaaaagcaaagagctggttttctttgctagcccaataaatgctatttatgaagatggacctgttgaactatcagtacttggacaagatgaacaacaatatcggcattctgtgctacgaaggcgaagctgct

SEQ ID NO: 118808 - DNA, 3827 bp, Homo sapiens
gtcatgccaagcatagccctcatgtcagcgctgccggcttgcagcgggctgtgagaggggccggcgccgctttgtcctaggaaacgggctgcgcgtttctctttttcactcttttccatttccaggaaggacttgtaaggacttctgaaacgctgttttcatactcgatcggggatacagtacatacaccgtctaccagtaagcccttgaagggtttcgtgtgagctcgatttttttgtgcctgatttttttttttttaaacttttgcatactttgttttgatagtctgaggctgggcctctgcctttgtgaagttgaagagccaggagctactcagcaacaattgatttttgaaacttaactcttttggggcaaaagcaaagagctggttttctttgctagcccaataaatgctatttatgaagatggacctgttgaactatcagtacttggacaagatgaacaacaatatcggcattctgtgctacgaaggcgaagctgctctcaggggagaacccagaatacagaccctgccggtggcctctgccctcagcagtcaccgcaccggccctcccccaatcagccccagcaagaggaagttcagcatggagccaggtgacgaggacctagactgtgacaacgaccacgtctccaaaatgagtcgcatcttcaacccccatctgaacaagactgccaatggagactgccgcagagacccccgggagcggagccgcagccccatcgagcgcgctgtggcccccaccgtgagcctgcacggcagccacctgtacacctccctccccagccttggcctggagcagcccctcgcactgaccaagaacagcctggacgccagcaggccagccggcctctcgcccacactgaccccgggggagcggcagcagaaccggccctccgtgatcacctgtgcctcggctggcgcccgcaactgcaacctctcgcactgccccatcgcgcacagcggctgtgccgcgcccgggcctgccagctaccggaggccaccgagcgccacctgtgtctgactgcctgccttcctgcttgcctgcagctgccaccacctgtgaccccgtggtggaggagcatttccgcaggagcctgggcaagaattacaaggagcccgagccggcacccaactccgtgtccatcacgggctccgtggacgaccactttgccaaagctctgggtgacacgtggctccagatcaaagcggccaaggacggagcatccagcagccctgagtccgcctctcgcaggggccagcccgccagcccctctgcccacatggtcagccacagtcactccccctctgtggtctcctgaagggagcgcctcctccaacaacacgtggatctgcatggtttgcctgagctttgaacagtcagtacttaaaaaaaaaaaaatcatgggggtggggtggggggaagggaagggatggtttatttgcaaaaaccatgttgttgggatttgtgttctgtttttgtacttgcttggtatccgtacaagggggccctcaaacatgatagcaggaactacgcgtggaacatctgtctaatgtagcatccttacttcctgcctcagttaccaaagaaacctctgatgcaggtctgctgccccgacggggccaggactccacagcgctttctcagtcacaagccatgatgaattggtgactcagacgctttgtgctttttcctttgcttcttgagaccggggtgtgtgtggctcagcttccacggcgtgtttggttcggtccatgtgtgtgcgtgtgtatacttgaagagaactgtcgtgtctgatttgcactattggaggaggactaaagttgcgtgacaactttatgtgttatgccagaactctgagggcaaactgctgaaaaacaaagggtttaaggatgacatttctgaccatttgtgtgtttgttgttgttactgtttttgttttttttaatgtagacaatacagctttggaaggggaagtctcatacaggttataggtctttctctctctagatttcaggtgcttgcaactggactgcagactctaccaatcacgggcattttatcttctctgaacactgcagtttgttagactagagctgaggttggaggattccatagtgctttaaacgtgatgcatgttttaatggagaaaaaatagctggtttctattaattatatagacagtaaacaaaaaccttaatacttactatcttcttttcagaattagtttatttttgtcagttacagtcctagatatacttactgctggtacagttgtactctaagattggtatttgatattcactttactcacaagtagtgcgggaggccagctcctggcaggccctcgcgatgagcagtgggtcagctgcggtgtgggatgctggagtttggctgcaggctgacatcatttatttttgcatccctgtctgctttgttacaagctcccaggggaggtggggtttgtgtcttccaacttccctacatgcagaaactgctccctttgaactctcttggctgaacagcagattactgacagacaatctgtgatatggtgttttatacgcttcctcgtacgctggggccaaggcagtatacattcctctgactttatactgttattactgcatttattatttgctatattaatagctactaactagaaattagatgaagcaagcatgacagacacagctgtggaggtcacagctgctcctttttggtcaatgagcgtttctatcccctccccctggggtgtgctgtgtcccacctggcccaccagaggctcacgacgatggcacctgaccaggtgacgtgggcgtggtcacctcacctgcaaggctttgtggactctgcacaccgtatgacccccggttttacagtttttagctgttgaattttggaaattggcactgggtgaaaaggtcggaggactggctcttgtagtcacagagtggctgcaggcctttgaaaagtggaggaaagaaaagcccttctccttgccccgcacacatttcactcccactgtactgggcttccaagctttggcattcaggcccctatattttctgtaggaaaaatcgttgagaacacttttctatatgggtgattttgagaccatcgttacgctgtgcgtaaagaatgtacagagaaatttgtaggtattttttgaagaacattaatttgttaatgatatgtagctatttaatttttccctttcctattgtaatcattcattttttttgttgttcggaaaaaaaaagttgatctttttttttgtcgtagatttgtctgtaaaagtgcaggaacagttattctatgagaacactgcatctgcattcatagccacgagtttgttattgctacaggctactgagcgtcgtaacaggaaaaccacccacagctgaccggctcggtggaggacactcctgggacaggtctctttgtcagtgaacaagggcgtcactctgggaggggtcggcggtgctggcggccgggtccctggtgcactgacctatctgggataggcagtaccctggaggggggcctggggcagaggaggcagcagaaaaccaaacatttcactgagaaagccccctccctgctctaagaaggggctccgtgaagttcttcccagagccgcgctgcctgcagtgcgctctgaccttctcttcatgtgtgtaaatctgtaatataccattctctgtggcctgtttttcctggaagaagaaaaaaaaaggtttggcaggccatctttttttgtacttaaaagtagccttaagaacaataataaagtgctcttaaacc

SEQ ID NO: 118809 - DNA, 423 bp, Homo sapiens
attttctgcatagcatcagcaatgagtctgtacaactgtcttgctgcactaattcataagataccatatggacaatgcacgattgcatgtcgtggcaaaaacatggaagtgagacttatttttctctctggactgtgcatagcagtagctgttgtttgggctgtgtttcgaaatgaagacaggtgggcttggattttacaggatatcttggggattgctttctgtctgaatttaattaaaacactgaagttgcccaacttcaagaatggtgagagtatcatggttgaactcgcagctggaccttttggaaataatgaaaagttgccagtagtcatcagagtaccaaaactgatctatttctcagtaatgagtgtgtgcctcatgcctgtttcaatattgggttttggagacattattgtacca

SEQ ID NO: 118810 - DNA, 418 bp, Homo sapiens
  misc_feature (1)...(418): n = a,t,c or g
tggtgaacagattgtccagcaataatattatgtggaactgctataatgtgtcattgattttctacaaatagacttcgactttttaaattgacttttgaattgacaatctgaaagagtcttcaatgatatgcttgcaaaaatatatttttatgagctggtactgacagttacatcataaataactaaaacgctttgcttttaatgttnnnnnnnnnnnnnngggggggccgttttaaaggatccagttttacgtccccgggctggcaacgtaaaagtttttttatggggcccccaaaattaaattcctgggccggggtttaacaacggggggaggggaaaaacctgggggttccccaattaaatcccttgtggaaannnnnnnnnggnnnnnnnntntttttttttggggccccttnnc

SEQ ID NO: 118811 - DNA, 413 bp, Homo sapiens
ctaatgtttttttttttttttttttgagacagagtctcactttgtcacccaggctggagtgcagtggcgcgatctcggctcactgcaatctccacctcccgggttcacgccattctcctgcctcagcctcccaaggagccgggaccacaggcgcccgccaccacgcccggccaatcttttgcatttttagtagagatggggtttcaccatgttagccaggatggtctcgatctcctgacctcgtgatccgcccgcctcggcctcccaaagtgctgggaccacaggcgtgagccaccgcgcctggactttttgttttttgagacagagtcttgctctgtcgccagactggagtgcagtggcccgatctcagctcactgcaacctctgcctcctgggttcaagtgagtcgtcgac

SEQ ID NO: 118812 - DNA, 756 bp, Homo sapiens
  misc_feature (1)...(756): n = a,t,c or g
atttttctctctggactgtgcatagcagtagctgttgtttggnctgtgttccgaaatgaagacaggtgngcttggattttacaggatatcttggggattgctttctgtctgaatttaattanancactaagnntgcccactcaaaagtcatgtgtgatactctaggccttctcctcctctatgatgtattttttgttttcataacaccattcatcacaaagaatggtgagagtatcatggttgaactcgcagctggaccttttggaaataatgaaaagttgccagtagtcatcagagtaccaaaactgatctatttctcagtaatgagtgtgtgcctcatgcctgtttcaatattgggttttggagacattattgtaccaggcctgttgattgcatactgtagaagatttgatgttcagactggttcttcttacatatactatgtttcgtctacagttgatgatggaccatttggattgtgcaacaaatgaagaaaaccctgtgatatctggtgaacagattgtccagcaataatattatgtggaactgctataatgtgtcattgattttctacaaatagacttcgactttttaaattgacttttgaattgacaatctgaaagagtcttcaatgatatgcttgcaaaaatatatttttatgagctggtactgacagttacatcataaataactaaaacgctttgcttttaatgttaaagttgtgccttcacattaaataaaacatttagtctgtgt

SEQ ID NO: 118813 - DNA, 548 bp, Homo sapiens
gggattgctttctgtctgaatttaattaaaacactgaagttgcccaacttcaagtcatgtgtgatacttctaggccttctcctcctctatgatgtatttttgttttcataacaccattcatcacaaagaatggtgagagtatcatggttgaactcgcagctggaccttttggaaataatgaaaagaatgatggaaacttggtggaagccactggtcaaccctcagctccccatgagaaattgccagtagtcatcagagtaccaaaactgatctatttctcagtaatgagtgtgtgcctcatgcctgtttcaatattgggttttggagacattattgtaccaggcctgttgattgcatactgtagaagatttgatgttcagactggttcttcttacatatactatgtttcgtctacagttgcctatgctattggcatgatacttacatttgttgttctggtgctgatgaaaaaggggcaacctgctctcctctatttagtaccttgcacacttattactgcctcagttgttgcctggagacgtaaggaa

SEQ ID NO: 118814 - DNA, 3591 bp, Homo sapiens
tcaacaagatggtgaattgactagtgggtagatccacaggacgggtgtggtcgccatgatcgcgtagtcgatagtggctccaagtagcgaagcgagcaggactgggcggcggccaaagcggtcggacagtgctccgagaacgggtgcgcatagaaattgcatcaacgcatatagcgctagcagcacgccatagtgactggcgatgctgtcggaatggacgatatcccgcaagaggcccggcagtaccggcataaccaagcctatgcctacagcatccagggtgacggtgccgaggatgacgatgagcgcattgttagatttcatacacggtgcagcagcagaggggaagagcaatccgactaggaagttggaggtccagttggagcagccggccactgccatcgcagctgggcgggggccctggctgaagagttcggccacaataaaccagggaatggggcctggtccaatttcaaaacaggccacaaagaccaagatagccccaatacagacaaagctcatcccattatagtgattagaaagtaaagtgaagatagtattaaccacacccgcgctgatggtggcatagatgggctgttgaacacctgcatccttgaagattcctgttgagtaatagaacaccttgttagccaagatggtctcgatttcctgacctcgtgatctgcccgcctcggcctcccaaagtgctgggattacaggcgtgagccaccacgcccggccccaaacgggtagatttcttttgtttttgttttttttttttgagacagagtctcgctctgtggccgtggcccaggctggagtgcagtggcacaatctcggctcactgcaagctctgccctccccgggttcgcaccattctcctgcctcagcctcccaattagcttgggaccgcaggcgcccgccaccacgcccagctaactttttttttttttgtatttttttagtagagacggagatgatgtttcaccgtgttagtcaagatggtctcgatctcctgacctcgtggatccgcccgcctcggcctcccaaagtgctgggattacaggtgtgagccaccgtgcccggcagggaccacacaatttattaaccaaccaggttaataaattcttttttttttttttggagacggagtctcactcttgtcacccaggctggagtgcagtgacacgatctcggctcactgcaatctccgcctcctgggctcaagcgattctcctgcctcagcctcctgagtagctaggattacaggctcctgccaccacaccccacacattttttgtatttttagtagagaacgggaattcgccatgttggccaggctggtcttgaactcctgatctcaggtgatccgcccgcctcggcctccctaagtgttgggactacaggcgtgagccaccatgcctggccccaaccagaacacttctgagcgtggaagaggatgctgttaattactcaagaccaaaaggcataaaaggagacatatgtccacccaagtgataaggcagtttgggaaactacatttcccagtatgccctgccccttgaaagttaaaaatcttaactggcacagagcaccctgggacacctgtggttagcaccatttaagaagtaaaaggtatagggttgggttctgacgtgaaggctttccccttccatgggacacttaaccagacacaggacacaacacctgaggtgaaatttcaatgggtattaagtctggggtagagcttctctctccccaaatctagcttccaaagatgtggagctggtggagctgtccattggtccactgccctgtttctcctgggtgctgcctctgcctcctcatatcaccagcgtccccactgccactagtctgtagggggattccgggctaggtgctcttcccactcgacttcaaccaacttatatagctccatggtggcctgggcatcttccacagaggaatgtccgctcttcccaacctggatatcccggtttagcagcttcttggtgagatgcttcagagacatggtggcattctccgggcagtcagccttccggttgaggggggggatatgggaggtgtcacgggtgagggacttggggtgaaagtactgaagggctttgaagtcgttgtggatggcatgccccaccactatcttccctgtgagtatcttcaagatctctccatccttgaaatgctcactcccacaagttttctttcttctggaatccaccttcctcttccacaggtgatttccatggtataccctgtttggactcatactgccagtggctccttaccttcttattgatctccaccccatgacattaatttgccttcagtcctaaatgacactcatgtttgagatgtccatgtatttagttcagttctggcttgctacatgaagtcctttaactattaccattatgttggccttagacacatggctgggacccgggctccagggaggctaacaaaagcccaaaattacatgcaattagatgtgtatgggtactagaggaagagaatctgtggctttcatcaaattctcagagtctacaaaccgtaaaaaattaagaatcacatataaactaaagttgcagaagcaaccttattcacactagttttggaaccaagtaaaataaaaataacttctcaatatttcaggaaactgttttttttttttgagatggagtcttgctctgttgcccaggctggagtgtactggcgcgatcttggctcactacaacctccgcctcccgggttcaagcgtttctcctgcctcagcctcccaagtagctgggactactggcacctgccaccatgcctggctaagttttgtatttttagtagagacggagtttcaccatatgggccaggctggtcttgaactcctgatcttgtgatctgcccgcttcaggctcccaaagtgctgggattacaggtgtgagccaccacacctggccttcaggtaacttattttttaaaagagatgaggtcttgctatttttcccaggttggctggcctcaaactcctgggctcaagcaatgctctcacctcaaactcctgagtagctgggattacagacacatgtcaccacacctagccatttcaggctcttgaagtaggaggacatgctaccaatgaggacaaccgaagaacacaccacaggctctgaaggccattcccaaatgaggttccaaacaggttttcaacaaaagtgacagtcctgcatagcctcccaaagggaccccctctgaaggggctaggctcatctggacataccttagtctcataaccccagcttggcactggggaagtgctttatgatgaaaaccagacgtagtcccgtgaactagatatttcgttactcctgacttcacctacttactgtccaccaccaccttcacttcttattaacctcgacatatagccctcatcaaagctgggcagatttgctgtctcagacccgtcccatcttctgcctctcctatgcctttgcttggctgcgcccctttgtgcacaagatgtttaactcttctttccgtcttttctaaaatagtcagtcacctcacctctaacgc

SEQ ID NO: 118815 - DNA, 445 bp, Homo sapiens
  misc_feature (1)...(445): n = a,t,c or g
cgacttcctcaccagaggcgatgttggcacccaggtagatatctccgaaggacccgctcccgatcttccgtcccaggcggtacttgttccccacacgtagctccatggctcactcttgctggagtaagggatgccctccgagggatgaggagcctccgaaaggcctgtttccttctcctcgcagcccactctacttctctccggcccgctccaacacccttttacaaatactcgaagaagaacatccatgagaaaaaataaggcaatggctagagaaatagaacgatactccaaaggaatataaagtttgctgtcagtgaaaattaggtcggcaagcccgagagtgacatccagtaagacgaggaaaaaaacaaatagtcttttactgataggtgaccccagggctgctccgctcgtgtcncgttatccgtattggggtgaccgc

SEQ ID NO: 118816 - DNA, 786 bp, Homo sapiens
atggggccttcacaggctgcagtgggtcccgagcccccagggctgtgcccgctggtcctgaccaagatcgcggctgccgaggggcatttggacgctgtggggaagtcgcggtctggggatattgggtccagccttcgggtagaagcaggtgataaacgcactcaggccagcccggagcgtcagccacactgcggtgcccacgatgcccaggacccacccaagacttatacccaggatgatgtgtgtttgattgaatcagggatgactcagttacagagcctcacagttacagttccaagaagaaaactgtcaaaaccaaaactgaaattgaagattataaatcagaatagcgtggccgtccttcagacccctccagacatccaatcagaacattcaagggatggtgatatggatgatagtcgagaaggagaacttatggattgtgatggaaaatcagaatctagtcctgagcgggaagctgtgaatgatgaaactaagggagtggaaggaacagatggtgtcaaaaagagaaaaaggaaaccatacagaccagccgctcctctagggcgccccctccccagctggctcctgcgcttccgcccacgggaaggtgcgggcgatcccgggctgcatccgctcttggccgtcacactcacgctgcacgatttagaagggcttggggggcagctggttgccctaatgttggatgctctgttcaaggatgagttatggattcactaccagattctactgtatgctcttgacaactatgaccacaatgggtga

SEQ ID NO: 118817 - DNA, 426 bp, Homo sapiens
ctgcagaataagatcttttctctatagtttcgatagcagactggacaggaagataagcttgcacaaggagcgcactgtgtgtaattgttctgccattcacatcttagacctgcagatgttgctccacagtgtctgcaccaaacacaccatttgcacttccagcctcctttgggaactgtctgcaaatggagggtctaggcagtaggtgtgataacttatgtcacagtcatcacacagcaggagtcttcctgggtcagttgccttcccacaggcctcacacacagtgcactcaagacacctccaacctttgctaagaaccactttagtgatcttaatactgacacagtatggatggtaacactgaccacactgagaacaggcaagtaatcttccttctgctccttggccaaaactgccacaaactac

SEQ ID NO: 118818 - DNA, 619 bp, Homo sapiens
cgaattcccggggcgacgatttcgtagcagctgctccctgaacactttctgatccatcagtcccccagcgccggacgcgccgcgccctggcggctctagggaccccccccgcgcctgcacttagccccgcgcccgagtccacagacaaacgaatttaaaggagcaaccgaggaggcacctgcgaaagaaagcccacacacaggtgaatttaaaggagcagccctggtgtcacctatcagtaaaagactatttggagttttcctcgtcttactggatgtcactctcgtccttgccgacctaattttcactgacagcaaactttatattcctttggagtatcgttctatttctctagctattgccttattttttctcatgggtgttcttcttcgagtatttgtagaagggtcaacgccaccgcctctgcactgccttcctggccatcatcccaggtagagctgccctcttccttctccgcagcttttctcatcctgcaaagcaagggtgttggagcgggccggagagaagtagagtgggctgcgaggagaaggaaacaggcctttcggagactcctcatccctcggaggtcatcccttactccaggtgatctgaacctgaa

SEQ ID NO: 118819 - DNA, 1161 bp, Homo sapiens
ggcacgagcaaaaattggcatgggtaaaccagctattactaagagaaaattttctcctggtagacctcggtccaaacagggggcttggagtacccataatacagtgagcccaccttcctggtccccagacatttcagaaggtcgggaaatttttaaacccaggcagcttcctggcagtgccatttggagcatcaaagtgggccgtgggtctggatttccaggaaagcggagacctcgaggtgcaggactgtcggggcgaggtggccgaggcaggtcaaagctgaaaagtggaatcggagctgttgtattacctggggtgtctactgcagatatttcatcaaataaggatgatgaagaaaactctatgcacaatacagttgtgttgttttctagcagtgacaagttcactttgaatcagtttgtggcagttttggccaaggagcagaaggaagattacttgcctgttctcagtgtggtcagtgttaccatccatactgtgtcagtattaagatggatgcatgcagtttgtcagaacttaaatactgaggaagaagtggaaaatgtagcagacattggttttgattgtagcatgtgcagaccctatatgcctgcgtctaatgtgccttcctcagactgctgtgaatcttcacttgtagcacaaattgtccacaaaagtaaaagagctagacccacccaagacttatacccaggatggtgtgtgtttgacctgaatcagggatgactcagttacagagcctcacagttacagttccaagaagaaaacggtcaaaaccaaaattgaaattgaagattataaatcagaatagcgtggccgtccttcagacccctccagacatccaatcagagcattcaagggatggtgaaatggatgatagtcgagaaggagaacttatggattgtgatggaaaatcagaatctagtcctgagcgggaagctgtggatgatgaaactaagggagtggaaggaacagatggtgtcaaaaagagaaaaaggaaaccatacagaccaggctggagtgagcagttaccagatactttagttgatgaatctgtttctgttactgaaagcactgaaaaaataaagaagagataccgaaaaaggaaaaataagcttgaagaaactttccctgcctatttacaa

SEQ ID NO: 118820 - DNA, 3493 bp, Homo sapiens
atgttaagcactattaaagtcttccaaatctaccagttacggagttattggtcttggactaacactcctgaaaagaaaaaaaccaaacaaaataagacaatacctaaaaacctggataaaatggcctaccgtgggcactggcaatgcatccaagcaggccttcggtttcctcacctacaagatgagagggctggaccagatggaaattcagggggtaaggggatgtcctcacgcagcccacccccacccccacgggaccctggagcctccatcccagttcccaccacgcacccgctccacaaatcctgcccaaggacgccagtagagctggcagccgagtctgccgctcccgccctcagagccgtggcggcggggacaaaaatcctcggcggcgggggcaaaacgccgcggcggcgaaaaagtcgctgcggcagggggacaaaaagccgtgacagcggggcgcaaaaagccgcggcgggtaaaaggccgtggcgagtaaaaagccgcgatggcaaaaagccgcggcgggcaaaaagccacggcggcggtggggcaaaaagcagcggcggtggcggaggggcaaaaagccgcggcagcgagggggcagaaagccgcggcggcaaaaagccaaggtggcgagtgtgcaaaaagctgtgtcggcggtggggcaaaaagccgcggcggcagaggggcaaaaagccgcggcggcgggggggaaaaatccacggcgggaaaaagccgcggcggcgagggggcaaaaagctgcggggatgccaaaagcggcggggtgcaaaaggcggcggggggcaaaaggcggcggggggcaaaaagccgcagcggcggggggcgggcaaaaagccgcggcgacaaaattcgcaacggcgaggggtcaaaaagccggggcggactaaaagccctggcgccgggggggcacaaagccgcggcggcggtggggcaaaaagccgcagcggcgggtgggggcagaaagccgcagcggcgatggggcaaaaagccacggcggcggggagccatggggccttcacaggctgcagtgggtcccgagcccccagggctgtgcctgctggtcctgaccaagatcgcggctgccgaggtcagtccagcgccaagggcacagggccagggcaggcggggcagggctacccgaagcgcatagaggctgctggtgtcaacgagtggaagccgctgatgaagtcaaagctgcctcctccttcaggaagactttgctcccatagctggcgaacaggaagcggagcagcaccaggaggatctgcgggcgctgctgagggcttctttgcagggacagtgcagcaggcagccagggacaagactgcacggcagcgccccatggccaggggaagctcagaaccggagtcgcccgctgcccggcgattctccatccctggatcggtacaggggcatttggacgctgtggggaagtcgcggtctggggatattgggtccagccttcgggtagaagcaggtgataaacgcactcaggccagcccggagcgtcagccacactgcggtgcccacgatgcccaggacatttcaggaggtcgggaaatttttaaacccaggcagcttcctggcagtgccatttggagcatcaaagtgggccatgggtctggatttccaggaaagcggagacctcgaggtgcaggactgtcggggcgaggtggccgaggcaggtcaaagctgaaaagtggaatcggagctgttgtattgcctggggtgtctactgcagatatttcatcaaataaggatgatgaagaaaactctgtgctcgatatggttgtgttgttttctagcagtgacaaattcactttgaatcagtttgtggcagttttggccaaggagcagaaggaagattacttgcctgttctcagtgtggtcagtgttaccatccatactgtgtcagtattaagatggatgcatgcagttcgtcagaacttaaatactgaggaagaagtggaaaatgtagcagacattggttttgattgtaacatgtgcagaccctatatgcctgcgtctaatgacccacccaagacttatacccaggatggtgtgtgtttgactgaatcagggatgactcagttacagagcctcacagttacagttccaagaagaaaactgtcaaaaccaaaactgagattgaagattataaatcagaatagcgtggccgtccttcagacccctccagacatccaatcagaacattcaagggatggtgatatggatgatagtcgagaaggagaacttatggattgtgatggaaaatcagaatctagtcctgagcgggaagctgtgaatgatgaaactaagggagtggaaggaacagatggtgtcaaaaagagaaaaaggaaaccatacagaccagccgctcctctagggcgccccctccccagctggctcctgcgcttccgcccacgggaaggtgcgggcgatcccgggctgcatccgctcttggccgtcacactcacgctgcacgatttagaagggcttggggtgcggggttccctgagtctccgccgggagcgggggtccgggggtctgcggggggaccttacagagtccccttaccctcacggtactgggggacaacccgtgggtgggcagctggttgccctaatgttggatgctctgttcaaggatgagttatggattcactaccagattctactgtatgctcttgacaactatgaccacaatggtcctgatccgactgacctggcgggagtcatcattgagctcggccccaatgacagtccacagacaagtgaatttaaaggagcaaccgaggaggcacctgcgaaagaaagtgctgctgactgtattcttttatcatcctctagcccacacacaagtgaatttaaaggagcagcccgggtgtcacctatcagtgaaagactatttggagttttcctggtcttactggatgtcactctcatccttgccgacctaattttcactgacagcaaactttatattcctttggagtatcgttctatttctctagctattgccttattttttctcatggatgttcttcttcgagtatttgtagaaagacaccaaagaacatctgctagcatcaacactatccaggaaaacatgacctcaccaaatgaactaaataagacaccaggggccaatcctgtagaaacagagatatgtgacctttcagacaaagaaatcaaaataactgtgttgaggaaggaaactcaaagaaattcaagataacacagagaagaaatttagaattctatcagcctgctttctggattcagctctatccggagaaatcagtcgggggacactcctcagctggcagcaggctgaagcacacaccacagagggacctggggacgcccgttggtcagggctttcctggccagctgtgaccagggtcaagccctgctgcaccgagtctcatactgagactgagcgtggagatgtgggaatccccgtgtga

SEQ ID NO: 118821 - DNA, 603 bp, Homo sapiens
atggccaacttcaatgattgtgtgttggataaggagaaggtatgcatagctgctaaattcatcactcatgcacccgcaggagaatttaatgaagtattcagtgatattcggctactatgtaataatgacagtctcctcagggaaagggcagcacgtgcatttgcccattataacatggatcagttcacacccgtgaagatggaaggatgtgaagatcagactattattgcatgtattgaaagccatgagtgtcagcctaaaaacttctggaatggtcgttggagatcagagtggaagtttaccatcacaccacctacagcccaggtggttggagtgcttaagattcaggttcactattacgaagatggcagtgttcagttggttagtcataaagatgtacaggattcgctaactgtttcgaatgacgcacaaactgccaaggagtttattaaaatcatagagaatgcagaaaatgaatatcagacagcaattagtgaaaactgtcaaacaatgtcagataccacattcaaggtcttgcgccggcagcttccggttacccgcaccaaaattgactggaacaagattactcagctacaacattag

SEQ ID NO: 118822 - DNA, 2379 bp, Homo sapiens
atggccgacttcgatgatcgtgtgtcggatgaggagaaggtacgcatagctgctaaattcatcactcatgcacccccaggggaatttaatgaagtattcaatgacgttcggctactacttaataatgacaatctcctcagggaaggggcagcacatgcatttgcccagtataacatggatcagttccacgctgtgaaagatagaaggatatgaagatcaggtcttaattacagagcatgggggacctgggtaatagcagagttttagatccaagaaacaaaatttccttttaaatttgaccacttacggaaagaagcaagtgacccccagccagaagaagcagatggaggtctgaagtcttggagagaatcctgtgacagtgctttaagagcctatgtgaaagaccattattccaacggcttctgtactgtttatgctaaaactatcgatgggcaacagactattattgcatgtattgaaagccaccaggtttcagcctaaaaacttctggaatggtcgtttggagatcagagtggaaggtcccccatcacaccaccttcagcccaaggtggttggcgtgcttaagattcaggttcactattatgaagatggcaatgttcagttggttagtcataaagatgtacaggattcactaactgtttcgaatgaagcccaaactgtccaaggagtttatttaaaatcatagagaatgcagaaaatgagtatcagacagccatttgtggaaactatcaaacaatgtcagataccacattcaaggcccttcgccggcagcttccagttacccgcaccaaaatcgactggaacaagatactcagctacaagattggcaaagaaatgcagaatgcttaaaggctgaatgtagggttcttccagtatgtgggaaagacaagggtttcaacgtgtgggtcatatgataaataagtgatttataaacaagagtgatattttgctagggctttcaaagttaaccggttttctagcctcatggaatactgttgaacctatagcgttgtcttgattcttttgtgttctctgccttgtaattttctgttactgctatatctacgtgtaaatctttttttctttttttttttttttttttttcttttttggttaattctgccacatttaatgttggtgagagagtgatctatcctaatgacatttactgtttaaaaaagtttcctagccatgaagccctgctactgatttagacaaggtattatggtcattactttgtacccctatccttccaagcacttctggtacttcagtcgtttttactgatccaccaacacctaaagaggctatgctacagtctctagctaaatggaagacacattcatccttctccctctgactgctttgatcatcatttattgcatcgtcatatcatatttatcgcatctcataactaactttctaaagtttggattgggacttttcaggtcctttttggagggcaaaggaagttccagcttctctggggaacttgtttttaaatccaaagacttgaaccacattccctgcacatgaacatgtttgcttttatcccttctctcattggctccttcccatcttagtaccattgtagttatacatctgcattttttagaagcattttacccatttatttttttaaacattcaagaactgctgacgtactgtggatgtagagtataaaacttgaaaaatgcagatgttgaaggaataataggtatcttgtgctttaatactttatggcaggattgtactataagcaaatgaattaaacagctatgtaaatcataaagaaaaactaaaaatgaaccaaagtgaaaggataacttccaggcagtatctttctattgtaacctgttatttaaggaaatactagtgatttcttctaaataggatgtaaacttctttcaaattactcttcctcagtctgcctgccaagaactcaagtgtaactgtgataaaataacctttcccaggtatattcggcaggtatgtgtgtaatctcagaatacacaggtgacatagatatgatatgacaactggtaatggtggattcatttacattgtttacacttctatgaccaggccttaagggaaggtcagttttttaaaaaaccaagtagtgtcttcctacctatctccagatacatgtcaaaaagaaaaggtgtttgtgctccgttttgtttctgctcagtaatatagtcaagcaagtttgttccaggtgacccattgagctgtgtatgcatttttgtttatttcaataaaatatatttgtattatttgtccttcatactatccatccataccacactatcttctgtatcaggtagtctaatagaaatatacctgttttgttct

SEQ ID NO: 118823 - DNA, 693 bp, Homo sapiens
atggccatcagggtccgcctcgcggccgcgccacctgagagcccccgagccagtggtgcaaggctgggaagaacaaaggagcaggactcaccccagcagcggaacgtcgggctgcgctggacgcgccgagagccgcggcccgcccaccgggtcacatggctcagagccgagcagaggatcaaaggggctttgtggtcgcggaacaaggagcctcccagagcgcggggcagaggtgctcccccacctacctgctcagacatcgccacagctgggctctcagggagcatggccagccaccccagaaagccattcagacctgcagccagggctggaacacagccacctgggtttgtcccctctaccccagcacttctcaaagttctctaccgctcagcacacactcagcattcaggtagagcagccccagagccttctcggctggccctcggtccaaccctccagcagaaacggcacatgggccacagacgcaaccttacattttccagcacctacaataaaaaatgtggatttggctgggctgtggagatgcgcttctcagcccttctagatgttaccaccacgccctcccgagtggccttctggggcagtcgggggccccctctaggaatggagcgccagctccagctcctgtcaggctacagcccagatggttggctgagcacgagcatgtga

SEQ ID NO: 118824 - DNA, 654 bp, Homo sapiens
atggacacaaggataggaacaacagacactgggacctatgggaaggtggagggtgcaaggaggatgaggctcaaaaagttacctattgagtattatgcttattacctggatgatgaaataatctgcacatcaaatccctgtgagtttccagggtatggaatagaaagggagtacccgtgtgaaaccagcggacctcttgagttgacagtccaggaagaccaaggtgaagaaccacagagagaagaacttactagaaagaaaacttcaaaggtctgccgtgggtcccccttagcctgggcaacaggagtgaaaccctgtctcaaaaaaaagaggaggagaagaaaagaagaaagaagaaagaagaaagaagaaggagaaggagaaggagaagaagaagaagaagaagaagaagaagaggaggaggaggaggaggaggaggaggaggaggaggaggaggaggaggaggaggaggagaagaagaagaagaagaagaagaagaagaagaagaagaagaagaagaagaagaagaagaagaagaagaagaagaagaaagtgatccctgtacatcatggaatactagtcagccataaaaaaggaatgaaatctggcctttgcagcaacatgaatgcagctggaggccgttatcctaagtga

SEQ ID NO: 118825 - DNA, 291 bp, Homo sapiens
atggggttttgccatattggccaggctagtctcgaactcctgacctcaggggaggaagaggaggaagaggaggaagaggaggaggaagaggaagaggaggaagaggaggaagaggaggaggaagaggaagaggaggaagaggaggaggaagaggaagaagaagaagaagaagaagaagaagaagaagaagaagaagaagaagaagaggaagaggaagaagaagaagaagaagaaatagctttaggcggagatcaaatcctaacaggaaaacacatggcatttttgaaataa

SEQ ID NO: 118826 - DNA, 237 bp, Homo sapiens
atgagaagttcagttataggcccaaggtcacatatcccgagccagcgtaaaagtggaatccaggaggaggaggaggaggaggagcaggaggaggaggaggaggaggaggaggaggaggagaagaagaagaagaagaagaagaagaagaagaagaagaagaagagaaaggattactggaccaagaagctgccagacatttggttctcccagcagcaacccaatgcaaaccaaaaatga

SEQ ID NO: 118827 - DNA, 819 bp, Homo sapiens
atggccagccattcttcacccatgggcagccaatactactatggattccctgggccagactctgcaatgcatgctttgaacacagtggtgagcgagaaagacctcacgcttgacctctcagggcttgtggcccgcaacaaacgctgtgggccccactcatattccctcaacactcaccttctccatgcgtgcctacggcttcctactcagagagagaacacaacactcaagacttttattccccaaggctgggagatccatacagaccaggtggaaagggaggcagaatgccagccaggccggctgaagatttgtgtgcatgatacagctcaggaacttccacttgctagcacagcacgcaatgctcttcttggcaggaatctttgccccttccggcagagcagtaccactcagatgccagatgaaatccccatcagcctggatgacagaatgaggcccccatctctgaagaagaagaaggagtgggagaagaggaagaggaagaggaatgagaaggagaaggaggaggaggaggaggaggagaaggagaagaagaagaagaagaagaagaagaagaagaagaagaagaagaagaagaagaagaagaagaagaagaaggaggaggaggaggagtgggagaagaggaagaggaagaggaaggagaaggagaaggaggaggaggagaagaagacgaagaagaataagaagaagaagaagaagaacagaagaagaaggagaagaagaagaaagaacaagaagaaggaggaggagaaggagggatggagaagaaatgaatatttcaggctgggtagtttatga

SEQ ID NO: 118828 - DNA, 380 bp, Homo sapiens
tggacactgatcaggccctgctggccaggtccctgtgcgcatgccatgcgaggggtcagggccgctccctagggtccctcctgcccaacatgtggaggtggctggttcccatgaacgtggttgtcagaggcgggggacagcagaggctgcagactggcccacttccctcctccccagggatgccaagcttggatcatggccctaatcccaaccccaaccccatgggaggaggaggaggaggaagaagaggaggaggaggaggaggaggaggaggaggaggaggaggccaggtcctggtggagcctttgcccagcccagtcctctctgcctcctcctggctgaagctgtttgtcaggattaccctcgggctaaagaggaaa

SEQ ID NO: 118829 - DNA, 654 bp, Homo sapiens
caagggctgaaaaatgaagcgtctactctgctggctacgcttgagatgctcccatgctatcaggacactcagcatattgactttggaagcaaggaagccacctccaattcacagagctggtgcctctgcctcattcatgaaaggacccaccaaaacctgatccagttatcaggttcatcaggccttgggagggttgcattagaacttcagaaaacacagcccagagccacgccgccatctgagcatctggggaaaaggcaggaggaggaggaggaggaggaggaggaagaggaggaggaggaggaggaggaggaggaggaggaggaggaagaggaagaagaagaagaagaagaagaagaagaagaagaagaagaagaagaagaagatttattatataatttcatttatataatattctcaaaaatgcccactaagctcaagatttgtaaacacaccaatcagcaccctgtgtctagctcagggtttgtgaatgcaccaatcgaagctctgtatctagctaatctagtggggacgtggagaacctttgtgtctagctcagggattgtaaaggcaccaatcagtgccccgtcaaaacagaccactcggctctctgtaaaatggaccaatcagcaggatgtgggtggggccagataa

SEQ ID NO: 118830 - DNA, 621 bp, Homo sapiens
atgaggaaccccaagggatccctagatcaccctttgagaatcactgatgtagaacactccctgtcagagagtatatggcagggctgtaactgccaagaaagtgactccttaagacttccaaaacttgtacataaagggttatacaacttctttctggtcctcttggaacactggctcctggaacgtagtccctatgccataaggaagctgaaggaggccatggaaaggcccatgtggaaggaaagagagccccctccaatctgcaaccctcggccccagctgagctttcaggaaacaatagcattagctttcaatcatgaggaggaggaggaggaggaggaggaagaggaggaggaggaggaggaggaggaggaagaagaagaagaagaagaagaagaagaagaagaagaagaagaagaagaagaagaagaagaagaagatttattatataatttcatttatataatattctcaaaaatgccaactaaggtaccaagtctatgggactctaaattaggagcagagcaggccgctccagaagagaataataaaaaggagcaacaggaggaatatcaaggaaagagtttctcctttctgaatcttactgaatgctggccctaa

SEQ ID NO: 118831 - DNA, 417 bp, Homo sapiens
atgaagggaagaagaaggaaaaagaaggaaggagaaggaggaggaggagaatcggaaagaggaggaggaggaggagaaggagaaggagaaggagaagaagaagaagaagaagaagaagaagaagaagaagaagaagaagaagaagaagaagaagaagaaaaagaagaagaagaagaagaagaagaagaacaagaagaagaagaagacgacgaagaagaagaggaagaaaaatcctgtagtgtcaatgtctcactgatagaattaccctgggaccccaaggcctacagcaggctagctcctctatcctcacagcctggccctgctgtcaaggtgcccactgagcacctcattgcaaaactcgaggactgtgtccagggcttcacttacttgaccgtggaaaagcgttgggcccggtga

SEQ ID NO: 118832 - DNA, 692 bp, Homo sapiens
atgaggaaccccaagggatccctagatcaccctttgagaatcactgatgtagaacactccctgtcagagagtatatggcagggctgtaactgccaagaaagtgactccttaagacttccaaaacttgtacataaagggttatacaacttctttctggtcctcttggaacactggctcctggaacgtagtccctatgccataaggaagctgaaggaggccatggaaaggcccatgtggaaggaaagagagccccctccaatctgcaaccctcggccccagctgagctttcaggaaacaatagcattagctttcaatcatgaggaggaggaggaggaggaggaggaagaggaggaggaggaggaggaggaggaggaggaggaggaggaagaggaagaagaagaagaagaagaagaagaagaagaagaagaagaagaagaagaagatttattatataatttcatttatataatattctcaaaaatgccaactaaggccatgagcatttccagcatgttcaagtttgccaccaagattagaatgactgtgactccaaatcccaagtgttgttggattcctgtgtttcctgcatacctctccacatctaaagctgccaaatgtatgcaccatacagctcatcatggtcaggagaagtcagatcactgcatttcaccttcccccatccctgctccagg

SEQ ID NO: 118833 - DNA, 3817 bp, Homo sapiens
tcgacccacgcgtccggagtttccagaaaatataaaaaattgtaaagttttgacaattgtggaggccagtgtaaaccctatttccaagctccctgatggattttctcagctgttaaacctaacccagttgtatctgaatgatgcttttcttgagttcttgccagcaaattttggcagattaactaaactccaaatattagagcttagagaaaaccagttaaaaatgttgcctaaaactatgaatagactgacccagctggaaagattggatttgggaagtaacgaattcacggaagtgcctgaagtacttgagcaactaagtggattgaaagagttttggatggatgctaatagactgacttttattccagggtttattggtagtttgaaacagctcacatatttggatgtttctaaaaataatattgaaatggttgaagaaggaatttcaacatgtgaaaaccttcaagacctcctattatcaagcaattcacttcagcagcttcctgagactattggttcgttgaagaatataacaacgcttaaaatagatgaaaaccagttaatgtatctgccagactctataggagggttaatatcagtagaagaactggattgtagtttcaatgaagttgaagctttgccttcatctattgggcagcttactaacttaagaacttttgctgctgatcataattacttacagcagttgcccccagagattggaagctggaaaaatataactgtgctgtttctccattccaataaacttgagacacttccagaggaaatgggtgatatgcaaaaattaaaagtcattaatttaagtgataatagattaaagaatttaccctttagctttacaaagctacagcaattgacagctatgtggctctcagataatcagtccaaacccctgatacctcttcaaaaagaaactgattcagagacccagaaaatggtgcttaccaactacatgttccctcaacagccaaggactgaggatgttatgtttatatcagataatgaaagttttaacccttcattgtgggaggaacagaggaaacagcgggctcaagttgcatttgaatgtgatgaagacaaagatgaaagggaggcacctcccagggagggaaatttaaaaagatatccaacaccatacccagatgagcttaagaatatggtcaaaactgttcaaaccattgtacatagattaaaagatgaagagaccaatgaagactcaggaagagatttgaaaccacatgaagatcaacaagatataaataaagatgtgggtgtgaagacctcagaaagtactactacagtaaaaagcaaagttgatgaaagagaaaaatatatgataggaaactctgtacagaagatcagtgaacctgaagctgagattagtcctgggagtttaccagtgactgcaaatatgaaagcctctgagaacttgaagcatattgttaaccatgatgatgtttttgaggaatctgaagaactttcttctgatgaagagatgaaaatggcggagatgcgaccaccattaattgaaacctctattaaccagccaaaagtcgtagcacttagtaataacaaaaaagatgatacaaaggaaacagattctttatcagatgaagttacacacaatagcaatcagaataacagcaattgttcttctccatctcggatgtctgattcagtttctcttaatactgatagtagtcaagacacctcactctgctctccagtgaaacaaactcatattgatattaattccaaaatcaggcaagaagatgaaaattttaacagccttttacaaaatggagatattttaaacagttcaacagaggaaaagttcaaagctcatgataaaaaagattttaacttacctgaatatgatttgaatgttgaagagcgattagttctaattgagaaaagtgttgactcaacagccacagctgatgacactcacaaattagatcatatcaatatgaatcttaataaacttataactaatgatacatttcaaccagagatcatggaaagatcaaaaacacaggatattgtgcttggaacaagctttttaagcattaattctaaagaggaaactgagcacttggaaaatggaaacaagtatcctaatttggaatccgtaaataaggtaaatggacattctgaggaaacttcccagtctcctaataggactgaaccacatgacagtgattgttctgttgacttaggtatttccaaaagcactgaagatctctcccctcagaaaagtggtccagttggatctgttgtgaaatctcatagcataactaatatggagattggagggctaaaaatctatgatattcttagtgataatggacctcagcagccaagtacaaccgttaaaatcacatctgctgttgatggaaaaaatatagtcaggagcaagtctgccacactgttgtatgatcaaccattgcaggtatttactggttcttcctcatcttctgatttaatatcaggaacaaaggcaattttcaagtttgattcaaatcataatcccgaagagccaaatataataagaggccccacaagtggcccacaatctgcacctcaaatatatggtcctccacagtataatatccaatacagtagcagtgctgcagtcaaagacactttgtggcactccaaacaaaatccccaaatagaccatgccagttttcctcctcagctccttcctagatcagagagcacagaaaatcaaagttatgctaaacattctgccaatatgaatttctctaatcataacaatgttcgagctaatactgcataccatttacatcagagacttggcccagcaagacatggggaaatgtgggccatctcaccaaacgaccgacttattcctgcagtaactcgaagtacaatccagcgacaaagtagtgtgtcctccacagcctctgtaaatcttggtgatccaggctctacaaggcgggctcagattcctgaaggagattatttatcatacagagagttccactcagcgggaagaactcctccaatgatgccaggatcacagagacccctttctgcacgaacatacagcatagatggtccaaatgcatcaagacctcagagtgctcgaccctctattaatgaaataccagagagaactatgtcagttagtgatttcaattattcacggactagtccttcaaaaagaccaaatgcaagggttggttctgagcattctttattagatcctccaggaaaaagtaaagttcctcgtgactggagagaacaagtacttcgacatattgaagccaaaaagttagaaaagatgcctttgagtaatggacagatgggccagcctctcaggcctcaggcaaattatagtcaaatacatcacccccctcaggcatctgtggcaaggcatccctctagagaacaactaattgattacttgatgctgaaagtggcccaccagcctccatatacacagccccattgttctcctagacaaggccatgaactggcaaaacaagagattcgagtgagggttgaaaaggatccagaacttggatttagcatatcaggtggtgtcgggggtagaggaaacccattcagacctgatgatgatggtatatttgtaacaagggtacaacctgaaggaccagcatcaaaattactgcagccaggtgataaaattattcaggctaatggctacagttttataaatattgaacatggacaagcagtgtccttgctaaaaactttccagaatacagttgaactcatcattgtacgagaagtttcctcataa

SEQ ID NO: 118834 - DNA, 2451 bp, Homo sapiens
atggagaatgactttgacgagttgagagaggaaggcttcagaagatcaaactactccgagctaaaggaggaagttcaatccaatggcaaagaagttaaaaactttgaaaaaaaattagacgaatggctaactagaataaccaatgcagagaagttcttaaaggacctgatggagctgaaagccacggcacgagaactacgtgacgaatgcacaagcctcagtagccgatgcgatcaactggaagaaagggtatcagcgatggaagacaaaatgaatgaaatgaagcgtgaagagaagtttagagaaaaaagaataaaaagaaacgaacaaagcctccaagaaatatgggactatgtgaaaagaccaaatctacgtctcattggtgtacctgaaagtgatggggagaatggaaccaagttggaaaacactctgcaggatattatccaggagaacttccccaatctagcaaggaaggccaacattcaaattcaggaaatacagagaacgccacaaagatactcctcgagaagagcaactaactccaagacacactttaaaccaacaaagatcaaaagagacaaagaaggccattacataatggtaaagggatcaattcaacaagaagagctaactatcctaaatatatatgcacccaatagaggagcacccagattcataaagcaagtcctgagtgacctacaaagagacttagactcccacacaataataatgggagactttaacaccccactgtcaacattagacagatcaatgagacagaaagttaacaaggatatccaggaattgaactcagctctgcaccaagcagacctaatagacatctacagaattccccaccccaaatcaacagaatatacattcttttcagcaccacaccacacctattccaaaattgaccacatagttggaagtaaagcactcctcagcaaatgtaaaagaacagaaattataacaaactgtctcttagaccacagtgcaatccaactagaactcaggattaagaaactcactcaaaaccactcaactacatggaaactgaacaaccttctcctgaatgactactgggtacataacgaaatgaaggcagacataaagctgtactttgaaaccaatgagaaaaaagacacaacataccagaatctctgggacacattcaaagcagtgtgtagagggaaatttatagcactaaatgcccacaagagaaagcaggaaagatctaaaattgacaccctaacatcacaattaaaagaactagagaagcaagagcaaacacattcaaaagctggcagaaggcaagaaataactaagatcagagcagaattgaaggagatagagacacaaaaaacccttcaaaaaatcaatgaatccaggagctggttttttgaaaggatcaacaaaattgatagactgctagcaagacaaacaaagaagaaaagagagaagaatcaaatagacgcaataaaaaatgttaaaagggatatcaccaccaatcccacagaaatacaaactaccatcagagaatactataaacacctctatgcaaataaactagaaaatctaaaagaaatggataaattcctggacacatacactctcccaagactaaaccaggaagaagttgaatctctgaatagaccaataacaggctctgaaattgaggcaataattaatagcttaccaactaaaaaaaaaaaagatggaatctttcctaactcattttatgaggccagcatcatcctgataccaaagcctggcagagacacaaccagaaaagagaattttagaccaatatccctgatgaacattgatgcaaaactcctcaataaaattctggcaaaccgaatccagcaacacatcaaaaagcttatccaccatgatcaagtgggcttcatccctgggatgcaaggctggttccacatgcaaaaatcaataaacgtaatccagcatataaacagaaccaaagacaaaaaacacatgattatctcaatagatgcagaaaaggcctttgataaaattcaacaacacttcatgctaaaaactctcaataaattagatattgatggaacgtatctcaaaataataagagctatctatgacaaacccacagccagtatcatactgaatgggcaaaaactggaagcattccctttgaaaactggcacaagaaagggatgccctctctcaccacaactattcaccatagtgttggaagttctggccagggcagttaagcaggagaaggaaataaagggtattcagttaggaaaagaggaagccaaattgtccctgtttgcagatgacatgattgtatatctagaaaaccccattgtctcagcccaaaatctccttaagctgataagcaacttcagcaaagtctcaggatacaaaatcaatgtgcaaaactcaacaagcattcttatacaccaataa

SEQ ID NO: 118835 - DNA, 4965 bp, Homo sapiens
atgctctccacactccgccgcactctatttgcgctgctggcttgtgcgtcttttatcgtccatgccgctgcaccagatgaaatcaccaccgcctggccggtgaatgtcgggccactaaacccgcacctttacacgcctaaccagatgttcgcccagagcatggtttatgaaccattggtgaaatatcaggcagacggttcggtgatcccgtggctggcaaaaagctggactcattcagaagatggtaaaacctggaccttcaccctgcgtgatgacgtgaaattctccaacggtgaaccgttcgatgccgaggcggcggcagaaaacttccgcgcagtgctcgataaccgtcaacgtcacgcctggctggagctggcaaaccagattgttgatgttaaagcactcagtaaaacagagctgcaaattaccctgaaaagcgcctactatcctttcctgcaagaactggccctgccccgtcctttccgttttatcgctccctcgcagtttaaaaaccatgaaaccatgaacggaattaaagcgccgattggcaccggaccgtggattttgcaggaatcgaaactgaatcagtacgatgtcttcgtccgtaacgaaaactactggggcgaaaagccagcgattaaaaagatcacctttaacgtcatcccggacccgactacccgcgcggtggcgtttgaaactggcgatatcgacctgctgtacggaaacgaagggttattaccgctcgataccttcgcccgctttagcccagaatccggcttaccacacccaactgtcacagccgatcgaaaccgtgatgctggcgctcaataccgccaaagggagccaccccgggcccggcccaacaggaggcccctggccacggggctccccatcggggctcccgggagcctgaagggcccaccggagataagagctgctggaaagccatggagggaaaacccaggtttccacgggacatcaaaggacaggagctccaccaacactgacagctcagggctaacttattctccaggaattatcccaattgcctgcaatgcaacacagctgcctctgcaggagaccctttccctttccacagggacagcctccatcctgtgcaaagagcggaaaggtctggcctcctggcctccagatagaacaacactgagttcagaactccctgtgggatctgaaccaggcttaggatttgcctgtgagaaaggagatcctggaggcggtagaggagaccatggtcctgcgcgctgcccggtctcagccctccctctgtcccctggagccagctcctgcagctgtggcagagaagctggacctcagtgtgcctccctgggttttggctccagcaataatcaggaacaagcccagccagcccagagtgtgacggtgtggccaggggaaccaggccagagtgtgacggtgtgggcccatgggtggaccccatgtcccaaaaacgtggccaggaagtatgcagtcactgttagctacctcaccccaccagggctgagcctcacagggctctcagccacagcagtggaggctcctctgagaagcctgtgcagggctgaaatctggcggggagcagggaaggggtgggagagctgtcagacagggacgtttaagtctgcagaagttgtctgctgccttttgttcagctatgccctgcccccagaggtggagtctacacaggcagatgatacaaaggaaacagattctttatcagatgaagttacacacaatagcaatcagaataacagcaattgttcttctccatctcggatgtctgattcagtttctcttaatactgatagtagtcaagacacctcactctgctctccagtgaaacaaactcatattgatattaattccaaaatcaggctcttgagaaattggttgtctataatgttggcagtgggtttgaacgggaatagaagaggcattgagatgtcctctaaagaaaggatggttaatatcactcaatacgctatggaatctgaagaactttcttctgatgaagagatgaaaatggcggagatgcgaccaccattaattgaaacctctattaaccagccaaaagtcgtagcacttagtaataacaaaaaagaaatacaaactaccatcagagaacactataaacacctctatgtaaataaactagaaaatctagaagaaatggataaattcctggacacatacaccctcccaagactaaaccaggaagaagctgaattgctgaatagaccaataacaggctctgaaattgaggcaataattaatagcctaccaaccgaaaaaagtccaggaccagacggattcacagccgaattctaccagagaaccaaagacaaaaaccacatgattatctcaatagatggaggaaaggccttcgacaaaattcaacagcccttcatgctaaaaactctcaataaactgggtattgatggaacatatctcaaaagaataagagctatttttgacaaacccacagccaatatcatactgaatgggcaaaaactggaagcattccctttgaaaactggcacaagacagggatgccctctctcaccactcctattcaacatagtgttggaagttctggccagggtaatcaggcaagagaaagaaataaagggtattcaattcggaaaagaggaagtaaaattgtccctatttgcagatgacatgactgtatatttagaaaaccccatcttctcagcccaaaatctccttaagctgataagcaacttcagcaacgtctcaggatacaaaatcaatgtgcaaaaatcacaagcatttttatacaccaataacagccaaatcatgagtgaactcccattcacaattgctacaaagagaataacatatctaggaatccaacttgcaagggatgtgaaggacctcttcaaggagaactacaaaccactgctcaatgaaataaaagaggatacaaacaaatggaagaacattccatgctcacagataggaagaatcctatggccatactgcccaaggcaagaagatgaaaattttaacagccttttacaaaatggagatattttaaacagttcaacagaggaaaagttcaaagctcatgataaaaaagattttaacttacctgaatatgatttgaatgttgaagagcgattagttctaattgagaaaagtgttgactcaacagccacagctgatgacactcacaaattagatcatatcaatatgaatcttaataaacttataactaatgatacatttcaaccagagatcatggaaagatcaaaaacacaggatattgtgcttggaacaagctttttaagcattaattctaaagaggaaactgagcacttggaaaatggaaacaagtatcctaatttggaatccgtaaataaggtaaatggacattctgaggaaacttcccagtctcctaataggactgaaccacatgacagtgattgttctgttgacttaggtatttccaaaagcactgaagatctctcccctcagaaaagtggtccagttggatctgttgtgaaatctcatagcataactaatatggagattggagggctaaaaatctatgatattcttagtgataatggacctcagcagccaagtacaaccgttaaaatcacatctgctgttgatggaaaaaatatagtcaggagcaagtctgccacactgttgtatgatcaaccattgcaggtatttactggttcttcctcatcttctgatttaatatcaggaacaaaggcaattttcaagtttgattcaaatcataatcccgaagagccaaatataataagaggccccacaagtggcccacaatctgcacctcaaatatatggtcctccacagtataatatccaatacagtagcagtgctgcagtcaaagacactttgtggcactccaaacaaaatccccaaatagaccatgccagttttcctcctcagctccttcctagatcagagagcacagaaaatcaaagttatgctaaacattctgccaatatgaatttctctaatcataacaatgttcgagctaatactgcataccatttacatcagagacttggcccagcaagacatggggaaatgtgggccatctcaccaaacgaccgacttattcctgcagtaactcgaagtacaatccagcgacaaagtagtgtgtcctccacagcctctgtaaatcttggtgatccaggctctacaaggcgggctcagattcctgaaggagattatttatcatacagagagttccactcagcgggaagaactcctccaatgatgccaggatcacagagacccctttctgcacgaacatacagcatagatggatatcttctatacagtgaaagcctgcaggaagaagaaagtcaagtctctgtcagcatcccatttttatcaccaaaaactgtcaagaactgtgaagggtctgggagtttaccttacttattaaagaatttaccctttagctttacaaagctacagcaattgacagctatgtggctctcagataatcagaagtctgggataatattaagaataatcggtgttactgaggaagaagacaattctaaaagcttggaaaacatctttggtggaataatcgaggaaaacttccctggccttgttagagacctagacatacaaatacaagaagcacaaagaatacctgggaaattcatcgcaaaaagatcttcacctaaacacattgtcatcaggttatccaaagttaagacaaaggaaaaaagtcttaagagctgtgaaacagaagcaccagtcacaaccctcagctgcaggtctgttggagttgactggaggtccactccagaccctgtttgcctgggtatcagcagcactggctgcagaacagcggatattggtgaaccgcaaatgctgctgcctgatcattcctctggaagttttgtctcagaggagtacctggccgtgtga

SEQ ID NO: 118836 - DNA, 3753 bp, Homo sapiens
cccagtcgtcctggtccgcggcgcccaacggggaagacgaagatgcagggacacgcgcgaggagccgccgcagccgccgccgccgcgctgtggagcccgagtgagcgcggcgccagcccgtccggccgctggacaacatggaggctgcactgcccgggccgccgtggcaggtaggtgggcgcgggccgacccgggaccgcgggctgctagtacaatggcccgggcggccccgcgaccaagtgcacgggcgccaccgccgccttggaagcgagttgggggcgagttggggcgcgcaccggggatccccccgccggacccactggctggctccagctgctctctgcattctcttcagctctggagagctgtgtgccggccctcagcctgagtttcctcatctgcaaaattgggacgatggtgtccagagtagtccccagtgcggcgttgcctgtccctgtggagcaggtgactacctggctgcgagtggaacagcaggccatggctctcgtagtggtctgtgacagcatatcaccctgtgggacagacccccgggacctagtgggctgggacagtaaaaaaatttccatctattttgaaaagttttctcctcttaaggaaatgacgtttactaagcaacagccccttctgctcatcgtccagccgtgctcgctggcagagcagaggctggtgggattccacctgttccgcaccggggggtgccacttggcttctcagtgtcgaaggcccttcttggacccagtacatctccacagcccccttgggctgtgggtccctgggttgggcatgactctctggactcctgtgccctgcacagcccggttctgaccacagacctcctgcatcagggtggactgtagcccagggcgggacaccaccacacccggtcccccactgactgacacccctgagtcagtctccaccccaggactgtttctttcactctttgccatggccttgggccacttccgggggcttggcaaggcaggaggcgtggaaccaagatggtatataatcagaatgctgtattttctgtgttagctgcttctcctcttgccctgcccccgtcacaggtacatgtactgggcagattggggtgagacgccctggatcgagcaggtggggatggacgacagcacccagaagatcattgtggacttggacatttactggcccaatagactgaccatcgacctgggggagaagaagctctactgggctgacactaaggaccctcctgatggctctctaccccgcctccctgactgcaggcagaaggtggtgaagggcagcctgacgcaccccttcaccctgacactctccggggacactctgcactggatggactggctgacgtgctccatccatgcctgcaacaggaacactgcggggaagagggacaatggtggctgctcccacctgtgtctgctgtccctaagggaggctttctacatgtgcggggcaacatgaagaaaatgtgaaattctgttgcttgttgtagctgacagcacgactctgaggtcccggtgggcagaggcctcgtgcagggcacctcaccagccggatgtcagagcttgccggaaggcgcagtgcccgtggagggctgccagtgcccagggagccttccgaggtgtcacgttgggcagtggaattcagagtcaggcagatccccattggtaaaaggggtgattatgctccccactacacagggtttggaggatggccggctcagtgggaccacggcggctgcaatgctgctctctgcagctcagagtcactctcatcgccagcagtcgagtgcagagcctgggccccccggcctccccagcccctccacaccaccccaggatttacatgctgctgggcctgagcagcaggaccccgtccacagctgatccctgggccctgctgctcagctgctctcttgagtgttgctgtggctgccgagagagcctgagtgtccccacaggagccaaggaggtcctgctgctggcccggtagacggaccaatggagggtctcgctggacacaccggacttcaccgacatcgtgctgcagctggacgacatccagcatgccatcgccatcaactatgacccaatggagggccacgtctactggacggatgacgaggtgtgggccatccgcagggcatacctggatgggtctggggcgcagacgctgatcaacaccaagatcaacgaccccgatgacatcgcagtcaactgggtggcccgaagcctctattggacccacacaggcactgaacacatcgaggtgacgtgcctcaacagcacctcccacaagatcctggtgtcagaggatagacagatgcatggggtcatggacttctgcttcttctccagcctcacgtactggatagactggggagagaaccctgaaatcaagcgtgccaacctggacaggcaggagctgcgcgtgctggtcaatgcttccctcgggtggcccaacggcctggccctggacctgcaggaatggccctggcccatccagacctgtatctttgccattctgcaggcgatcagtgtcgatgagacgaagaggcagaccctcctgaaggacaagctcccacacattttcaggttcaccctgctgggggacttcatctactggaccgcctggcagcaccacagcatcaagcgggtacacaaggtcaaggccaaccgggacgtcatcattgaccagctgcccggtcttcaccagtagagccgccatccacaggatctccctcgagaccaacaacaacgatgtggccatcctgctctcggcgtcaaggaggcctcggccctggactttgatgtgtccagcaaccacatctactggatgcaccaggcaccctcccagtcttgggcgccctggtgtgcaggctgcagccatggcggtgcctgcccctgggaggagggggcggtgtgggggggtcccagcggccaccaggaggaggcggaggcaatggcggcaggaactggggctgagctgtccccgctgcgtgcctgcgacagtgacccagccagccccggagcacagtcccggaaggatgataaatttgggtgtgacctcctttaaaaggaaatatccagatttagagcgagatttgtctcacaaggagaaactctacctgagagagctaaagtcattactgaaactcagtgcatgctaggtataacagcattgcgcagtgatgaagtgattgatttaatgataaaagaatatccagccaaacatgctgagtattctgttattctacaagaaaatgaatgtcagcgaattacagaccattataaagagtattcccaaatgcaacaacagaatactcagaaagttgaagccagtaaagtgcctgaggatagagaagaaggcttcagatgatcaaactactcggagctaaaggaggaagttcgaacccatggcaaagaagttaaaaaccttgaaaaaagattagatgaatggctaactagaataaccaatgcagagaagtccttaaaggacctgatggagctgaaaaccacagcacgagaactacgtgacgaatgcacaagcctcagtagccaattcgatcaactggaacaaagggtatcagtgatggaagatcaaatgaatgaaatgaagcgagaagagaagtttagagaaaaaagaataaaaagaaatgaacaaagcctccaagaaatttgggactatgtgaaaagaccaaatctacgtctgattggtgtacctgaa

SEQ ID NO: 118837 - DNA, 1194 bp, Homo sapiens
atgagaacaccaaagagcagcatcaaacccagtctaggggaggaaaaggaaaattatagaggttctttgaaagagacagcaccttccttgcaaaaagaatgggcagagcagtcaagcaaaagccaagagacagtgggagtgaagggaataaccagacacttccaggtctcaacactgttggaaagaagagaggataggaagagcaaagagccaccgctgctgatacccaggcaaacagtgtctggagtggacctccagcaaactccaacagacctgcagctgagtgtcctgactgttagaaggaaaactaacaaacagaaaggacatccacaccaaaaacccatctgtacgtcaccatcatcaaacaccaaagttaaaaaccttgaaaaacaattagacgaatggctaactagaataaccaatgcagagaagtcctcaaaggaccggatggagctgaaaaccaaggcacgagaactacatgacgaatgcacaagcctcagtagccgatgcgatcaactggaagaaagggtatcagtgacagaagatgaaatgaatgaaatgaagcgaggagagaagtttagagaaaaaagaataaaaagaaacgaacaaagcctccaagaaatatgggactatgtgaaaagaccaaatctatgtctgattggtgtacctgaaagtgatggggagaatggaaccaagttggaaaacactttgcaggatattatccaggagaacttccccaatctagcaaggcaggccaacattcagattcaggaaatacagagaatgccacaaagatactcctcgagaagagcaactccaagacacataattgtcagattcaccaaagttgaaatgaaggaaaaaatgttaagggcagccagagagaaaggtcaggttacccacaaagggaagcccatcagactaacagctgatctctcggcagaaaccccacaagccagaagagagtggggaccaatattcaacattcttaaaggaaagaattttcaacccagaatttcatatccagccaaactaagcttcataagtgaaggagaaataaaatattttacagacaagcaaatgctgagagattttgtcaccaccaggtctgccctaaaagagctcctgaaggaagcactaaacacggaaaggcacaaccggtaccagtcactgcaaaaacatgccaaattgtaa

SEQ ID NO: 118838 - DNA, 672 bp, Homo sapiens
tcagccttctttacaaaaactctttgctgctgcagcccgcctgtcctttgcatcactgaattcatacttctggaagtacccaatatgcacgtgttggtcatcagtgggtcctttttggttcttcgtgttgagtttacatggtgtggtctcgtggtagatagggaagttggggcccgtttcaggtacaccaatcagacgtagatttggtcttttcacatagtcccatatttcttggaggcttttttcatttctttttattctttttcctctaaacttctcttctcgcttcatttcattcatttgatcttccatcactgataccctttcttccagttgatcaaatcggctactgaggcttgtgcattcgtcacgtagttctcgtgccgtggttttcagctccatcaggtcctttaaggacttctctgcattggttattctagttagccattcgtctaatctttttgcaatgtttttaacttctttgctgtgggttcgaacttcctcttttagctcggagaagtttgattgtctgaagccttcttctctcaactcatcaaagtcattctccgtccagctttgttccgttgctggtgaggagctgcattcctttggaggaggagaggcgctctgatttttagaattttcagtttttctgctctgttttttccccat

SEQ ID NO: 118839 - DNA, 1509 bp, Homo sapiens
atggggaaaaaacagagcagaaaaaccggaaactctaaaaatcagagcacctctcctcctccaaagcaacgcagctcctcaccagcaacggaacaaagctggatggagaatgactttgacgagttgagagaagaaggcttcagaacatcaaactactccgagctaaaggaggaagttcgaacccatggtaaaaaagttaaaaactttgaaaaaaaattagatgaatggctaaccagaataagcaatgcagagaagtccttaaatgacctgatggagctgaaaaccacggcacgagaactatgtgacgaatgcacaagcctcagtagccgatgcaatcaactggaagaaagggtatcagcaatggaagacgaagtgaatgaaatgaatgtatctgaaagtgatggggagaatggaaccaagttggaaaacactctgcaggatattatccaggagaacttccccaatctagcaaggcaggccaacattcaaattcaggaaatacagacaacgacagaaagatactcctcaagaagagcaactccaagacacataattgtcagattcaccaaaattgaaatgaaggaaaatatgttaagggcagccagagagaaagccccaaatctcattaagctgataagcaacttcagcaaagtctcaggatacaaaatcaatgtgcaaatatcacaagcattcgtatacaccaataacagacaaacagagagccaaatcatgagtgaactcccattcacaatggcttcaaagagaataaaatacctaggaatccaacttagaagggatgtgaaggacctcttcaaggagaactacaaaccactgctcaatgaaataaaagaggatacaaacaaatgcaaaaacattccatgctcatgggtaggaagaatcaatatcgtgaaaatggccatactgcccaaggtaatttatagattcaatgccatccccatcaagctaccaatgactttcttcacagaattggaaaaaactactttaaagctcatatggaaccaaaaaggagcccgcattgccaagtcaatcctaagccaaaagaacaaagctggaggcatcacgctacctgacttcaaactataccacaaggctacagtaaccaaaacagcatggtactggtaccaacacagagatatcgaccaatggaacagaacagagccctcagaaataatgccgcatatctacaagtatctgatctttgacagacctgagaaaaacaagcaatggggaaaggattccctatttaataaatggtgctgggaaaactggctagccacatgtggaaagctgaaactggatcccttccttacaccttatacaaaaattaattcaagatggattaaagacttaaatgttagacctaaaaccataaaaacgctagaagaaaacctaggcaataccattcaggacataggcatgagcaagtacttcatatctaaaacaccaaaagcaatggcaacaaaagccaaaattgacaaatgggtctaa

SEQ ID NO: 118840 - DNA, 930 bp, Homo sapiens
aggagcgacaccacccccccccccaagcagggccccaccccccccgaagaagaaaggaaagaaacacacacagacaaccgacaccacaaccgcacggggcaggaagatctccgtcccccaaacaaccaacaaaggaatcagcagcagcatcaccagcacacaaagaaaccagccgcaggcaacaaccgtggaaaaagcacacaacgagagcacgaggacccccgaagaaccaaaaggggcggtaagggggacccggtagaagaagaagaaaaccagcagggacacccccccacagaccccctgagaaaagagctcctcagcaacgaggaacaaagcaggaggaaaagacagcgacaaaagagagaggaaggctacagaagatcaaactactccgagcaaaaggaggaagttacacccaatggcaaagaagttaaaaactttgaaaaaaaattagatgaatggataactagaataaccaatgcagagaagtccttaaaggacctgatggagctgaaaaccacggcacgagaactacgtgatgaatgcacaagcctcagtaaccgatgcgatcaactggaagaaagggccccccccgcgccccacaaccaacgacgccaaaatagtcactcgacccacacaccctacctgcagccaccaccgccccccaagaaaaccgccacgcacacacccaacgccaacgcccacgcaaaacaaaatatcacagtaaaacggatacactccaccaaggggaaagagagtacgagaggacagatgcaagcccccacaggccccgacaagcgccccccgagccgcgaagcaacggcaatcctagaagatgaaaagaaccaaagcagtaaaaaagcaacaaagagtcctatcaatagaaggtgcctagtgacaaaccactgcgaccatcaagaagggaattga

SEQ ID NO: 118841 - DNA, 4673 bp, Homo sapiens
ggggctgcagaggtctttcccagtcgtgcagtaaaaaatttcaaggaacaattctgagctgtttcagccaaatgtctatacctgcattagtcactgttctgcagatagagtgtgatgattaaccagaagtggagcaaggtgctgtgattgggaactgcaccagaatcacaagatctcaatagaggagagcaattccccaaatcatacttgagagatcactggaagattctaacaggcatttggcagataaaaataacatgcctactgtgcttttctatttagatttatattttctatagtttattcttaacctactagtactgctaactaaaaatcgagtgtttcttgtgttaaaaaacatgcttttacaaaaaaaaattaaattttaatacctttgcaactgaaaggagatataaatgaggatattcagaatttcagcattaatgtttaagtttcagaatacacaaacttgtttttattggttaaagaatgtttttcacttcattgcaaacttaaccaaaaagaagagtagttgttttactttagatgttcatcatatattgttcaaacagcttctttttcaaaagaaagtctatgtcaggtaaaattctatttgttgctttgcaagctgtacctctagatgatagatttcatgtatcttagaattagatttctgtgttcttagattcctgtgttcctagcaacttgtagggaataccttaaaaagtatctacttgggggtggagccaagatggccgaataggaacatctccagtctacagctcccagcgtgagcgacacagaagacgggcgatttctgcatttccaactgaggtaccggattcatctcactggggagtgccggacagtgggtgcaggacagtgggtgcaacgcaccatgcgtgagccgaagcagggtgaggcatcgcctcacctgggaagcgcaaggggtcagggaattccctttcctagtcaaagaaaggggtgacagacggcacctggaaaatcgggtcactcccaccctaaaactgcacttttccaacgggcttaatggcacaccaggagattatatcctgcacctggcttggaggatcctacgcccatggagcctcactcattgctagcccagcagtctgagatcaaactgcaaggcagcagcgaggctgggggaggggcgcccaccattgcccaggcttgagtaggtaaacaaagcagcccggaaactcgaactgggtggagcccaccgcagctcaaggaggcctgcctgcctctgtaggctccacctctgggggcagggcacagacaaacaaaaggcagcagaaacccctgcagacttaaatgtccctgtctgacagctttgaagagagtagtggttctcccagcacgcagcttgagatccgagaacgggcagactgcctcctcaagtgggtccctgacccccgagtagcctaactgggaggcaccccccagtaggggcgcactgacacttcacacggctgggtactcctctgagacaaaacctccagaagaacgattagacagcagcatttgcggttcaccaatatccgctgttctgcagccactgctgcctgatacccagacaaacagggtctggagtggacctccagcaaactccaacaggcctgcagctgagggtcctgactgttagaaggaaaactaacaaacagaaaggacatccacaccaaaaacccatctgtacgtcaccatcatcaaagaccaaagagaagtccttcaaggacctgatggagctgaaaaccacagcacaagaactacatgatgaatgcacaagcctcagtaaccgatgcaatcaactggaagaaattgtatcagcaatggaagacgaaatgaatgaaatgaagcgtgaagaaaagtttagagaaaaaagaatgaaaaggaacaaacaaagcctccaagaaatatgggactatgtgaaaagaccaaatctacgtctgattggtgtacctgaaagtgatggggagaatgaaaccaacttggaaaacactctgcaggatattatccaggagaacttccccaatctagcaaggcaggccaacattcaaattcaggaaatacagagaatgccacaaagatactcctcgagaagagcaactccaagacacataattgtcagattcaccaaagttgaaatgaaggaaaaaatattaagggcagacagagagaaaggtcaggttacccacaaagggaagcccatcagactaccagcggatctctcagcagaaactctacaagccagaagagagtgggggccaatattcaacattcttaaagaaaagaattttcaacccagaatttcatatccagccaaattaagcttcataagtgaaggagaaataaaatactttacagacaagcaaatgctgagagattttgtcaccaccaggcctgccctacgagagctcctgaagcacagactggcaaattggataaagagtcaagacccatcagtgtgctgtattcaggaaacccatctcacgtgcagagacacacataggctcaaaataaagggatggaggaagatctaccaagcaaatggaaaacataaaaaggcaggggttgcaatcctagtctcggataaaacagactttaaaccaacaaagatcaaaagagacaaagaaggccattacataatggtaaagggatcaattcaacaagaagaactaactatcctaaatatatatgcacccaatacaggagcacgcagattcgtaaagcaagtccttagtgacctacaaagagacttagactcccacacaataataatgggagactttaataccccactgtcaacattacacagatcaacgagacagaacgttaacaaggatatccaggaattgaactcggctctgcaccaagcagacctaatagacatttacagaactgtccaccccaaatcaacagaatctacattcttttcagcaccacaccacacctattccaaaattgaccacataattggaagtaaagcactcctcagcaaatgtaaaagaacagaaattataacaaactgtctctcagaccacagtgcaatcaaactagaactcaggattaagaaactcactcaaaaccgctcaactacatggaaactgaacaacctgctcctgaatgactactgggtacctaacgaaatgaaggcagaaataaagatgttctttgaaaccaacgagaacaaagacacaacataccagaatctctgggacacaatcaaagcagcgtgtagagggaaatttatagcactaagtgcccacaagagaaagcaggaaagatctaaaattgacatcctaacatcacaattaaaagaactagagaagcaagagcaaacacattcaaaagctagcagaaggcaagaaataactaagatcagagcagaactgaaggagacagagacacaaaaaacctttcaaaaaatcaatgaatccaggagctggttttttgaaaagatcatcaaaattgatagactgctagcaagactaataaagaagaaaagagagaagaatcaaatagatgcaataaaaaatgacaaaggggatatcaccaccgatcccacagaaatacaaactaccatcagagaatactataaacatctctacgcaaataaactagaaaatctagaagaaatggataaattccttgacacatacaccctcccaagactaaacaaggaagaaactgaatctctgaatagaccaataacaggctctgaaattgaggcaataattaatagcttagcaaccaaaaaaagtccaggaccagatggattcacagccgaattctaccagaggtacaaggaggaactggtaccattccttctgaaactattccaatcaatagaaaaacagggaatcctccctaactcattttatgaggccagcatcatcctgataccaaagcctggcagagacacgacaaaaaaagagaattttagaccaatatctttgatgaacattgatgcaaaaatcctcaataaaatattggcaagccgaatccagcaacccatcaaaaagcttatccaccatgatcaagtgggcttcatccctgggatgcatggctggttcaacatacgcaaatcaataaacgtaatccagcctataaacagaaccaaagacaaaaaccacatgattatctcaatagatgcagaaaaggcctttaacaaaattcaacaacacttcatgctaaaaactctcaataaattaggtattgatgggacgtatctcaaaataataagagctatctatgacaaacccacagccaatatcatactgaatggacaaaaactggaagcattccctttgaaaactggcacaagacagggatgccctctctcaccactcctattcaacatagtgttggaagttctggccagggcaatcaggcaggagaaggaaataaagggcattcaattagaaaaagaggaagtcaaattgtccctgtttgcagatgacatgattgtatatctagaaaaccccattgtctcagcccaaaatctccttaagctgataagcaacttcagcaaagtctcaggatacaaaatcaatgtacaaaaatcacaagcattcttatacaccaataacagacaaacagagagccaaatcatgagggaactcccattcacaattgcttcaaaggaataa

SEQ ID NO: 118842 - DNA, 2148 bp, Homo sapiens
atgaagctggagcatcaggaagcacagcggaggagtgggcaggggagggagaagcggaggtggccagaaggaaaggcggggccaggttgtgaaggggcctggatactctgtcctgagagccaggatgattccaaacaggagggtgacaacaatatgattgtggttagcagaaatgctgtcaggagtgtgaaggctgaattccaaggtgacaacctggagaactgggaaagctgttcagaggctataatagtccaagggagagataatggggtaccccacaaggcccatggccttgggactgaagaagagggaacagttttgaaaatcagtgagaggcagaactggttggatttggtggattttattttgttaggtggtgatctttttcatgaaaataagccctcaaggaaaacattacatacctgcctcgagttattaagaaaatattgtatgggtgatcggcctgtccagtttgaaattctcagtgatcagtcagtcaactttggttttagaaaactaacaaacagaaaggacatccacaccaaaaacccatctgtacgtcaccatcatcaaagaccaaaggtagatgaaaccataaagatggggaaaacacagagcagaaaaaccagaaactctaaaaatcagagcacctctcctcctccaaaggaacgcagctcctcaccagcaatagaacaaagctggatggagaatgactttgatgagttgaaagaagaaggcttcagaagatcaaactactccgagctaaaggaggaagttcgaaccaatggcaaagaagttaaaaaccttgaaaaaaaattagacaaatggataactagaataaccaatgcagagaagtccttaaaggacctgatggagctgaaaaccatagcacaagaactacgtgacgaatgcacaagcctcagtaaccaatgtgatcaactggaagaaagggtatcagtgatggaagatcaaatgaatgaaatgaagcgtgaagagaagtttagagaaaaaagaataaaaagaaatgaacaaagcctccaagaaatatgggactatgtgaaaagaccaaatctatgtctcattggtgtacctgaaagtgacggggagaatggaaccaagttggaaaacactctgcaggatattatccaggtgaacttccccaatctagcaaggcaggccaacattcaaattcaggaaatacagagaatgccacaaagatactccttgagaagagaaactccaagacacataattgtcagattcaccaaagttgaaatgaaggaaaaaatgttaaggacagccagagagaaagggctggagtgcagcggcgcgggcttggctcattgcaagctctggcttctgggccccagtgatcctcctgactgctcttccgtatcgcccgtattacgggtgcacctcgtgctgccctcctcccttccccactctgttggcacaccgttcctcggttccgtatccatccccccttctgtccctcgttttcccgatcgcgtgttccacccctatccctacacgcattattgtgacaatctaaaaacttgtcacacttcacatggatctgtcatggcggaaacagcggttatcaatcacaagaaacgtaaaaatagcccgcgaatcgtccagtcaaacgacctcactgaggcggcatatagtctctcccgggatcaaaaacgtatgctgtatctgttcgttgaccagatcagaaaatctgatggcaccctacaggaacatgacggtatctgcgagatccatgttgctaaatatgctgaaatattcggattgacctctgcggaagccagtaaggatatacggcaggcattgaagagtttcgcggggaaggaagtggttttttatcgccctgaagaggatgccggcgatgaaaaaggctatgaatcttttccttggtttatcaaacgtgcgcacagtccatccagagggctttacagtgtacatatcaacccatatctcattcccttctttatcgggttacagaaccggtttacgcagtttcggcttagtgaaacaaaagaaatcaccaatccgtatgccatgcgtttatacgaatccctgtgtcagtatcgtaagccggatggctcaggcatcgtctctctgaaatcgactggatcatag

SEQ ID NO: 118843 - DNA, 3676 bp, Homo sapiens
ggataccttcctaatattctctcctaccatgaagcaccactgtgtccagaagtttcagcagcagagactaagctaagaataaaggaaatcatggagaaactagaccagctgatcccacccagacctttcacccacatgaacacaaccaccagtgctgcacacagcacagccaccatcctcaaccctcgagacacgcactacaggaggcaccagctggacatcctgctggaggcttatcctctgctgcattccacaatatgctcaccccattggcctattgaagaagtccatgatgactttgctcatgacgggaattatcaggaacgcagctcctcaccagcaacagaacaaagctggacggagaatgactttgacgagttgagagaggaaggcttcagaagatcaaactactctgagctaaaggaggaagttcgaatcaatggcaaagaagttaaaaactttgaaaaaaaattagatgaatggataactagaataatcaatgcagagaagtccttaaaggacctgatggagctgaaaaccacagcacgagagctacgtgacaaatgcacaagcttcagtaaccgatgtgatcaactggaagaaagggtatcagtgatggaagacgaaatgaatgaaatgaagcatgaagagaagtttggagaaaaaagaataaaaagaaacgaacaaagcctccaagaaatatgggactatgtgaaaagaccaaatctacgtctcattggtgtacctgaaagtgatggggagaatggaaccaagttggaaaacactctgcaggatattatccaggagaacttccccaatctagcaaggaaggccaacattcaaattcaggaaatacagagaacgccacaaagatactcctcgagaagagcaactaactccaagacacactttaaaccaacaaagatcaaaagagacaaagaaggccattacataatggtaaagggatcaattcaacaagaagagctaactatcctaaatatatatgcacccaatagaggagcacccagattcataaagcaagtcctgagtgacctacaaagagacttagactcccacacaataataatgggagactttaacaccccactgtcaacattagacagatcaatgagacagaaagttaacaaggatatccaggaattgaactcagctctgcaccaagcagacctaatagacatctacagaattccccaccccaaatcaacagaatatacattcttttcagcaccacaccacacctattccaaaattgaccacatagttggaagtaaagcactcctcagcaaatgtaaaagaacagaaattataacaaactgtctcttagaccacagtgcaatccaactagaactcaggattaagaaactcactcaaaaccactcaactacatggaaactgaacaaccttctcctgaatgactactgggtacataacgaaatgaaggcagacataaagctgtactttgaaaccaatgagaaaaaagacacaacataccagaatctctgggacacattcaaagcagtgtgtagagggaaatttatagcactaaatgcccacaagagaaagcaggaaagatctaaaattgacaccctaacatcacaattaaaagaactagagaagcaagagcaaacacattcaaaagctggcagaaggcaagaaataactaagatcagagcagaattgaaggagatagagacacaaaaaacccttcaaaaaatcaatgaatccaggagctggttttttgaaaggatcaacaaaattgatagactgctagcaagacaaacaaagaagaaaagagagaagaatcaaatagacgcaataaaaaatgttaaaagaggatatcactactgaccccacagaaataaaaacaatcatcagagaatactataaacacctctatgcacataacctagaaaatctagaagaaatggataaattcctggacacatacaccctcccaagactgaaccaggaggaagctgaatccctgaatagaccaataacaaattctgaaattgagacagtaataaatagtctaaaagaaaaagcccaggaccagaaggatttacagctgaattctactagagcactattcacaatagcaaaggcctggaatcaaccaaaatgcccatcaatgacagacgagataaagaaaatgtggaacatatacaccatggaatactatgcagccatcaaaaggaatgagatcatgtcctttgcaggaatgtggatgaagctggaagccattatcctcagcaaactcatacaagaacagaaaaccaaacactgcatgttctcacttaaaagcaataggtcgaccatagtagaagaattaagcaaggccagaaaggagacaaataaactgggaataaatgagtgggtcattgataagccttatcatttgtgtggagaaatgacacaagagatagaaggatatgaagctgtagtcaaagggaatgtagtttcacaaagcagcttaaccccattgatggtgaacgggattctgggggagtcagtaactcttcccctggagtttcctgcaggagagaaggtcaacttcatcacttggcttttcaatgaaacatctcttgccttcatagtaccccatgaaaccaaaagtccagaaatccacgtgactaatccgaaacagggaaagcgactgaacttcacccagtcctactccctgcaactcagcaacctgaagatggaagacacaggctcttacagagcccagatatccacaaagacctctgcaaagctgtccagttacactctgaggatattaaattccctatctttgtctactcagcgaacacagggccccgcagagtccgcaaggaacctagagtatgtttcagtgtctccaacgaacaacactgtgtatgcttcagtcactcattcaaacagggaaacagaaatctggacacctagagaaaatgatactatcacaatttactccacaattaatcattccaaagagagtaaacccactttttccagggcaactgcccttgacaatgtcgtaataaccaatgcagagaagtccttaaaggacctgatggagctgaaaaccatggcacgagaactatgtaacgaatgcacaagcctcagtagccgatgcgatcaactggaagaaagggtgtcagcgatggaagatgaaatgaataaaatgaagcaagaagagaagtttagagaaaaaagaatagaaagaaatgaacaaagcctccaagaaatatgggactatgtgaaaagaccaaatctacgtctcattggtgtacctgaaagtgatggggagaatggaaccaagttggaaaaggctctgcaggatattatccaggagaacttccccaacctagtaagggaggctaacattcaaattcaggaaatacagagaatgccacaaagatactcctcaagaaaagcaactccaagacacgtaattgtcagattcaccaaagttgaaatgaaggaaaaaatgttaagggcagccaaagagaaaggtcgggttacccacaaagggaagcccatcagactaacagctgatctctcggcagaaactctacaagccagagagagtggagaccaatattcaacattcttaaagaaaagaattacaacccagaatttcatatccagccaaactaagcttcataagtga

SEQ ID NO: 118844 - DNA, 2261 bp, Homo sapiens
aaccaaagacaaaaaccacatgattatctcaatagatggaggaaaggccttcgacaaaattcaacagcccttcatgctaaaaactctcaataaactgggtattgatggaacatatctcaaaagaataagagctatttttgacaaacccacagccaatatcatactgaatgggcaaaaactggaagcattccctttgaaaactggcacaagacagggatgccctctctcaccactcctattcaacatagtgttggaagttctggccagggtaatcaggcaagagaaagaaataaagggtattcaattcggaaaagaggaagtaaaattgtccctatttgcagatgacatgactgtatatttagaaaaccccatcttctcagcccaaaatctccttaagctgataagcaacttcagcaacgtctcaggatacaaaatcaatgtgcaaaaatcacaagcatttttatacaccaataacagccaaatcatgagtgaactcccattcacaattgctacaaagagaataacatatctaggaatccaacttgcaagggatgtgaaggacctcttcaaggagaactacaaaccactgctcaatgaaataaaagaggatacaaacaaatggaagaacattccatgctcacagataggaagaatcctatggccatactgcccaaggcaagaagatgaaaattttaacagccttttacaaaatggagatattttaaacagttcaacagaggaaaagttcaaagctcatgataaaaaagattttaacttacctgaatatgatttgaatgttgaagagcgattagttctaattgagaaaagtgttgactcaacagccacagctgatgacactcacaaattagatcatatcaatatgaatcttaataaacttataactaatgatacatttcaaccagagatcatggaaagatcaaaaacacaggatattgtgcttggaacaagctttttaagcattaattctaaagaggaaactgagcacttggaaaatggaaacaagtatcctaatttggaatccgtaaataaggtaaatggacattctgaggaaacttcccagtctcctaataggactgaaccacatgacagtgattgttctgttgacttaggtatttccaaaagcactgaagatctctcccctcagaaaagtggtccagttggatctgttgtgaaatctcatagcataactaatatggagattggagggctaaaaatctatgatattcttagtgataatggacctcagcagccaagtacaaccgttaaaatcacatctgctgttgatggaaaaaatatagtcaggagcaagtctgccacactgttgtatgatcaaccattgcaggtatttactggttcttcctcatcttctgatttaatatcaggaacaaaggcaattttcaagtttgattcaaatcataatcccgaagagccaaatataataagaggccccacaagtggcccacaatctgcacctcaaatatagtggtcctccacagtataatatccaatacagtagcagtgctgcagtcaaagacactttgtggcactccaaacaaaatccccaaatagaccatgccagttttcctcctcagctccttcctagatcagagagcacagaaaatcaaagttatgctaaacattctgccaatatgaatttctctaatcataacaatgttcgagctaatactgcataccatttacatcagagacttggcccagcaagacatggggaaatgtgggccatctcaccaaacgaccgacttattcctgcagtaactcgaagtacaatccagcgacaaagtagtgtgtcctccacagcctctgtaaatcttggtgatccaggctctacaaggcgggctcagattcctgaaggagattatttatcatacagagagttccactcagcgggaagaactcctccaatgatgccaggatcacagagacccctttctgcacgaacatacagcatagatggtccaaatgcatcaagacctcagagtgctcgaccctctattaatgaaataccagagagaactatgtcagttagtgatttcaattattcacggactagtccttcaaaaagaccaaatgcaagggttggttctgagcattctttattagatcctccaggaaaaagtaaagttcctcgtgactggagagaacaagtacttcgacatattgaagccaaaaagttagaaaaggaagggtatagggtggttgatcccgtgatggctggttaa

SEQ ID NO: 118845 - DNA, 2910 bp, Homo sapiens
ctagtaccatgctgttttggttactgtagccttgcagtatagttggaagtcaggtagtgtgatgcctccagctttgttcttttggcttaggattgacttggcggtgtgggctcttttttggttccatatgaactttaaagtagttttttccaattctgtgaagaaagtcattggtagcttgatggggatggcattgaatctataaattaccttgggcagtatggccattttcacgatattgattcttcctacccatgagcatggaatgtgtttccatttctttgtatcctcttttatttcattgagcagtggtttgtagttctccttgaagaggtccttcacatcctttgtaagttggattcctaggtattttattctctttgaagcaattgtgaatgggagttcactcatgatttggctctctgtttgtctgttgttggtgtgtaagaatgcgtgtgatttttgtacattgattttgtatcctgagactttgctgaagttgcttatcagcttaaggagattttgggctgagacaatggagttttctagatatacaatcatgtcatctgcaaacagggacaatatgacttccttttttcctaattgaatatgctttatttctttctcctgcctgattgccctggccagaacttccaacactatgttgaataggagtggtgagagagggcatccctgtcttgtgcccattttcaaagggaatgcttccagtttttgcccattcagtatgatattggctgtgggtttgtcatagatagctcttattattttgagatacatcctatcaatacctaatttattgagagtttttagcatgaagcgttgttgaattttgtcaaaggccttttctgcatctattgagataatcacgtggtttttgtctttggttctgtttatatgctggattacatttattgattggcatatgttgaaccagccttgcatcccagggatgaagcccacttgatcatggtggataagctttttgatgtgctgctggatttggtttgccagtattttattgaggatttttgcatcaatgttcatcaaggatattggtctaaaattatcttttgtggttgtgtctctgccagcctttggtatcaggatgatgctggcctcatcaaatgaattagggtggattccctctttttcttttgattggaatagtttcagaaggaatggtaccagctcctccttgtacctctggtagaattcagctgtgaatccatctggtcctggactttttttggttggtaagctattgattattgccacaatttcagagcctgttattggtctattcaacttcttccggttgttcctttccatgtttagtgcttcctacaggagctcttatagggcagacctggtggtgacaaaaatctctcagcatttgcttgtctgtaaagtattttatttctccttcacttatgaagcttagtttggctggatatgaaattccggcttgaaaattcttttctttaagaatgttgaatattggccccccactctcttctggcttgtagagtttctgctgagagatcagctgttagtccgatgggcttccctttgtgggtaacccaacctttctctctggctgcccttaacattttttccttcattttaactttggtgaatctgacaattatgtgtcttggaattgctcttctcgaggagtatcgttgtggcgttctctgaatttccctgaatttgagtattggcctgccttgctagattggggaagttctcctggataatatcctgcagagtgttttccatcttggttccattctccccgtcactttcatgtaccgcaatcggatgtagatttggtcttttcagatagtcccatatttcttggaggctttgttcgtttctttttattcttttttctctaaacttctcttctcgcttcatttcattcttttcgtcttccatcgctgataccctttcttccagttgatcgaatcagctactgaggcttgtgtattcgtcacgtggttctcgtgccgtggttttcagctccatcaggtcctttaaggactttctctgcattgggttattctagttatccattcgtcttgattttttttcaaagtttttaacttttttgccattggttcgaacttcctcctttagctcggagtagtttgattttctgaagccttcctctctcaactcgtcaaagtcattctccgtccagctttgttccgttgctggtgaggagctgcgttccgtaatctctattattccttcttgtgtgattgagtccattatctgagcaagaaaacaagcctcagggatgaaagctttcagtaagcaaagaagtttaattgtagaaaaggtctgcaaggcagtccaggctgacacaatatgtgatctttcaaactggataaaaagcttctcttcagtgggctcaacaggctctagtgtgtgttgttcccctccctgtgtccatgtgttctcatcgttcagctcccacttgtaagtgagaacatgcagtgtttggttttctgttcctgtgttagtttgctgacgataatgacttccagctccatctatgtctctgcaaaggacacgatcttgttccttcttgtgactgcatagtattccatggtatatatgtaccacattttctttatccagtctgtcactgatgtgcatttggggtgattccatgcctttgctattgtgaatagtgatcagtttttccttataaaatgtggcacaaagtaatcgaacaatcaggctcctgtctttgctttggttcgcaatgaaatcagtgatcatcagggcctgtttgccatgtgatacgctggctcccccttcaccttccaccatgactggaagcttcctgaggccctcatcagaagcagatgctggtaccat

SEQ ID NO: 118846 - DNA, 1701 bp, Homo sapiens
  misc_feature (1)...(1701): n = a,t,c or g
ggaggcggtatgatgagctgcagaattcttctgggcgtgatgggaagcccagggccatggccgtcacccggagcacatcttccacttcctcaggctccaactccaacgtccttgttccagtgagctggaaaaggccccagtattctcagaagagaacnaaagagaagttggtacatgtcctttctctgtgtggccaagaagtaggattgagcaaaaatccatcagtgattttttcatcgtgtggggatctggatctgcttgagcaccagacaagcttggtatcttctgaggacggtgcccgagagcaggagaacatggatgacacaaacagcgagcagcagtttagagtcttcagagacttcgacttcctagatgtggagctggaggatggagaggaacttcagggtgagagtatggacaatttcaactggggagtgcgcagacgttctctggacagcctggataagtgtgatatgcagattctggaggagcgccaactgtcaggaagcactcctagcctgaataaaatgcaccatgaggacttcgatgaatcatccgaggaggaggacctcacagccagccagatcctggagcactcagacctaatcatgactctctccccctctgaagagacgaatcccatggagctgctcaccacagcctgtgactcgacccctncagaacctcattcctttaacaccagaatgtccagctttgatgcttccttgcctgatatgaataatctgcagatttctgagggttcaaaggcctgaagctgttcgtgaggaggaggacaccaccgtgcatgaggatgatctttctagttccatcaatgaactcccagcagcttttgaatgcagcgacagctttagcctggacatgactgagggggaagaaaaaggcaatcgggcactggaccagtttaccctggcgagctttggagaaggtgacaggggagtctctccccctccctcgcccttcttctcagccatccttgccgcctttcagcccgcagcctgtgacgatgccgaggaggcctggcgcagccacatcaaccagcttatgtgtgactcagatggctcctgtgctgtgtatacatttcatgtgttctcctccttgtttaagaatattcagaaaaggttctgcttcctaacctgtgatgcagccagttaccttggagataacctccggggaatcggatccaaatttgtcagctcttcccagatgctcacctcctgctctgctggacaagctcaagttcagtgtgttagaactgcaagaatatttggatacctacaacaacaggaaagaggccacactctcttggcttgcaaattgtaaggcaacatttgcagggggatcaagagatggagtaattacctgtcaaccaggggactccgaagaaaaggtaataaaagcctgttagaatgggtctcttgtgtgctctaacattgtgtattagttttggtctacccaagaagcctggaacttgagaaaagaagaggcggaatgagtcaccccaaacatttacatgaaaccaacagagtaagacagaatgccttccagcatgactgtgtgttgatgggatttgtggggaggtttcttcgttttggaaaagtagaggtataaaataaccttttttgctggatactgtctaactatactaataatttcctaataaatttattcttaattcagaaa

SEQ ID NO: 118847 - DNA, 614 bp, Homo sapiens
tctgtatttaagattccaaatcaggcttccattctggagcaccagttgagagaagttgcatgcagacagcccctcgcaagctcttcagggcactatgctggtcggtccttccagatattccgggccctcaagcaacctctttgcaccaaaaatggtccagatagactctttttaaggatcttggctgctttttactagaaggttgcttttatgagcatatttatactgctgaaggatgagtgttaattttaattaactttgccgttttgtagagaaaactattcacaagataaattccaagtcttttcacctgtcaggcatgcatattttaatatctgtttggatagtcagaagtagaatcataaaggtaaaatatgagttgttactttgtttcttcgatgtcatattttatgtgtaatatatatgtaaagggccattcttaagttctctccttaaacttaatgctgtcaagtgttagatgtgtgcatgtgaacttgttgcactgcagaaacatattcagagtttatctatgtaacttattcactctgtaaatacatttaaagtttttgtgatgtaagcttaattgatattctgttcagaactttctttagact

SEQ ID NO: 118848 - DNA, 2568 bp, Homo sapiens
gatccaatttctccctacacgggctggttgctgactattacagagaccaagcagccgcagcccttaccgatgccttgtactggaggatgctgggcccccctggttgactatctcccggagaccatcactccccgggggccactccacaggtgcaatattgctgtaatttttatgactgaaatggtggtggatcacagtgtacgagaagactgggcgcttcatctaccattattacttcatgctgtcttcttaggtttagaccactaccggcctgaagtctttgaacacagcaaaaaactgcttcttcacctcttgattgccctctcttgcaacagcaatttccattccattgcttccgtgctcctgcagacccgagagatgggtgaagctaagactctaaccgtgcagccagcctaccaacctgaatatctctatacaggtggctttgacttcctgagagaggaccagtcatccccggtgcctgactcagggcttagttcaagctccacctcctctagcatcagtctgggaggcagcagtggaaacctcccacagatgacccaggaggtagaagatgtggacacagctgctgaaacagatgagaaggcaaacaagctcattgagtttctcacgaccagggcatttggtccactttggtgccatgaagacatcacacctaaaaatcaaaattcaaagagtgctgaacagctcactaattttctacgtcacgttgtatctgtatttaaagattccaaatcaggcttccatctggagcaccagttgagtgaagttgcattgcagacagccctcgcaagctcttcaaggcactatgctggtcggtccttccagatattccgggccctcaagcaacctctgtcagcacatgccttatctgaccttctctcaagattggtggaggtgataggagaacatggagatgagattcagggttatgtaatggaagcgctcctaaccttggaggcggctgtggataacttgtctgactgcttgaagaacagtgacctcctaactgtattgtcccggtcttcctcaccagatttaagctccagcagtaaactaacagcaagcagaaagagcacaggacaactaaacatgaacccgggaaccaccagcggcaacaccgcaactgccgaacggagccggcatcaacgaagcttctctgtgcccaagaagtttggtgtcatcgaccgatcctctgacccacctcgaagtgccacactggacagaattcaggcttgtacccaacaaggcctctcctcaaaaaccagaagctcatcctccttgaaggacagtctcacggacccatcccacataaaccatcccaccaacctgctggccaccatattctgggtcacagtggccttgatggagtctgattttgagtttgaatacttaatggccttaaggctgttgagcagactactggcacatatgccactcgataaggctgagaaccgagaaaagcttgagaaactccaggcacagctgaagtgggccgacttctccgggctgcagcagctgctgctgaaaggattcacatccctcaccaccacagacctgaccctgcagctcttcagtctgctgacaccagtgtccaaaatatccatggtggatgcatcccacgctattggttttccactgaatgtcttgtgtctcctgcctcagctgattcagcattttgaaaatcccaatcagttctgtaaggatatagccgaaaggattgctcaggtttgtttagaagagaagaaccccaaactttcaaatcttgcacatgtcatgactctttataaaacgcacagctacacgagggactgtgccacgtgggtcaatgtggtctgtcgataccttcatgaagcatatgctgacattaccttgaatatggttacctacctggcagagctgctggagaagggcctccctagtgtgcagcagcccctgctccaggtgatctacagtcttctcagctacatggacctttctgtcgttcctgtcaaacagttcaatgtggaagttctgaagacaattgaaaaatatgtgcaacacagtgacctctcaaaaatagaaatacatcgagtgtggactagtgcttccaaggaattacctgggaaaaccctggacttccacttcgatatttcggagactccaatcatcgggaggcggtatgatgagctgcagaattcttctgggcgtgatgggaagcccagggccatggccgtcacccggagcacatcttccacttcctcaggctccaactccaacgtccttgttccagtgagctggaaaaggccccagtattctcagaagagaacaaaagagaagttggtacatgtcctttctctgtgtggccaagaagtaggattgagcaaaaatccatcagtgattttttcatcgtgtggggatctggatctgcttgagcaccagacaagcttggtatcttctgaggacggtgcccgagagcaggagaacatggatgacacaaacagcgagcagcagtttagagtcttcagagacttcgacttcctagatgtggagctggaggatggagag

SEQ ID NO: 118849 - DNA, 10700 bp, Homo sapiens
agggggcggcgctcccggcccatcccttagccccgcggcggccgtgtgggccggaggctgcctgcaccgcgtcagggaggccggcctagaaaccctccctcccagaagaaagccgatcccagttcaggtggggtcttcctcggttgcgtacctggctggagccgagctggtgggcggccggcagccggcgtttctggtgatgacagccccgaaatgaaagcagcgcggccgccgcctccgagggctgcagggagatcagcgtccagcaaataagaagcaagtcctggacccggaggaggaggagcggccgagcatctctctctgctccgccgtgtcctttagatgagcactcccggccggagccggaggtggatccgcagagctgcctctgggcgcctgaccccgcgctgacatcacaacctgtgacaggcgcatcacgcccggtacctgctcccggccgctgcccgtcctcccagcctctttgtatgccgcagacatggccagccagcaggattcgggcttctttgagatcagtatcaaatatttactgaaatcctggagtaatacttctcccgttggcaacggttacatcaagcctccggttccacctgcttctggcacgcacagggagaaagggccgccaaccatgctacccatcaatgtggacccagacagtaaaccaggagaatatgtcctcaaaagtttatttgtcaacttcaccactcaggctgaacgcaagattcgtatcattatggcagagcccctggaaaagccattgacgaaatctctgcaacgtggagaagacccccaatttgatcaggtcatcagctcaatgagctccctttctgagtactgcctgccttccattctacgtacattatttgactggtataaaaggcaaaatggcattgaggatgaatcacatgaatacagaccaagaacaagcaataaatcaaaaagcgatgaacaacagcgagattatttaatggaaagacgggacctcgccattgattttattttttctttagtattaatagaagttttgaaacagattccacttcatcctgtaatagacagtttaatacatgatgttattaacttggctttcaagcactttaaatacaaagaagggtaccttggtcccaacactggcaatatgcatattgtggcagacctgtatgcagaagtcattggagtgttggcacaagccaaattccctgctgtaaagaagaaatttatggcggagctaaaagaattacggcacaaagagcagaacccatatgtggttcaaagcattatcagcttaataatgggcatgaaattctttcgaattaagatgtatccagtggaggattttgaggcctctcttcagtttatgcaggaatgtgcacattacttcctcgaggtcaaagacaaagatatcaagcatgccttggctgggctttttgttgaaatacttgttccagttgctgctgctgttaaaaatgaagtaaatgttccctgccttagaaattttgtggaaagcctgtatgacaccacgctggaactttcttctcgaaagaagcattccttggccttgtaccccctggtgacctgtttgctctgtgtcagtcagaagcagctgttcctgaacaggtggcacattttcctcaacaactgcttgtccaaccttaaaaacaaagatcccaagatggctcgagttgcactggaatctctctacagattactttgggtttacatgattcgaattaaatgtgaaagcaacacagctactcagagccgacttataaccatcatcacaacacttttccccaaagggtcccgcggtgtggtaccaagggacatgcctctgaacatctttgtgaaaatcatccagttcattgcccaggaacgtttagattttgcaatgaaagaaatcattttcgattttctttgtgtgggaaaaccagcaaaagcattcagtctcaacccagagagaatgaacattggtttacgggcattcttggtcatagctgatagcttgcagcagaaagatggggaacctcccatgccggttacaggagccgttcttccttcaggaaacacgttaagagtaaagaaaacatatttgagtaaaacactaactgaagaggaagccaaaatgataggcatgtccttatattactctcaagtacgaaaagctgtagacaacattttaaggcaccttgataaagaagtaggaaggtgtatgatgctgactaatgtacagatgttaaacaaagaaccggaagacatgatcacgggtgagagaaagccaaaaatagatcttttcaggacctgtgttgctgctattcctcgactgcttcctgatgggatgtcaaaacttgaacttattgacttactggctaggctctctattcatatggatgatgaattgcgacatattgcacaaaattctcttcagggtttacttgttgacttctcagattggagggaagatgtactatttggctttaccaacttcctgctccgggaagtaaatgatatgcatcacacactccttgattcgtccctgaagttgctgctgcagctgctcacccagtggaaactagtcatccagacacaaggaaaagtctatgaacaagccaacaaaatcagaaattcagagctcatcgcaaatggctccagtcacagaattcagtcggaacgaggtccccactgcagtgtactccacgctgtagaaggttttgctctggttttactctgcagtttccaggtggccacacgcaaactgtccgttttaatactcaaggaaattcgagcgttgtttattgccctggggcagcctgaggatgacgacaggccgatgattgatgtcatggatcagctaagttcttccattctagaaagttttattcatgtagcagtttcggattcagcaacattaccactcacccacaatgtggatctgcagtggttggtggaatggaacgcagtcctggtcaatagccattatgatgtgaaaagcccttcccatgtctggatatttgcacagtctgtcaaagacccctgggtcctctgcctcttcagcttcctccggcaggagaacttacccaagcactgccccacagccctcagctatgcctggccttatgccttcactcggctccagtcggtgatgcctctggtggacccaaatagcccaattaatgccaagaaaaccagcactgccggcagcggagacaactatgttactttgtggagaaattacctaattctttgttttggagttgcaaaacccagtattatgagcccaggacacttaagagcttccactccagaaataatggcgaccacacctgatggtacagtgagctacgataacaaggccataggcaccccatcggtgggagttctgttaaagcagttggtgcctttgatgagactagagagcattgagatcacagagtccttagttttaggatttggaagaacaaattcccttgttttcagagaattggtagaagaacttcatccattaatgaaagaagctctggaaagaagaccagagaacaagaaacgccgagaacggcgagacttgttaaggctacaactacttcgaatttttgaacttttggctgatgctggtgtaataagtgacagcacaaatggagccctagagcgggatactttagccctgggagctttgttcttagaatatgtggacttgacccgcatgctcctagaagctgaaaatgacaaagaagttgaaattcttaaagatatccgggcacattttagtgcaatggtggccaacttgattcagtgtgttccagttcaccaccgaagatttctcttcccccagcaaagtctgaggcaccaccttttcatcttattcagccagtgggcaggacccttcagcattatgttcactcctctggatcgttacagtgacagaaatcatcagattacaagatatcagtattgtgcattaaaagcaatgtcagcagtactgtgctgtggccctgtctttgacaatgtgggcctttccccagatggctacctatataaatggcttgacaacattctggcttgtcaagatttacgagttcatcaacttggctgcgaagttgttgtcttgctactggaacttaatcctgaccaaataaatctttttaactgggcaattgaccgatgctacacaggttcctaccaacttgcatctggctgcttcaaagccatagcaactgtgtgtggaagcaggaactatcccttcgacatagtgacattgttaaaccttgttctattcaaggcctctgacaccaacagagagatttatgaaatctccatgcagctcatgcagatccttgaagcaaagctttttgtatactcaaagaaagtcgctgagcaaagaccgggaagtattctctatggaacacacggcccgctgccacccctctacagcgtgtcactcgccctcttgtcatgtgagctggccaggatgtaccctgagctcacactccccctcttctcagaggtaaaccagcgattcgccacaacacaccccaacgggcgccagatcatgcttacctacctgctgccctggctgcacaacatcgagctggtggacagcagactcctcctcccggggtcgagccccagcagcccagaggacgaagtcaaggaccgggaaggtgacgtgactgcttctcacgggctgagaggaaatggctggggctctccagaagccacgtcactggtcctgaacaacctcatgtacatgacggccaagtatggagatgaagttcctgggacagaaatggaaaatgcttggaatgctttagccaacaatgagaaatggagcaacaacctgaggatcaccttgcagttcctgattagcctctgtggggtcagcagcgacacagttctcctaccctatattaaaaaagtggcaatatacttgtgccgtaacaacaccattcaaaccatggaagagcttctctttgagctgcagcagacagagcccgtgaaccccatcgtccagcattgtgacaacccgcccttctaccgcttcacggccagtagcaaggcttccgcagcagcctcaggaaccacctctagcagcaatacagtggttgctggccaggaaaatttcccagatgctgaggagaacaagatattgaaagaatctgatgaaaggtttagtaatgtcatcagagcccacactcgcctcgagtcaagatacagcaatagctctggaggatcctacgatgaagataaaaatgatccaatttctccctacacgggctggttgctgactattacagagaccaagcagccgcagcccttaccgatgccttgtactggaggatgctgggcccccctggttgactatctcccggagaccatcactccccgggggccactccacaggtgcaatattgctgtaatttttatgactgaaatggtggtggatcacagtgtacgagaagactgggcgcttcatctaccattattacttcatgctgtcttcttaggtttagaccactaccggcctgaagtctttgaacacagcaaaaaactgcttcttcacctcttgattgccctctcttgcaacagcaatttccattccattgcttccgtgctcctgcagacccgagagatgggtgaagctaagactctaaccgtgcagccagcctaccaacctgaatatctctatacaggtggctttgacttcctgagagaggaccagtcatccccggtgcctgactcagggcttagttcaagctccacctcctctagcatcagtctgggaggcagcagtggaaacctcccacagatgacccaggaggtagaagatgtggacacagctgctgaaacagatgagaaggcaaacaagctcattgagtttctcacgaccagggcatttggtccactttggtgccatgaagacatcacacctaaaaatcaaaattcaaagagtgctgaacagctcactaattttctacgtcacgttgtatctgtatttaaagattccaaatcaggcttccatctggagcaccagttgagtgaagttgcattgcagacagccctcgcaagctcttcaaggcactatgctggtcggtccttccagatattccgggccctcaagcaacctctgtcagcacatgccttatctgaccttctctcaagattggtggaggtgataggagaacatggagatgagattcagggttatgtaatggaagcgctcctaaccttggaggcggctgtggataacttgtctgactgcttgaagaacagtgacctcctaactgtattgtcccgctcttcctcaccagatttaagctccagcagtaaactaacagcaagcagaaagagcacaggacaactaaacatgaacccgggaaccaccagcggcaacaccgcaactgccgaacggagccggcatcaacgaagcttctctgtgcccaagaagtttggtgtcatcgaccgatcctctgacccacctcgaagtgccacactggacagaattcaggcttgtacccaacaaggcctctcctcaaaaaccagaagctcatcctccttgaaggacagtctcacggacccatcccacataaaccatcccaccaacctgctggccaccatattctgggtcacagtggccttgatggagtctgattttgagtttgaatacttaatggccttaaggctgttgagcagactactggcacatatgccactcgataaggctgagaaccgagaaaagcttgagaaactccaggcacagctgaagtgggccgacttctccgggctgcagcagctgctgctgaaaggattcacatccctcaccaccacagacctgaccctgcagctcttcagtctgctgacaccagtgtccaaaatatccatggtggatgcatcccacgctattgggtttccactgaatgtcttgtgtctcctgcctcagctgattcagcattttgaaaatcccaatcagttctgtaaggatatagccgaaaggattgctcaggtttgtttagaagagaagaaccccaaactttcaaatcttgcacatgtcatgactctttataaaacgcacagctacacgagggactgtgccacgtgggtcaatgtggtctgtcgataccttcatgaagcatatgctgacattaccttgaatatggttacctacctggcagagctgctggagaagggcctccctagtgtgcagcagcccctgctccaggtgatctacagtcttctcagctacatggacctttctgtcgttcctgtcaaccagttcaatgtggaagttctgaagacaattgaaaaatatgtgcaaagtgttcactggagagaagctctgaatatcttgaagctggtagtttctcggtcagccagccttgttttaccttcataccagcacagtgacctctcaaaaatagaaatacatcgagtgtggactagtgcttccaaggaattacctgggaaaaccctggacttccacttcgatatttcggagactccaatcatcgggaggcggtatgatgagctgcagaattcttctgggcgtgatgggaagcccagggccatggccgtcacccggagcacatcttccacttcctcaggctccaactccaacgtccttgttccagtgagctggaaaaggccccagtattctcagaagagaacaaaagagaagttggtacatgtcctttctctgtgtggccaagaagtaggattgaccaaaaatccatcagtgattttttcatcgtgtggggatctggatctgcttgagcaccagacaagcttggtatcttctgaggacggtgcccgagagcaggagaacatggatgacacaaacagcgagcagcagtttagagtcttcagagacttcgacttcctagatgtggagctggaggatggagaggaacttcagggtgagagtatggacaatttcaactggggagtgcgcagacgttctctggacagcctggataagtgtgatatgcagattctggaggagcgccaactgtcaggaagcactcctagcctgaataaaatgcaccatgaggactccgatgaatcatccgaggaggaggacctcacagccagccagatcctggagcactcagacctaatcatgactctctccccctctgaagagacgaatcccatggagctgctcaccacagcctgtgactcgacccctgcagaacctcattcctttaacaccagaatgtccagctttgatgcttccttgcctgatatgaataatctgcagatttctgagggttcaaaggctgaagctgttcgtgaggaggaggacaccaccgtgcatgaggatgatctttctagttccatcaatgaactcccagcagcttttgaatgcagcgacagctttagcctggacatgactgagggggaagaaaaaggcaatcgggcactggaccagtttaccctggcgagctttggagaaggtgacaggggagtctctccccctccctcgcccttcttctcagccatccttgccgcctttcagcccgcagcctgtgacgatgccgaggaggcctggcgcagccacatcaaccagcttatgtgtgactcagatggctcctgtgctgtgtatacatttcatgtgttctcctccttgtttaagaatattcagaaaaggttctgcttcctaacctgtgatgcagccagttaccttggagataacctccggggaatcggatccaaatttgtcagctcttcccagatgctcacctcctgctctgaatgtcctacactttttgtggatgccgagactctcctttcatgtggacttctggacaagctcaagttcagtgtgttagaactgcaagaatatttggatacctacaacaacaggaaagaggccacactctcttggcttgcaaattgtaaggcaacatttgcagggggatcaagagatggagtaattacctgtcaaccaggggactccgaagaaaagcaattggaactgtgtcagagattatataagctacacttccagctgctattgctttttcagtcctactgtaagctcatcggccaggtgcacgaagttagctccatgccagagctgctgaatatgtccagggaactgagtgacctaaagaaacacctgaaggaagccagtgcagtcattgcagctgaccctctctattcagacggcgcgtggtccgagcccaccttcacgtccactgaagcagccatccagtccatgctggagtgcctgaagaacaacgaactcggcaaagctttgcggcagatcagggagtgcagaagtctgtggcccaatgacatctttggaagcagttctgatgatgaggtccagacactactgaatatttatttccgtcaccaaactctgggacagacgggtacttatgccctggtggggtctaaccagagcctgaccgagatctgcaccaagctgatggagctgaacatggagatccgggacatgatccgcagggcccagagttaccgagtcctcactacttttcttccagactccagtgtttctggcactagtctctgacaggagcctcctgtccccactgggttccaaactggcagtgctgccatgctggggcaacgtcattcagtgtcttctcggccttcaaaaggcttggacagactgttctccctcttgttacctgtagggctttttctaaagaggatggcagaacttccaacgtgtagcaatactataagaaccaaggtagcttagaacgtcctggacagactccactcatcatgctgtgtggcacaaatgtgttacatttgaccgagcatatgcaactcgctactgaagaagtgacttccgttgcataccaaagccgactacactgaacagtaccttcctttctagaaacaattttagattggcaaaagtgcaatgttttcttcactcaaaaaattttatattctcaaacatgtatattctttccctgtcttgttccattttcttttcttttttcttttttctttttcctttctttcgtgggctgagaaaggggcaggcaaaatgaagctggccactgaaaactgtaagatggtcaaaagctgacagcctgtgtatgtgaaaagggaattgtaaatggactgcaatgtaatgtacactgtaatttgaatacaattactgtatctaaaaggagctgctatgaagtacctttcttatgttgctaggctactgtttctgaaagccctggatctctttgcaccaaaaatggtccagatagactctttttaaggatcttggctgctttttactagaaggttgcttttatgagcatatttatactgctgaaggatgagtgttaattttaattaactttgccgttttgtagagaaaactattcacaagataaattccaagtcttttcacctgtcaggcatgcatattttaatatctgtttggatagtcagaagtagaatcataaaggtaaaatatgagttgttactttgtttcttcgatgtcatattttatgtgtaatatatatgtaaagggccattcttaagttctctccttaaacttaatgctgtcaagtgttagatgtgtgcatgtgaacttgttgcactgcagaaacatattcagagtttatctatgtaacttattcactctgtaaatacatttaaagtttttgtgatgtaagcttaattgatattctgttcagaactttctttagact

SEQ ID NO: 118850 - DNA, 6107 bp, Homo sapiens
gggtgagagaaagccaaaaatagatcttttcaggacctgtgttgctgctattcctcgactgcttcctgatgggatgtcaaaacttgaacttattgacttactggctaggctctctattcatatggatgatgaattgcgacatattgcacaaaattctcttcagggtttacttgttgacttctcagattggagggaagatgtactatttggctttaccaacttcctgctccgggaagtaaatgatatgcatcacacactccttgattcgtccctgaagttgctgctgcagctgctcacccagtggaaactagtcatccagacacaaggaaaagtctatgaacaagccaacaaaatcagaaattcagaggccagggacttagagctggatgtgggtgtggatgtggatgtaggtgtggatgtagatgcagatgtagatgtggatgtggatttgggtgtggatgtggatgtaggtgtggatgtagatgcagatgtagatgtggatgtggatatgggtgtggatgtggatgtagataggatatatggatttggatgtaaatgtggatgtgatagggatgtggatagggttgtggatgtagatgtggatattgatgtggatgtagatgtggatatggatgtgaatattgatgtggatgtgggtttaggtgcaggtgtggatgtagatatggatgtacatattgatatggatatggatgtggatataggtagtgataacattttgcagagcgcattgaggaggagtgttgtcagaggagaaccagggtggtgggaacttggcattggcaatgagcagatggagaaaggggtctggctggagaagagtgtaactgagagtctaaagactgtggaggctcatggcagtatactcatcgcaaatggctccagtcacagaattcagtcggaacgaggtccccactgcagtgtactccacgctgtagaaggttttgctctggttttactctgcagtttccaggtggccacacgcaaactgtccgttttaatactcaaggaaattcgagcgttgtttattgccctggggcagcctgaggatgacgacaggccgatgattgatgtcatggatcagctaagttcttccattctagaaagttttattcatgtagcagtttcggattcagcaacattaccactcacccacaatgtggatctgcagtggttggtggaatggaacgcagtcctggtcaatagccattatgatgtgaaaagcccttcccatgtctggatatttgcacagtctgtcaaagacccctgggtcctctgcctcttcagcttcctccggcaggagaacttacccaagcactgccccacagccctcagctatgcctggccttatgccttcactcggctccagtcggtgatgcctctggtggacccaaaagaattggtagaagaacttcatccattaatgaaagaagctctggaaagaagaccagagaacaagaaacgccgagaacggcgagacttgttaaggctacaactacttcgaatttttgaacttttggctgatgctggtgtaataagtgacagcacaaatggagccctagagcgggatactttagccctgggagctttgttcttagaatatgtggacttgacccgcatgctcctagaagctgaaaatgacaaagaagttgaaattcttaaagatatccgggcacattttagtgcaatggtggccaacttgattcagtgtgttccaggtacggtgatccgttacaagaaattaccattcatgcttggaagcccattcgtgttctttattacggtgctttcgtctttaaccctactggcctttatgcaggcaatgtcagcagtactgtgctgtggccctgtctttgacaatgtgggcctttccccagatggctacctatataaatggcttgacaacattctggcttgtcaagatttacgagttcatcaacttggctgcgaagttgttgtcttgctactggaacttaatcctgaccaaataaatctttttaactgggcaattgaccgatgctacacaggttcctaccaacttgcatctggctgcttcaaagccatagcaactgtgtgtggaagcagtgttgttgcttatgaatttaatagctcattcttcaacaacaaaataaatgctctgattacaaggtcaagtgcatggccctgcctaatccttgaagcaaagctttttgtatactcaaagaaagtcgctgagcaaagaccgggaagtattctctatggaacacacggcccgctgccacccctctacagcgtgtcactcgccctcttgtcatgtgagctggccaggatgtaccctgagctcacactccccctcttctcagtgctatacactttcctgcacagcgcaccagatgtggagcaacaagcttgcagacaagccttggttttatcattctgtggccttggggagctcctaggtaagccagcgattccccacaacacaccccaacgggcgccagatcatgcttacctacctgctgccctggctgcacaacatcgagctggtggacagcaggctcctcctcccgggtcgagccccagcagcccagaggacgaagtcaaggaccgggaaggtgacgtgactgcttctcacgggctgagaggaaatggctggggctctccagaagccacgtcactggtcctgaacaacctcatgtacatgacggccaagtatggagatgaagttcctgggccagaaatggaaaatgcttggaatgctttagccaacaatgagaaatggagcaacaacctgaggatcaccttgcagttcctgattagcctctgtggggtcagcagcgacacagttctcctaccctatattaaaaaagtggcaatatacttgtgccgtaacaacaccattcaaaccatggaagagcttctctttgagctgcagcagacagaacccgtgaaccccatcgtccagcattgtgacaacccgcccttctaccgcttcacggccagtagcaaggcttccgcagcagcctcaggaaccacctctagcagcaatacagtggttgctggccaggaaaatttcccagatgctgaggagaacaagatattgaaagaatctgatgaaaggtttagtaatgtcatcagagcccacactcgcctcgagtcaagatacagcaatagctctggaggatcctacgatgaagataaaaatgatccaatttctccctacacgggctggttgctgactattacagagaccaagcagccgcagcccttaccgatgccttgtactggaggatgctgggcccccctggttgactatctcccggagaccatcactccccgggggccactccacagaagttgcattaatttcattatttcattgattaggtgcaatattgctgtaatttttatgactgaaatggtggtggatcacagtgtacgagaagactgggcgcttcatctaccattattacttcatgctgtcttcttaggtttagaccactaccggcctgaagtctttgaacacagcaaaaaactgcttcttcacctcttgattgccctctcttgcaacagcaatttccattccattgcttccgtgctcctgcagacccgagagatgggtgaagctaagactctaaccgtgcagccagcctaccaacctgaatatctctatacaggtggctttgacttcctgagagaggaccagtcatccccggtgcctgactcagggcttagttcaagctccacctcctctagcatcagtctgggaggcagcagtggaaacctcccacagatgacccaggaggtagaagatgtggacacagctgctgaaacagatgagaaggcaaacaagctcattgagtttctcacgaccagggcatttggtccactttggtgccatgaagacatcacacctaaaaatcaaaattcaaagagtgctgaacagctcactaattttctacgtcacgttgtatctgtatttaaagattccaaatcaggcttccatctggagcaccagttgagtgaagttgcattgcagacagccctcgcaagctcttcaaggcactatgctggtcggtccttccagatattccgggccctcaagcaacctctgtcagcacatgccttatctgaccttctctcaagattggtggaggtgataggagaacatggagatgagattcagggttatgtaatggaagcgctcctaaccttggaggcggctgtggataacttgtctgactgcttgaagaacagtgacctcctaactgtattgtcccgctcttcctcaccagatttaagctccagcagtaaactaacagcaagcagaaagagcacaggacaactaaacatgaacccgggaaccaccagcggcaacaccgcaactgccgaacggagccggcatcaacgaagcttctctgtgcccaagaagtttggtgtcatcgaccgatcctctgacccacctcgaagtgccacactggacagaattcaggcttgtacccaacaaggcctctcctcaaaaaccagaagctcatcctccttgaaggacagtctcacggacccatcccacataaaccatcccaccaacctgctggccaccatattctgggtcacagtggccttgatggagtctgattttgagtttgaatacttaatggccttaaggctgttgagcagactactggcacatatgccactcgataaggctgagaaccgagaaaagcttgagaaactccaggcacagctgaagtgggccgacttctccgggctgcagcagctgctgctgaaaggattcacatccctcaccaccacagacctgaccctgcagctcttcagtctgctgacaccagtgtccaaaatatccatggtggatgcatcccacgctattggtaaagccagcctcgttcaccctgtctcaattctgatgctgattcagcattttgaaaatcccaatcagttctgtaaggatatagccgaaaggattgctcaggtttgtttagaagagaagaaccccaaactttcaaatcttgcacatgtcatgactctttataaaacgcacagctacacgagggactgtgccacgtgggtcaatgtggtctgtcgataccttcatgaagcatatgctgacattaccttgaatatggttacctacctggcagagctgctggagaagggcctccctagtgtgcagcagcccctgctccaggtgatctacagtcttctcagctacatggacctttctgtcgttcctgtcaaacagttcaatgtggaagttctgaagacaattgaaaaatatgtgcaaagtgttcactggagagaagctctgaatatcttgaagctggtagtttctcggtcagccagccttgttttaccttcataccagcacagtgacctctcaaaaatagaaatacatcgagtgtggactagtgcttccaaggaattacctgggaaaaccctggacttccacttcgatatttcggagactccaatcatcgggaggcggtatgatgagctgcagaattcttctgggcgtgatggttaagttcagggccatggccgtcacccggagcacatcttccacttcctcaggctccaactccaacgtccttgttccagtgagctggaaaaggccccagtattctcagaagagaacaaaagagaaggtggcacatgtcctttctctgtgtggccaagaagtaggattgagcaaaaatccatcagtgattttttcatcgtgtggggatctggatctgcttgagcaccagacaagcttggtatcttctgaggacggtgcccgagagcaggagaacatggatgacacaaacagcgagcagcagtttagagtcttcagagactttgacttcctagatgcggagctggaggatggagagaactggaaacaaaatgcaatgcacacaagagagctctttgctctgcttagctcggtggctggtgttctagacactggagcagccaaattcaagtctcagtgggcaaatgcagattcatttattttggatgataatcatggagagaatcatgtcctcggaataaagaaggtgttcttcaccaattctttccctggaaaacaagttgagcagatccggtcc

SEQ ID NO: 118851 - DNA, 867 bp, Homo sapiens
agatgcttcctggtcacttgttctgcttggccaaagcaggcaaagaggagcaggaggagaaaggtcagatcatcaccagaaaaacaataacccctcagaacattccaggacctggtgctcacatcacagccactcacagaggccgatgcaccgttgccaccaagttttctgggggtctgtgcaaagaacctaaccgcctgacctggtatgtccgcccctgaaaggagcgcacggaggccgtgtcccagcagccgcgtcccttcatttcccgcggcggggcagcctccaatcggcggggcgctacatggcgccgggtcccgggggcttgcacggacgcgtgcacagctcggtgggccgcccggcggagagctaaggggcacgcgggaaatggggatggccaggggcctgacggtgattccaggaaatcggggtcacctctgagaccctctcatcttctgaccccgctgccgtggctggtgcacctgtgtctggccacctgcagacacctggccaccatgcaggaagaaggcaacaggcagggccccggggagctgggctcccttagttctgctgccacaggcctgcaggcatctggtcacaaggtatttgcccaggcctttgaacacaactccactgtccagctgcccacaggcataaccagtaagttagcaaagtttcagcacatcatgatggctgtacccgtagaatacagccaggatcccttgactctcaccacctgcatgttgtttctggggcctgctacgccctcgtcttgcctgtggactcttacacaatctccctgcaagtctctctgctcccactctggtccccacagtctctgcacaatataacagctgagagatcctg

SEQ ID NO: 118852 - DNA, 420 bp, Homo sapiens
atggggaagggagtctgggagactggctccaacccaatcatcacacgacagtccaccacccttgtgttggagcatactaacttgcttaaacaacctgattggctttcaacccatgccttcagccactgccctgagaacatgtccaagcttgttgtagacacatgtggctcagttgtcctggccacctcagccaccagccagcaagctccctactcccgcaacaaggctctggccaacagtgttcgtgcagctgaagtatggatggatgaatttaaagagctctactaccatcgcaacccccgtgcccgcttgggcctggcatgcgacgaatgctccatcaaagctggctggtggttagtgtctgaacgtgtgaaggaggaaatcatggaagctgcagaagaagcagtgttgcaacgataa

SEQ ID NO: 118853 - DNA, 1069 bp, Homo sapiens
atgccgcggccgccggtgccggcgaacgcgctgggcgcgcggggcgaggcggtgcggctgcagctgcagggcgaggagctgcggctgcaggagagagagcgtgcgactgcaccagattaacatctacctcagcgaccgcatctcactgcaccgccgcctgcccgtgcgctggaacccgctgtgcaaagagaagaaatatgattatgataatttgcccaggacatctggtaaccaaagcattttataatgaagcctggtcaactctccttcggacagtttacagtgtccttgagacatccccggatatcctgctagaagaagtgatccttgtagatgactacagtgatagagagcacctgaaggagcgcttggccaatgagctttcgggactgcccaaggtgcgcctgatccgcgccaacaagagagagggccctggtgcgagcccggctgctgggggcgtctgcggcgaggggcgatgttctgaccttcctggactgtcactgtgagtgccacgaagggtggctggagccgctgctgcagaggatccatgaagaggagtcggcagtggtgtgcccggtgactgatgtgatcgactggaacaccttcgaatacctggggaactccggggagccccagatcggcggtttcgactggaggctggtgttcacgctggcacacagttcctgagagggagaggatacggatgcaatcccccgtcgatgtcatcaggtctccaacaatggctggtgggctgtttgctgtgagtaagaaatattttgaatatctggggtcttatgatacaggaatggaagtttggggaggagaaaacctcgaattttcctttaggatctggcagtgtggtggggttctggaaacacacccatgttcccatgttggccatgttttccccaagcaagctccctactcccgcaacaaggctctggccaacagtgttcgtgcagctgaagtatggatggatgaatttaaagagctctactaccatcgcaacccccgtgcccgcttgggcctggcatgcgacgaatgctccatcaaagctggctggtggtta

SEQ ID NO: 118854 - DNA, 1152 bp, Homo sapiens
atgcataactctgatggaattgaagtcatgaggcagcagaaagctgaaataggcagagtgggagggttagagggaattcagttgggagtaacagaagtaatagttaacggagccagaatgcttgagtcatataattgcaaagcagagttaggagcaacagggctagtgaattaccagatctccgtcaagtgcagtaaccagttcaagttggaagtgtatcttttgaatgcagaaaacaaggtcgtggacaaccaggctgggacccagggccagctgaaggtgctgggtaccaacctctggtggccgtacctgatgcacgaacaccccgcctacctgtactcgtgggagggcaggccagatggggctcaggctgtcggggcgctcacacctggcactttggctgtcgtaggtgtggctgactgcacagaagtcactggggcctttgacttctacacactccctgtggggctccgcactgtggccgtcaccgagagccagttcctcatcagtgggaaacctttctatttccacggcgtcaacaagcatgaggatgcggacatccaagggaagggcttcaactgtccgctgctggtgaaggacttcaacctgctttgctggcttggcgccaacaccttctgcaccagccactatccctacacggaggagatgctgcagatatgttaccggtatgggattgtggtcatcgatgagtgtcctgctccctcgggccacaccgtgaccctctgtcccttccctcctggcccgctggcaactcttcaacaacgtgtctatgcatcaccatatgtgggtggtggaggaaccggtgctcagagacaagaaccaccccgccatggtgatgtggtccttggccaaagagcctgcgtccttcctggaatctgccggctactccttcaagagcctgacaatggagcaaactgcacgggttctggatctggacactggagaagctgtgttgcagtacagaagcctgccaagaggagcacacaagactcttggaaagaagaggaaaatctcctcttacaatgtcgatctaacatcatgccaactagcaaaggaaaaatgtttaaagggtccaagttcatttttgcagagcagacaggaaaggatgaattcagagctgagagacaataa

SEQ ID NO: 118855 - DNA, 535 bp, Homo sapiens
  misc_feature (1)...(535): n = a,t,c or g
ctgcacctaggcaaagcacgcntgggctccatgagtccggtgggtacttggagaacttactacgtctagctggaggattgtaaatgcaccaatcagcatgctgtgtctagctcaagaactcaagctccatgaggagatgtttcattgtcgagagcagtcatgatggcctgcacgtccacacaatgcaacagagtgaaagagcaggttctgcttctttggtgtagtcctgaagcttcctaagaaacttcacatcaggtgatggataggagcaaccctgtaaaaccagccttagactatttttcaaacaaggctggtgaattaccagatctccgtcaagtgcagtaaccagttcaagttggaagtgtgtcttttgaatgcagaaaacaaagtcgtggacaaccaggctgggacccagggccagctgaaggtgctgggtgccaacctctggtggccgtacctgatgcacgaacaccccgcctacctgtactcgtgggaggatggtgattgctcacaccaaagccttggacccctgcca

SEQ ID NO: 118856 - DNA, 737 bp, Homo sapiens
agatccctgcggaaccgctccggaatttccgggtcgacgatctcgtctgcggtgtgcggccagccatggagcgctctgggcccagcgaagtgacaggctgggacgcatcgggaccggacccgcagcttgtggtcaccatgggcttcacggggttcgggggtcggtaaaaaagctcacacacttgacttggaagcaatgtttgaacaaactcaaagaacagctgtggaaagaagtcacaaaacactggggctggtgaattaccagatctccatcaagtgcagtaaccagttcaagttggaagtgtgtcttttgaatgcagaaaacaaagtcgtggacaaccaggctgggacccagggccagctgaaggtgctgggtgccaacctctggtggccgtacctgatgcacgaacgccctgcctatctgtattcattggaggtgcagctgactgcacagacgtcactggggcctgtgtctgacttctacacactccctgtggggatccgcactgtggctgtcaccaagagccagttcctcatcaatgggaaacctttctatttccacggtgtcaacaagcatgaggatgcggacgtgtgttggggctcctgggtccttgtcggggctgcttctggtcaccctccactttcgccttccctgtgtcctgcaggtgagggcagctcagggcaatgaggcaaatggctccaaatggagagggggctcatggtgtggctctccagggt

SEQ ID NO: 118857 - DNA, 2187 bp, Homo sapiens
atgcaatatgagaagaacctggctgcctttgctagctctgaagacagaggaaggggtccaggatccaaggaagaaaaagtacagaattcaatacgaaagtgctcaattacctgtggcaaaggaatgcagtcccgtgtaatccaatgcatgcataagatcacaggaagacatggaaatgaatgtttttcctcagaaaaacctgcagcatacaggccatgccatcttcaaccctgcaatgagaaaattaatgtaaataccataacatcacccagactgggttcacagccaacatctggtagtgaatctgacttttctgttggtcaacaggaccaacagttgggaagaaaaaacgggtctggagttcaagagagcaaagtgaagggagacatggatctctctgttttgccaaataacaaccatcctgacaaattcctgcagcttgacgtaaagtctttaacgaggagctcagccctccttcaggccagcctggtgaggtttccgggtggaaattatcctgctgcacaacactggcaaaaccttgtctactcacagggcttaatcagcacaattaatcacttgtattcctttggaagttcttcactcatttgtcaagatacccgtatattgacacaactgaaataccgccctcaaaataggcaagctgtggtttggcatcctggtacacacctgccctctggtgtgaaacaaaacttctttttattgtataaagtaataaccattcttaatatcaaacttctactcaaggttgaagaagaaataaagaagcacggaagtaataacatgggattatcagaaaacctgactgattgtgctgctgctggcaatggtgatgatggactaattccacaaagagcagaaaacctgaaaatcagcaatttcctaggacggagaatgaagagtatcataggtgatgaacatcaaaaaccaaaggtagataaaaccacaaagaggtggagaaaccagtgcagaaaggctgaaaattcccaaaaccagaatgcctcttctccaaaagatcacaactccttgccatcaagggaacaaaactggtcagagaatgagtttgatggcttgattgaagtaggcttcagaaggtgggtaataacaaactcctgtgagctaaaggagtgtgttttaacccaacctcaggtggacatcacggtcctaccgatatgtgatgtcacccccagaggcctagctgtaaaattcctctctttgtactctttctctttatttctcaaccggccgacacttatggaaaatagaacctacgttgaaatattgggggtgggttcccccagtacttatccaccacgatcaagtcagcttcatccgtgggatgcaaggctggttcaacatatgcatatcaataaagcgttggaagttctggccagggcaatcaggaaagagaaagaaataaagggtattcaaataggaagagaggaagtcaacttgtctctgtttgcagatgacatgattgtatatttagaatacctcatcgtctcagcccaaattctccttgaggtgataagcaacttcagcaatgtctcaggatacaaaatcaacatgcaaaaatcacaagcattcctatacaccaataacacacaaatagagacccaaatcatgaatgaattcccattcacaattgctactaagagaataaaatacctagtaatacagcttacaaaggatgtgaaggacctcttcaaggagaactataaaccacttctcaaggaaataagagaggacacaaacaaatgggaaaacattccatgcttttggataggaagaatcaatatcgtgaaaatggccatactgccaaaagtaatttatagactcaatgtgatccccatcaagctaccactgactttcttcacagaattggagaaaactactttaaacttcatatggaaccaaaaaagagcccacatagccaagacaatattaagcaaaaagaacaaagctggaggcatcatgctacctgacttcaaactatattacaaggctacagtaaccaaaacagcatggtactggtaccaaaacagatatgcagaccaatggaacagaacagagccctcagaaataacatcacacatctacaaccatctgatctttgacaaacctgacacaaacaagcaatggggaaaagattccctatttaataaatga

SEQ ID NO: 118858 - DNA, 1790 bp, Homo sapiens
ccggtgtgagaaataaagagaaagagtacaaagagagaaattttacagctaggcctctaggggtgacatcacatatcggcaggttccgtgatgcccctgagccgcaaaaccagcaagtttctattagggattctggaaggggagcagatgtacgaacagggaggtttatcaagtttatcaacgccagctcattaacaggtattgaatgggttctggggatagagtgggtgttgatgggatggtctccggatgccatgagtggcggagttaggaccaggatgatgaaaccacaggcagaatccgggaggagcagcgtggcatcccagcctcaggcctgcccggacggtgttcgggcgatgatgtcttatcatccaggtctctctcttcagaaagaatcccaacaggagtgggaatacctggaccctaatcagagggacttatacagggatgtgatgttggagaactatagaaacctggtatcactggatttggatttacagtgtgagataatcagctacatagaagtacccacttatgaaacagatatatcctctacacaacttcagagcatatataagagagagaaactctatgaatgtttcatgtcattgagagaccctatgaatgcaaagagtgtgggaagaactttcgtagtggctatcaacttactctacatcaaagatttcatactgagaattcataaaggtggaaaaccctatgaatgtaaggagtgtaagaaaacctttactttgtatagaaatcttactcggcatcagaatattcatactggtgagaaactttttgaatgcaagcaatgtgggaagacctatactactggttcaaaactctttcaacatcagaaaactcatactggcgagaaaccctatgaatgcaaggaatgcggaaaggcctttagcttgtatggctaccttaaacaacatcagaaaattcatactggcatgaaacactttgaatgtaaggagtgtaaaaaaacctttactttgtatagaaatcttactcgacatcagaatattcacactggtaagaaactttttgaatgtcaggaatgtgggaaggcctatagtactggctcaaaccttattcaacatcggaaaactcatactggtgagaaaccctataaatgtaaggaatgtggcaagacctttagcttgcatggatatcttaatcaacatcagaaaattcatactggtgtgaaaccctatgaatgtaagaaaattcatactggtggaaaaccttatgaatgtaaagaatgtgggaaggccttcagtcgtgcttcaaaccttgttcaacatgagagaattcatactggtgagaaaccctatgtgtgtaagcagtgtgggaaaaccttcagatatggttcagcccttaaagcccatcagagaattcataggagcataaaagtgaatcagtggctggactcaccgcgtcataaaagcataaactgtgacccgatgagtccgcgcactcggaaaacaagagaacgctcccacgtctccgggcgcagcttgtgccagcgactactaggtcagggggcgcagctgagagaattcaagcaacctccccgcaaccggttccgccgcgtttgtgggctggtagcccggaatacatttcccagaggccttcgcggccgacgtgcttcgcgcaggaacgcagccgcctcccgactggaggacgcggtagcggagctgctcaaagcgaggtgctcagccctgggaggctcagggctgcccgaggggcttagtcccagagccagtgctgtcaggggctga

SEQ ID NO: 118859 - DNA, 492 bp, Homo sapiens
atgccagggggagggagcaaagtgggaacaagggatgacaggcagacggtgggtagtcggtcccccagcatcctccacccctcctcacagtacttctggctgctggtcctgtcccgggggctggtgggcatcggggaggccagctactccaccatcgcccccactatcattggcgacctcttcaccaagaacacgcgtacgctcatgctgtccgtcttctacttcgccatcccactgggcagtggcctgggctacattactggctccagcgtgaagcaggcagccggagactggcactgcgcattgcgggagagcttcttgcagttggttcggctcttgaaagttactcacctgcttcagcaactgcagctgctgtacccgacaaatggcaaaagacaagacaccaaccacacgagatcccagtgcgcacattacctgcctcatcttgactttcaggtggctttatgtgcctatgcagtgttgcaatgttaa

SEQ ID NO: 118860 - DNA, 486 bp, Homo sapiens
gaatatgaatgccacacacccagcaccgagaagcaatactttgggagttacagtgcaaagatgaacctagtggctgtttccaccaaatcctcctgtctttcgtggccaacaccccaggcaaggcttggggcccccgtctgctgctggacgcagagccatgaagaagaagttagtggtgctgtgcctgctggccgtggtcctggtgctggtcattgtcggcctctgtctctggctccctcggcctccaaggaacctgacaaccatgtgtacaccagggctaccgtggccgcggatgccaagcagtgctcggagattgggaggaaaagctgaggtcatcaatgcccgcgaggtggcccccagcgtggcctttgccagcatgttcaacagctcggagcagtcccagaaggcactttaggaggccaagtcaggaggagcgcatgagcccaggagacctgcctggacaacatagcaagactccatctctac

SEQ ID NO: 118861 - DNA, 2535 bp, Homo sapiens
ggaaaggccaggaggccacctgagcctggcacagtggcctcatttattgtgctgctctgctgctcacaggggaagccggtcccccagagtccccttcctggtcctggtgagtatcttgtccctggattgcttgtcagccttgtcctcctggagcactcagtagccggcaggctccccgcctttcctggagtccgaggcagctgcccagccaccagccgtgcggacgatggcttgcaccacagcgatgaaggtggacgcgatctgggtgtgatggtgccgggtctccagggctgcagtcactgcctggtcaatgtttctctccactgtcgtgacgttgggcagaagctggttgtgcagccggggctcctccacggcccgcttcacgtcatagccgaaccagaggttgtagatgatggccagtgcagtggccgtggtgatctgtgtgcccccagcagctcccaccaccatccggacctggccgtcctggcccaccatgatcgtcgggcacatggacgagagcggctgcttccctggctggatgaaattggcaggtgaggggggtaccccaaactcgttggtgatgctgggagagctgaagtcgtccatttcattattgaacaggatcccgctgaccggggagcggaccttggagccaaagtagaggttgatggtgctggtggcggacacagcactgccgtcctctgcgacgacagacaggtgagcagtgcccccgtcatccggcgtgtagaactcgggcttgtagtaggagatcgggtgagtggtgtcgtcagagatctgggcccggagctgggcagcgaagaactcggaggtcatgttgcggaccacctcagtcacatccacaaacttggggtccccaagcagggtcctcttggcgtaggcaaaccggaaagcctctacgatgcggtggtacgtcaggcccttctgctcggggctctccacgctctcccgggagaagttgtaccctttgaggatgttgaggatgagggccagcacgggcccgctgagcggcgcactgggcatgtacagcaccgcgtctcccaggctgatgttcagcgggtgctcgatcagctcagcacggtagttgttcaggtcctcagctgtcacaatgcccccggccgcctggatgtccttcacaatctgggccgtgaggctgccgttgtagaaggcctgggcaccctcgatggccagcgtctcgtaggtgtcagccagctgcggcagggtcagtctctccccctcccgaagcacctttctatcccggcagaacacctcacacaagacaggctgctgctcgatgacggtccgcttgttttccagggctgccgccaagcccttgcccacggggaagccctggcgggccagctggatgctgggctggaagaggcgagcccagggcagccgcccatgccgctggtgtgccagctcatagcctcggatctccccaggcaccgccaccgacagcccccccttctgggactgctccgagctgttgaacatggtggcaaaggccagcctgggggccacctcgcgggcgttgatgacctcagcttttcgtgtggtgctgttgtagatggtgaggaagaggccacccccgatgcccatgctgtgggcattcatgagccccacacacaacagggctgcaatggctgcatccaccgcagagccaccgtcccgcagtgcatccctcccaatcttcgagcactgcttggcatccgcggccacggcagccctggtgtacacatggttgtcaggttccttggaggctgagggcagccagagacagaggccgacaatgaccagcaccaggaccacggccagcaggcccagcaccactaacttcttcttcatggctctgcgtccagcagcagacgggggccccaagccttgcctggggtgttggccacgaaagacaggaggatttggtggaaatagctgaggaaataaccggggtctccctcacactctgctgaagcctgtagccacagaatcttcttcagggactctctgatcaggcagccttctcgttctcctgctgtggggcctcaggcaaatcactgaactgtccagcctggatgacggcagcacctcacttgccttgctgcccttcagtcttccagaaagcagctagagggctctgtctgtccaactgcagaacaggccctgcctcctccctgccccgttggacagctcacacccttcaccaggcctgacagcgctcttgccactccgacaccccgggtcccagctgggagtccgggtcagggttaagggttcctgatagagacaccgattcctggaggtccaaagagcctcaggagctgggccagcaatatgcagcatctgaggcctggggacagtgggggcccaggagagcacctcttcctcagaagacagttttgggctgcacccgctatgatgtccaccagctcagagagggtgagcggcgcctctgggtcacacagcactggggcacagccaactgctctcacttctgggctcacccgacgcccggtctgc

SEQ ID NO: 118862 - DNA, 2633 bp, Homo sapiens
gacaggccagggaggccacctggagcctggcacagtggcctcatttattgtgctgctctgctgctcacaggggaagccggtcccccagagtccccttcctggtcctggtgagtatcttgtccctggattgcttgtcagccttgtcctcctggagcactcagtagccggcaggctccccgcctttcctggagtccgaggcagctgcccagccaccagccgtgcggacgatggcttgcaccacagcgatgaaggtggacgcgatctgggtgtgatggtgccgggtctccagggctgcagtcactgcctggtcaatgtttctctccactgtcgtgacgttgggcagaagctggttgtgcagccggggctcctccacggcccgcttcacgtcatagccgaaccagaggttgtagatgatggccagtgcagtggccgtggtgatctgtgtgcccccagcagctcccaccaccatccggacctggccgtcctggcccaccatgatcgtcgggcacatggacgagagcggctgcttccctggctggatgaaattggcaggtgaggggggtaccccaaactcgttggtgatgctgggagagctgaagtcgtccatttcattattgaacaggatcccgctgaccggggagcggaccttggagccaaagtagaggttgatggtgctggtggcggacacagcactgccgtcctctgcgacgacagacaggtgagcagtgcccccgtcatccggcgtgtagaactcgggcttgtagtaggagatcgggtgagtggtgtcgtcagagatctgggcccggagctgggcagcgaagaactcggaggtcatgttgcggaccacctgccgagaccccagagctggcctcagtcacatccacaaacttggggtccccaagcagggtcctcttggcgtaggcaaaccggaaagcctctacgatgcggtggtacgtcaggcccttctgctcggggctctccacgctctcccgggagaagttgtaccctttgaggatgttgaggatgagggccagcacgggcccgctgagcggcgcactgggcatgtacagcaccgcgtctcccaggctgatgttcagcgggtgctcgatcagctcagcacggtagttgttcaggtcctcagctgtcacaatgcccccggccgcctggatgtccttcacaatctgggccgtgaggctgccgttgtagaaggcctgggcaccctcgatggccagcgtctcgtaggtgtcagccagctgcggcagggtcagtctctccccctcccgaagcacctttctatcccggcagaacacctcacacaagacaggctgctgctcgatgacggtccgcttgttttccagggctgccgccaagcccttgcccacggggaagccctggcgggccagctggatgctgggctggaagaggcgagcccagggcagccgcccatgccgctggtgtgccagctcatagccctcgatctccccaggcaccgccaccgacagcccccccttctgggactgctccgagctgttgaacatggtggcaaaggccagcctgggggccacctcgcgggcgttgatgacctcagcttttcgtgtggtgctgttgtagatggtgaggaagaggccacccccgatgcccatgctgtgggcattcatgagccccacacacaacagggctgcaatggctgcatccaccgcagagccaccgtcccgcagtgcatccctcccaatcttcgagcactgcttggcatccgcggccacggcagccctggtgtacacatggttgtcaggttccttggaggctgagggcagccagagacagaggccgacaatgaccagcaccaggaccacggccagcaggcccagcaccactaacttcttcttcatggctctgcgtccagcagcagacgggggccccaagccttgcctggggtgttggccacgaaagacaggaggatttggtggaaatagctgaagcacgcgcagcccagacctttctgggggactccgtgttacctccctctgcctctagctggtttctctgtctccagttgaactctgctgtggggcctcaggcaaatcactgaactgtccagcctggatgacggcagcacctcacttgccttgctgctgggagtgttgtgaatagagtaggttagactgtgggcagggcttggtgaatggtagctgtgattatcatcatggctgcactggggacacccccaggaggcctgagtggcacaggtctcttgctcactgtatgtcccctgtggactcccttccaggctgtgcagtgagtggcagcagtgacccttgggaagtctcatggctatggcagcaggtgacaggtgtgacaacagggaagagggatgtggtgacagaggttggggttcccctctcccacagtcagtttcccacaaagggcggtgtctgccagcaagcccctccaatgagccccaagctggatttccctccactccaccctgtcccagtgcagagcgtctgacctcagaggcagacacactgtcccagaggtggtctacgaatggagtccctgtgccctccccacacacagggaacatccaaatgccatcatggaagggtggccacctccccaggcttggtgggccg

SEQ ID NO: 118863 - DNA, 538 bp, Homo sapiens
cagcaatgccagcgtcatccttgagggcgaggacctgcgcttctcctgcagcgtccgcatggcaggaaggctgcagggtcgcttctctgtcatctggcagcttgtggacaggcagaaccgccgcagcgatatcatgtggctagaccgggaatggcaccgtgcagccaggctcgtcctactgggagcgcagcagctttgggagcgtccagatggagcaggtgcagcccaactcattcagcctgggcatcttcaacagcaggaaggaggacgagggccagtatgaatgccatgtgactgaatgggtgcgggtggtggatggcgagtggcagattgttggggagcgccgggccagcactcccatctccatcatagctcttggtgagtgagcggtgggactggcagtgggtctggcatggagacagcttcagtgtcaaacaccttatcctgacttttgtctgtcagagttctagcaggaaactatggccagtcttttacctatagagtttgaagtactttcctttaaaaaaaaaaaaaaaaa

SEQ ID NO: 118864 - DNA, 6623 bp, Homo sapiens
ttccaaaactgttctctggagctataagtggattgccagaaatgagagattaggagctgggagaagaggaagcgccttgtgttgtgtctcctggaggctgccgacatgaagtgctttttcccggtgctgagctgtctggctgtgctgggtgtggtgtcagcacagcggcaggtcaccgttcaggaaggacccttgtaccgcacggagggctcccacatcactatctggtgcaatgtgagtggctaccagggaccttctgagcagaatttccagtggtccatttacctgccttcgtcgccagagcgagaggtgcagatcgtcagcaccatggactcttccttcccctatgccatctacacccagcgcgtccgcggagggaagatcttcatagaaagagtccaggggaactcaaccctattgcacatcacagatcttcaggcccgggatgccggggagtatgaatgccacacacccagcactgataagcaatactttgggagttacagtgcaaagatgaacctagtggtgatcccagactccctgcagaccactgccatgccccagactctgcacagagtggagcaggacccgctggagctcacttgtgaggtggcctcagagaccattcagcacagccacctgtctgtggcctggctccggcagaaagttggcgagaagcccgtggaggtcatctccctgagccgagatttcatgcttcactccagcagcgaatatgcccagaggcagagcctgggggaggtgcggctggacaagctggggaggaccaccttccgcctcaccatcttccacctgcagccttctgaccagggcgaattctactgcgaggccgccgagtggatccaggatccggatgggtcgtggtatgctatgacccgaaagcgttccgagggagccgtggtcaacgtccagccaactgacaaagaattcactgttcggctggagacagagaagcggctgcacacggtgggcgagccggtggagttcagatgcatcctggaggctcagaatgttcccgaccgttactttgctgtctcctgggccttcaacagctcgctcatcgccaccatgggtcctaacgctgtgcctgtcctcaacagcgaatttgctcaccgggaagccaggggacagcttaaggtggccaaagagagcgacagtgtctttgtgctgaagatctaccacctccgccaggaagatagcgggaaatacaactgccgggtgactgagcgagagaaaaccgtgaccggggaattcattgataaggagagcaagcgtcccaagaacatccccatcatagtcctccccctcacagataactgggtagttaaagtcccccagcaccaccagctcctgtcccaaggccacttggagagcagcatctccgtggaggtggccagcaatgccagcgtcatccttgagggcgaggacctgcgcttctcctgcagtgtccgcacggcaggcaggccgcagggtcgcttctctgtcatctggcagcttgtggacaggcagaaccgccgcagcaatatcatgtggctagaccgggatggcaccgtgcagccaggctcgtcctactgggagcgcagcagctttgggggcgtccagatggagcaggtgcagcccaactcgttcagcctgggcatcttcaacagcaggaaggaggacgagggccagtatgaatgccatgtgactgaatgggtgcgggcagtggatggcgagtggcagattgttggggagcgccgggccagcactcccatctccatcacagctcttgaaatgggcttcgcagtcacagccatctcccggacaccgggggtgacctacagcgactcctttgacttgcagtgtatcatcaaaccccactaccctgcctgggtccccgtgtcggtgacatggcggttccagccggtgggcacggtggagttccatgacttggtgaccttcacccgggacggaggggtccagtggggggacaggtcctccagcttccgaacccgaactgccatcgagaaggctgagtccagcaacaacgtccgcctaagcatcagccgagccagtgacacggaagcaggcaagtaccagtgtgtggcagagctgtggcggaagaactacaacaacacctggacgcgactggcggagaggacctccaacctgctggagatcagggtgctgcagccagtgacaaagctgcaggtgagcaaatcgaagaggaccctcaccctggtggaaaacaagcccattcagttgaactgctcagtcaagtcccagactagccagaactcccactttgcggtgctctggtatgtccacaagccctcggatgccgatggcaagcttatcctgaagaccacccacaactccgcctttgaatacggtacttacgccgaggaggagggcctgagagccaggctccagtttgagaggcatgtgtcggggggcctgttcagcctcaccgtccagagagccgaggtcagcgacagcggcagctactactgccacgtggaggagtggctgctgagccccaactacgcctggtacaagctggcagaggaggtttctgggcgcacagaagtcactgtgaaacagccagacagccgcctgaggctcagccaagcccaggggaacctgtcggtttctggagacccggcaggtacagctggagtgtgtggttctcaaccgcaccagcataacctcccagctcatggtggaatggtttgtatggaagcccaaccaccctgagcgggagactgtggcccgcttgagccgtgacgccaccttccactatggagagcaggcagccaagaacaatctgaaggggcggctgcatttggagagtccttcccccggcgtgtaccgtctcttcatccagaacgtggctgtgcaggacagcgggacctacagctgccatgtggaggagtggctgcccagccccagtggcatgtggtataagcgggcagaggacaccgctgggcagacagctctgacagtcatgcgaccagatgcttccctgcaggtggacacagtggtccccaatgccacggtctctgagaaggcagctttccagctggactgtagcatcgtgtcccgctccagccaggactcccgcttcgctgtggcctggtattccctgaggactaaagctggggggaaaaggagcagccctggcctggaagaacaggaagaggaaagggaggaggaggaggaggaggaggaggacgacgacgacgacgacccaacagagcggacggccctgctgagcgtgggcccagatgctgtctttggcccagagggcagtccttgggagggcaggcttcgcttccagaggctctccccggtgctctaccggctcacagtgctgcaggcaagcccccaagatacaggcaattactcctgccatgtggaggagtggctgcccagccctcagaaggaatggtaccggctgacggaggaggagtcagcccccatcggcatccgtgttctagatacaagtcccaccctccagtccatcatctgctccaacgacgcactcttctacttcgtcttcttctaccctttccccatctttggcattcttatcatcaccatccttctggtgcgtttcaagagccggaactccagcaagaactctgatgggaagaatggggtgcctctgctgtggatcaaagagccacacctcaactactcccctacttgcctggagccccctgttctcagtatccatccaggggccatagactaagcgggtgatgccccagcggatgttggccacggaggagctgaggctctccctttctctgtgattggacagttgacagcacccaaactctggggtgcatgtgtgtggaaagttgtcagacttgaaaagtgttccaagttcccagtcagtcacagagacagactgcctctcggtggcagtcttggttggttagctatttgcgcgcaaatgttgtgatcctgccattatagatttcttgtttctgtttttagtaatgtagtgagtagctccaggtgccacatctactcacagatttatctagtattctcagatagatgttacagggcttcttattctttgtaatgtactctttttaaatccctttagtttaccctttttggattccttaatgtggacgaatttctcttacgtacaactgacagcaaaaggaagggcgaactttctagtgacaaggaatctcttccaagactttgtttttgcacatttgaaaatgccacccatggatcaaaatatacccaaacgttttttactttcttaacaagacttaagaattgtgtgtagtgtgggcaaaatttgtatgttgtcttttccctcagctggagttattggaaccactttgtagtcaagacgaaagcactgaattttgcttcaaagaactgtgtatgtacaagagaaatcctgcataaccccattaggagtagatggtgcccggcctatctgtcagggaggcaaaaaaggcttcatcccatccttgccaaaaaataagaaaactgtcttggagaatgggtcagaagccccaaacggcacacactttccaaattaaagtgggcaggggctgcttttagcagctgctgacctgcagatttgtcaaagccagtgactagagaaggaagggagaaaggctggctgttggcttgctctgagctgcaaggatggtctctaactgattaactgtgagcaggtgggcctgtgtcttcaggtgctttgccaaactcttaaaagaaagtgtccagtgaacttggaagtgggcccctgagctgagcacagggccaaagcagccatggcagacacctgacggagggcacggggctggctgacactaagtttggtgggacagtgaggggtgggaggggggtttccagggcctggtgttggagagtgcagagaaatatctacctccctggaggtgtgaagactaggtttttcttcttccttccaattagattttccttaattatagtgatgtcttccttattcatttttctctccctgcctctcactgccataagaatatcagcctgggggcagtccagacgcagccctttgtcatcctttctgtttgcctagtctcagcagactgtgatcacaaggcattgtctgtgggatttttcctttccctttcttgatctctcttgtggttctaggttgtttggttgttcattgttatggtggctttttattttaacgccccttgagccccatgatggctggtgtcaccctgttcttttacactgttgggccaggtgctgcttgtccttcttagggcatcatcaattgcaaatatttccttttgctccctttatgaagatgttcttatacccttgctttcccatatttttctggccaagcatgccatctcctttactctgggaacttacatcctgaatcccaagagggggtcacagtttggaaaaagtcatcagggattctggaactaagtctgataaaagattccagtgaagccctgttctgagaacgagcagactgcaggggaggccatgggattccccaggccagtgtctgtgctgatccttcaagggtctgcaggtatgcaggtggcctgggctgctcggcagatactttgctgattcccagctgaggggagcatggtggcgattgctcagccattttctgacagacacacagacctgccttttctcccccaagtataccgtaccctcctgtgagacagtgtgtgcaggcaccaccaccttaatcctgctgttgcctgacatgctgattctcatttattatgctgcatcaacacattagaggtacaggagcggctcagtcatgaaaaaagaaggtcttttgccccatttctttatttcagagatgtgggctttcagtgggaatttgctgactcctactttataggctgagtcaatgagggaagatgactggcgtttcctctgtctaaatgggaggttgccagagcgctggctgggactaggatgtgtaactaagatttcagtttgaaatcttagatttcagttcacggcgataaagaagtaggtgctgcacacaaatatataaagcaattgtaggaaatttgaaaggaaaaaaagaaaccgaagccagtattttaataattgctttttctgtgtattttgtattgggctgggggatagcatcaaaggttgaactttttgagctttctatgaaaaaccccaggaccttctttctttggccatttctatggaaatgcgatgtcagatggatggtaatggtgccctccagtggctgtgagacctcattgcgcattgtctactggagctttagtcttctgagacggaggaaaactgctgaatactctggattcatctatgtctacaatgttgcatttatgaaaaactacactgtgctaggcgcattctaggacatgaatatgaccacaccctctttcaccgggtgtttctgtagcaagttttcatattcttttcaaacaatggtttctctgcgttaattattgaggaaaaaaaaagatggggtaagaaaactacccatgcatgatgtagagagctgttgatttgtttctgtttttttaaaggaaaactatttgtaagatgttgcactaaaacattttatatac

SEQ ID NO: 118865 - DNA, 3730 bp, Homo sapiens
atgaagtgctttttcccggtgctgagctgtctggctgtgctgggtgtggtgtcagcacagcggcaggtcaccgttcaggaaggacccttgtaccgcacggagggctcccacatcactatctggtgcaatgtgagtggctaccagggaccttctgagcagaatttccagtggtccatttacctgccttcgtcgccagagcgagaggtgcagatcgtcagcaccatggactcttccttcccctatgccatctacacccagcgcgtccgcggagggaagatcttcatagaaagagtccaggggaactcaaccctattgcacatcacagatcttcaggcccgggatgccggggagtatgaatgccacacacccagcactgataagcaatactttgggagttacagtgcaaagatgaacctagtggtgatcccagactccctgcagaccactgccatgccccagactctgcacagagtggagcaggacccgctggagctcacttgtgaggtggcctcagagaccattcagcacagccacctgtctgtggcctggctccggcagaaagttggcgagaagcccgtggaggtcatctccctgagccgagatttcatgcttcactccagcagcgaatatgcccagaggcagagcctgggggaggtgcggctggacaagctggggaggaccaccttccgcctcaccatcttccacctgcagccttctgaccagggcgaattctactgcgaggccgccgagtggatccaggatccggatgggtcgtggtatgctatgacccgaaagcgttccgagggagccgtggtcaacgtccagccaactgacaaagaattcactgttcggctggagacagagaagcggctgcacacggtgggcgagccggtggagttcagatgcatcctggaggctcagaatgttcccgaccgttactttgctgtctcctgggccttcaacagctcgctcatcgccaccatgggtcctaacgctgtgcctgtcctcaacagcgaatttgctcaccgggaagccaggggacagcttaaggtggccaaagagagcgacagtgtctttgtgctgaagatctaccacctccgccaggaagatagcgggaaatacaactgccgggtgactgagcgagagaaaaccgtgaccggggaattcattgataaggagagcaagcgtcccaagaacatccccatcatagtcctccccctcaagagcagcatctccgtggaggtggccagcaatgccagcgtcatccttgagggcgaggacctgcgcttctcctgcagtgtccgcacggcaggcaggccgcagggtcgcttctctgtcatctggcagcttgtggacaggcagaaccgccgcagcaatatcatgtggctagaccgggatggcaccgtgcagccaggctcgtcctactgggagcgcagcagctttgggggcgtccagatggagcaggtgcagcccaactcgttcagcctgggcatcttcaacagcaggaaggaggacgagggccagtatgaatgccatgtgactgaatgggtgcgggcagtggatggcgagtggcagattgttggggagcgccgggccagcactcccatctccatcacagctcttgaaatgggcttcgcagtcacagccatctcccggacaccgggggtgacctacagcgactcctttgacttgcagtgtatcatcaaaccccactaccctgcctgggtccccgtgtcggtgacatggcggttccagccggtggggcacggtggagttccatgacttggtgaccttcacccgggacggaggggtccagtggggggacaggtcctccagcttccgaacccgaactgccatcgagaaggctgagtccagcaacaacgtccgcctaagcatcagccgagccagtgacacggaagcaggcaagtaccagtgtgtggcagagctgtggcggaagaactacaacaacacctggacgcgactggcggagaggacctccaacctgctggagatcagggtgctgcagccagatagaatgggtgtcagtgcaagagccctaagaggagagctcagcccctcccagatccctcaggcctgttgtcatggtaacaccggggcacttgttattggcatcaaggagccagggtcactgccctacctgcagacagtgacaaagctgcaggtgagcaaatcgaagaggaccctcaccctggtggaaaacaagcccattcagttgaactgctcagtcaagtctcagactagccagaactcccactttgcggtgctctggtatgtccacaagccctcggatgccgatggcaagcttatcctgaagaccacccacaactccgcctttgaatacggtacttacgccgaggaggagggcctgagagccaggctccagtttgagaggcatgtgtcggggggcctgttcagcctcaccgtccagagagccgaggtcagcgacagcggcagctactactgccacgtggaggagtggctgctgagccccaactacgcctggtacaagctggcagaggaggtttctgggcgcacagaagtcactgtgaaacagccagacagccgcctgaggctcagccaagcccaggggaacctgtcggttctggagacccggcaggtacagctggagtgtgtggttctcaaccgcaccagcataacctcccagctcatggtggaatggtttgtatggaagcccaaccaccctgagcgggagactgtggcccgcttgagccgtgacgccaccttccactatggagagcaggcagccaagaacaatctgaaggggcggctgcatttggagagtccttcccccggcgtgtaccgtctcttcatccagaacgtggctgtgcaggacagcgggacctacagctgccatgtggaggagtggctgcccagccccagtggcatgtggtataagcgggcagaggacaccgctgggcagacagctctgacagtcatgcgaccagatgcttccctgcaggtggacacagtggtccccaatgccacggtctctgagaaggcagctttccagctggactgtagcatcgtgtcccgctccagccaggactcccgcttcgctgtggcctggtattccctgaggactaaagctggggggaaaaggagcagccctggcctggaagaacaggaagaggaaagggaggaggaggaggaggaggaggaggaggacgacgacgacgacgacccaacagagcggacggccctgctgagcgtgggcccagatgctgtctttggcccagagggcagtccttgggagggcaggcttcgcttccagaggctctccccggtgctctaccggctcacagtgctgcaggcaagcccccaagatacaggcaattactcctgccatgtggaggagtggctgcccagccctcagaaggaatggtaccggctgacggaggaggagtcagcccccatcggcatccgtgttctagatacaagtcccaccctccagtccatcatctgctccaacgacgcactcttctacttcgtcttcttctaccctttccccatctttggcattcttatcatcaccatccttctggtgcgtttcaagagccggaactccagcaagaactctgatgggaagaatggggtgcctctgctgtggatcaaagagccacacctcaactactcccctacttgcctggagccccctgttctcagtatccatccaggggccatagactaa

SEQ ID NO: 118866 - DNA, 2223 bp, Homo sapiens
cctggcacagtggcctcatttattgtgctgctctgctgctcacaggggaagccggtcccccagagtccccttcctggtcctggtgagtatcttgtccctggattgcttgtcagccttgtcctcctggagcactcagtagccggcaggctccccgcctttcctggagtccgaggcagctgcccagccaccagccgtgcggacgatggcttgcaccacagcgatgaaggtggacgcgatctgggtgtgatggtgccgggtctccagggctgcagtcactgcctggtcaatgtttctctccactgtcgtgacgttgggcagaagctggttgtgcagccggggctcctccacggcccgcttcacgtcatagccgaaccagaggttgtagatgatggccagtgcagtggccgtggtgatctgtgtgcccccagcagctcccaccaccatccggacctggccgtcctggcccaccatgatcgtcgggcacatggacgagagcggctgcttccctggctggatgaaattggcaggtgaggggggtaccccaaactcgttggtgatgctgggagagctgaagtcgtccatttcattattgaacaggatcccgctgaccggggagcggaccttggagccaaagtagaggttgatggtgctggtggcggacacagcactgccgtcctctgcgacgacagacaggtgagcagtgcccccgtcatccggcgtgtagaactcgggcttgtagtaggagatcgggtgagtggtgtcgtcagagatctgggcccggagctgggcagcgaagaactcggaggtcatgttgcggaccacctgccgagaccccagagctggcctcagtcacatccacaaacttggggtccccaagcagggtcctcttggcgtaggcaaaccggaaagcctctacgatgcggtggtacgtcaggcccttctgctcggggctctccacgctctcccgggagaagttgtaccctttgaggatgttgaggatgagggccagcacgggcccgctgagcggcgcactgggcatgtacagcaccgcgtctcccaggctgatgttcagcgggtgctcgatcagctcagcacggtagttgttcaggtcctcagctgtcacaatgcccccggccgcctggatgtccttcacaatctgggccgtgaggctgccgttgtagaaggcctgggcaccctcgatggccagcgtctcgtaggtgtcagccagctgcggcagggtcagtctctccccctcccgaagcacctttctatcccggcagaacacctcacacaagacaggctgctgctcgatgacggtccgcttgttttccagggctgccgccaagcccttgcccacggggaagccctggcgggccagctggatgctgggctggaagaggcgagcccagggcagccgcccatgccgctggtgtgccagctcatagccctcggatctccccaggcaccgccaccgacagcccccccttctgggactgctccgagctgttgaacatggtggcaaaggccagcctgggggccacctcgcgggcgttgatgacctcagcttttcgtgtggtgctgttgtagatggtgaggaagaggccacccccgatgcccatgctgtgggcattcatgagccccacacacaacagggctgcaatggctgcatccaccgcagagccaccgtcccgcagtgcatccctcccaatcttcgagcactgcttggcatccgcggccacggcagccctggtgtacacatggttgtcaggttccttggaggctgagggcagccagagacagaggccgacaatgaccagcaccaggaccacggccagcaggcccagcaccactaacttcttcttcatggctctgcgtccagcagcagacgggggccccaagccttgcctggggtgttggccacgaaagacaggaggatttggtggaaatagctgaggaaataaccggggtctccctcacactctgctgaagcctgtagccacagaatcttcttcagggactctctgatcaggcagccttctcgttctcctgaaggtcaagggaggttacctgaagcacgcgcagcccagacctttctgggggactccgtgttacctccctctgcctctagctggtttctctgtctccagttgaactctgctgtggggcctcaggcaaatcactgaactgtccagcctggatgacggcagcacctcacttgccccg

SEQ ID NO: 118867 - DNA, 1677 bp, Homo sapiens
atgtggaatagtaaaattaatcatgatcatgatgaccagtttttgaaaacctactatgtgttagagagcagcatctccgtgggggtggccagcaatgccagcgtcatccttgagggcgacgacctgcgcttctcctgcagcgtccgcatggcaggcaggccgcagggtcgcttctctgtcatctggcagcttgtggacaggcagaactgccgcagcaatatcatgtggctagaccgggatggcaccgtgcagccaggctcgtcctactgggagcgcagcagctttgggagcgtccagatggagcaggtgcagcccaactcattcagcctgggcatcttcaacagcaggaaggaggacgagggccagtatgaatgccatgtgactgaatgggtgcgggtggtggatggcgagtggcagattgttggggagcgccgggccagcactcccatctccatcatagctcttgaaatgggcttcgcagtcacagccatctcccggacaccgggggtgacctacagcgactcctttgacttgcagtgtatcatcaaaccccactaccctgcccaggtccccgtgtcagtgacatggcggttccagccggtgggcacggtggagttccatgacttggtgaccttcacccgggacggaggggtccagtggggggacaggtcctccagcttccgaacccgaactgccaccgagaaggctgagtccagcaacaacgtccgcctaatcatcagccgagccagtgacacggaagcaggcaagtaccagtgtgtggcagagctgtggtggaagaactacaacaacacctggacgcaactggcggagaggacctccaacctgctggtgatcagggtgctgcagccagatagaatgggtgtgagtgcaagagccctaagaggagagcccagcccctcccagatgcctcaggcctgttgtcatggtaacaccggggcacttgttattggcatcaacgagccagagtcactgccctgcctgcagacagtgacaaagctgcaggtgagcaaatcgaagaggaccctcaccctggtggaaaacaagcccattcagctgaactgctcagtcaagtctcagaccagccagaactcccactttgcggtgctctggtacgtccacaagccctcagatgccaacggcaagcttatcctgaagaccacccacaactccgccttcgaatacggtacttacgtggaggaggagggcctgagagccaggctccagtttgagaggcatgtgtcgggggacctgttcagcctcaccgtccagagagccgagtggctgctgagccccaactacgcctggtacaagctggcagaggaggtttctgggcgcacagaagtcactgtgaaacagccaggtggttccttgggcctggggtgctactgtttctggatgggcagcagaaccagtctgcactcagggccccaggccatgttcctggaacacacctttagcattgacagcagcatgtgcagagccatgaagaagaagttagtggtgctgggcctgctggccgtggtcctggtgctggtcattgtcaatctctgtctctggctgccctcagcctccaaggaacctgacaaccatgtgtacaccagggctgccgtggctgcagatgccaagcagtgctcggagattgggaggaaaagctga

SEQ ID NO: 118868 - DNA, 2340 bp, Homo sapiens
aggaaaacccttcagacttgggagacagccggcattgctggcactggcctctctggagcttttctcggtgtggtgtcagcacagcggcaggtcaccgttcaagaaggacccttgtaccgcacggagggctcccacatcactatctggtgcaatgtgagtggctaccagggaccttctgaacagaatttccagtggtccatttacctgccttcgtcgccagagcgagaggtgcagatcgtcagcaccatggactcttccttcccctatgccatctacacccagcgcgtccgcggagggaagatcttcatagaaagagtccaggggaacccaaccctattgcacatcacagatcttcaggcccgggatgccggggaatatgaatgccacacacccagcaccgagaagcaatactttgggagttacagtgcaaagatgaacctagtgggagaacgagaaggctgcctgatcagagagtctctgaagaagattctgtggctacaggcttcagcagagtgtgagggagaccccggttatttcctcagctgtttccaccaaatcctcctgtctttcgtggccaacaccccaggcaaggcttggggcccccgtctgctgctggacgcagagccatgaagaagaagttagtggtgctgggcctgctggccgtggtcctggtgctggtcattgtcggcctctgtctctggctgccctcggcctccaaggaacctgacaaccatgtgtacacccagggctgccgtggccgcggatgccaagcagtgctcggagattgggagggttttggtgggtgggcctgcctacctgcttcttctaggaaaagctgaggtcatcaatgcccgcgaggtggcccccaggctggcctttgccagcatgttcaacagctcggagcagtcccagaagggagggctgtcggtggcggtgcctggggagatccgaggctatgagctggcacaccagcggcatgggcggctgccctgggctcgcctcttccagcccagcatccagctggcccgccagggcttccccgtgggcaagggcttggcggcagtcctggaaaacaagcggaccgtcatcgagcagcagcctgtcttgtgtgaggtgttctgccgggatagaaaggtgctttgggagggggagagactgaccctgccgcggctggctgacacctacgagatgctggccatcgagggtgcccaggccttctacaacggcagcctcatggcccagattgtgaaggacatccaggcggctgggggcattgtgacagctgaggacctgaacaactactgtgctgagctgatcgagcacccgctgaacatcagcctgggagacgcggtgctgtacatgcccagtgcgcggctcagcgggcccgtgctggccctcatcctcaacatcctcaaagggtacaacttctcccgggagagcgtggagacccccgagcagaagggcctgacgtaccaccgcatcgtagaggctttccggtttgcctacgccaagaggaccctgcttggggaccccaagtttgtggatgtgactgagaatttgattgcgggcctactgtgtgctcggatggactcgccagctctggggtctcagcaggtggtccgcaacatgacctctgagttcttcgctgcccagctccggtcccagatctctgaccacaccactcacccgatctcctactacaagcccgagttctacacgctggatgacgggggcactgctcacctgtctgtcgtcgcagaggacggcagtgctgtgtccgccaccagcaccatcaacctctactttggctccaaggtctgctccccggtcagtgggatcctgttcaataatgaatggacgacttcagctctcccagcattcaccaatgagtttggggcacccccctcacctgccaatttcatccagccagggaagcagccgctcttgtccatgtgcctgacgatcatggtgggccaggacggccaggtccggatggtggtgggagctgctgggggcacgcagatcaccacagacactgcactgcccccaagccacgctgatcacactcccatgccccaggccatcatctacaacctctggttcggctatgacgtgaagagggccgtggaggagccccggctgcacaacaagcttctgcccaacgtcacgacagtggagagaaacattgaccaggcagtgactgcagccctggagacccggcaccatcacacccagatcgcgtccaccttcatcgctgtggtgcaagccatcgtccgcacggctggtggctgggcagctgccttggactccaggaaaggcggggaacctgctggctactga

SEQ ID NO: 118869 - DNA, 435 bp, Homo sapiens
atccagggaaataggtggaaaacctgacaatcaggatccatttaattagagagagaccaaatcctgaaatggccccataccttcctgcagctgaagtggtcaggcaaaaagacaggaaaaacccaatccagttaaagaggaatgccatgaaaaaagttaacatgaaaatcccatcatttcctatcctcagctggtcagcatcatcaaaatcatcccgacccacaaaatcctcatccttgtagtcaaaatatgctgcgctctctgcagaaatgctgctgtaaggtggaggagcatcacctgcagcctgttcaggttctccagactcttcttcattctgcaactgctggtaccggctgccgcaggccggctcgaccgccgccagcgccgccaacgccaacgccatggcgcagccggcagcagggaagcagagcgagc

SEQ ID NO: 118870 - DNA, 240 bp, Homo sapiens
atggcgttggcgttggcggcgctggcggcggtcgagccggcctgcggcagccggtaccagcaggcctctctggccggcccgcggccaactcgacgccggggcttggcaggccgcgctgggcctggaggggcgggtcgggccccgggctcggattcgaggctgccacgggcccggcctgcccgtctgcgaccccagatgctttcggtgcatacagatgtcaatcctccttttatcaaataa

SEQ ID NO: 118871 - DNA, 681 bp, Homo sapiens
gtagtccccgcctcttccccaggggccgcgtcggagcctcggcggcggcggcggtgcttacagcctgagaagagcgtctcgcccgggagcggcggcggccatcgagacccacccaaggcgcgtccccctcggcctcccagcgctcccaagccgtagcggccgcgccccttcagctagctcgctcgctcgctctgcttccctgctgccggctgcgcttatggcgttggcgttggcggcgctggcggcggtcgagccggcctgcggcagccggtaccagcagttgcagaatgaagaagagtctggagaacctgaacaggctgcaggtgatgctcctccaccttacagcagcatttctgcagagagcgcagcatattttgactacaaggatgagtctgggtttccaaagcccccatcttacaatgtagctacaacactgcccagttatgatgaaagcggagagggaccaaggctgaaagctactatcccttttggttcctggggagagatgaggattttgtgggtcgggatgattttgatgatgctgaccagctgaggataggaaatgatgggattttcatgttaacttttttcatggcattcctctttaactggattgggtttttcctgtcttttttgcctgaccacttcagctgcaggaaggtatggggccatttcagggat

SEQ ID NO: 118872 - DNA, 1044 bp, Homo sapiens
atgatccaccctctgcaagctgaagatctggaaaagctgatggtgttatccaaaggccatgatgtcaattcccgcctggaatctgaagacctgaacacaaggagtgctgaggacaggaaaagatcaatgttccagctgaagccgcctggatcccatacctccaaggagaccacaagtcaggcatggagtagtgaggagtatgtgagtgagcgtggggtctgcaccctcagacatgccagctgctgctacaaggtgggcaactccagatgccagcatgggcagcggctctctgcgaggctgtggctggaccaggcacactacaagcagcttcccctggctggcaccaaggaatgtggtggtacccggaagcttggagatgccaggcactgcagggccccaaagagggagtcacagcagtccccaagggtcctcagctcttctctccttctccttgttcacaacgtagagagcaaggagcctgtctgcctcctgctgccatccatggcatccaggctgctcacaccaaggggcacctgcaggccagtgccaggctgtcttcagcaccccctcagtcttcctcctgtgcttgtgggcacccaaagtccttcccaggcccccaagagtgcaaagaggcccagtccacagccccaacttgggtggctacagctgcatcccggtggatcagggctctgcctgctcccagctcctgctggctccatggaatgtgcagccctggaatctgtcccctcgcagcttgggataggggctccaggtccttgctgggcccaggctggtgtccagggatggagcaatgttgccacgagctcccccagtggcccaagtgctcaggggcagcccagggctcccccttgcctggtttgtggccctgcccaatgtggcacctctgggagcagatcacgggccacaggcctcaggcccagctgtctggagtgtcaggtctggtggtcaccccaatgtggggcaaaccctggggacacaacctcctcccaagatgcaggaacccggtgctctaaagtagggtga

SEQ ID NO: 118873 - DNA, 487 bp, Homo sapiens
tcctgaattcccgagtcgacgatttcgtctggacggagcactcagaacattcttgaaggccttcccgctgatgggggagacacaagagcgtgggcgggtcctcacacacttctcccgccggtactgccagtgcaaacccctgatgacagcacttcggaagatgggatcccacacgctcacctgtgccctgatgctgctcaacacggacctgcacggccacgtgaacattggcaaaaagatgtcctgtcagcaattcattgccaacttggaccagctgaatgatggccaagactttgccaaagacctgctgaagaccctttacaactccatcaagaatgaaaagctggaatgggccattgatgaggatgagctgaggaaatccctgtctgagctggtggatgacaagttcgggacaggcacgaagaaggtgacgcgaatcctggatggtggcaaccccttcctggatgtcccacaggcgctcagtgcc

SEQ ID NO: 118874 - DNA, 760 bp, Homo sapiens
tcggaattcctgggtcgacgatttcgtgtctagaggagtcccaggagcagccaggacaggcggaagcagtgtctgccatggaggaggacaagctcttatctgcagtgcctgaggaaggcgatgccacccgtgaccccggtccagagcctgaagaggagccaggggtccggaatgggatggccagttggatggcccggggagccagatgtgcgggatggcttcagcgccacgtttgagaagatctggagtcagagctgctgcggggcacccagtacagcagcctcgactcctagacgggctgagcctcacggatgagagcgacagctgcgtcagcttcgagcccccctcacacccctcatccagcagcgggcccgtgacagccctgagcaggggctggaacttcttgaaggccttcccgctgatgggggagacacaagagcgtgagcgggcctcacacacttctcccgccggtactgccagtgcaaccctgatgacagccttcggaagatgggatccacacctcacctgtgccctgatgctgctcaacacggacctgcacggccacgtgattggggaggtgacgggggaaacgaacagaacagataagcaacagaacagaacagagcaaagcaaacgacaagcaaacgcagacaagcacaacgaacacgcaaacaacgaacagcaacacgaacacgacaaagataacgacacacggacacgcgacaccgaaatgcgacacgcgaaacgcgacaacgcgtaa

SEQ ID NO: 118875 - DNA, 421 bp, Homo sapiens
  misc_feature (1)...(421): n = a,t,c or g
ctgagagaatttttcttacataatttcagaatggtaaaggtctaagtataatataggacccagaagccatatgaatgaaagaataggtaaatttaatgacaaaaaaacttcccatggcaaaatgcacaatatgaaaagtcaaaaaacaaatgccaatctgagaaaaatatttgtaaatcatattacagaaaaaagttaatttcccaaatgtataaagaatannnnnnnnnnnnnnnnnnnnnnnnnnnnnnnnnnnnnnnnnnnnnnnnnnnnnnnnnnnnnnnnnnnnnnnnnnnnnnnnnnnnnnnnnnnnnnnnnnnnnnnnnnnnctccttgctattctcacgatagtgagatctcacaagatctggttgcttaaaagggtgtagcacctcttccttctctctcgaattccaccacg

SEQ ID NO: 118876 - DNA, 1851 bp, Homo sapiens
atatgcatgtttgcaattttggaagatcttaaaaacttgcctcctataggtgttgtaccagtatatacttctgccagtaatagatgggtgggctgctgatgcctcaaaatttccacaggctatacaggaagcatggctgaggaggcctcaggaaacttaacaatcatggcagaaggtgaaggggaagcaggcacatctacacatggccagagcaggaggaagagagagaaggaagaggtgctacacccttttaagcaaccagatcttgtgagatctcactatcgtgagaatagcaaggaggaaatctgcccccatgattcagtcacctcctgccagacccctcctccaacattagggattacaattcgacacgagattgccgcaagcatctgccacgtagcagatactgctggagtcgctggagatgcaatgatgagaaaaacagacttgatacctcccttcataggccttactctccagggaggaagaagtgcagatatgggaaaccagaaaaagtggagaaaggggagcgagaatctggccactctagtggccatggcatcagaaagattccactggcagtacagtggaaatagtacaatacagcccaaacagaaacagcatgggatgataaccagactcgtcacagcccccgtgtgcccaggattagttcagccttccctgtgtgcagtaggcctcagaaacatcatgtctctgagctctcacacttgtgcactccagaacacaaaacaggcatgggaaggttatgatgactgtcactcacagagagtatcgcaacctggagaaaacatgacaaaactgtcatttcttaaccttttaaaccagatgccctcctggggggaagggaagatggtgcctgccgatttctcaggaagctgctgggaaggtactggcacaggaagtccagctggatctcaggtcagctttctgaatcgccacaatgatggacagcttgctggagacagccctgggctccccccacccccgtgtccccggggactgcagggggcagagcagcgctcagctctacgtcgacacaaagctgatgttcatagagatcagtggcttgtcatttctttcagtaagaagttaagaaccagtgctagaaagtggtatgaagcagggcccttctcaggggttccccgagtgcttcctgctgctgctcagggtggcacagactttcccttctctccatcagaggagcctttccaacctagtccattctctatggtccaggcacatacagtcaggtcgaagccacagttccactttcctgcagcaggagagaattgtctgaataggtctgagctatccaggaatcaaggattgcaagcaagagtaggcccacttgccatcatgtccagtgacccatctggggactttgtgctttacacccccacaatactgggctttgtaggattagaggttctagtctctagagagggtacattcctgtggagatatagcacatgtcctgttgaactacaagttatggttgcctcctgggtacttaggactgctggtgcccaaagaccagaaggtgagagcagtcttccttggaatgtagcacagtgtactaaccaaatagctgtaatgtatgcattggccttatatgtaaaacgtttcaactctgctgaaactgtttctgcctatggcccagagcaccagctgctgcccagctcagatcaagtagtaactttgtctgtgtctggctcagccttgcttagattgcctttggaaagaatgctgtcctccatgagccctgctgggtcagccattttaccagcatctagatctccttctgagtgtgatgttagtgaggaagagtga

SEQ ID NO: 118877 - DNA, 1884 bp, Homo sapiens
atgtcagctcgaggctccaaggggacagagtttgaagtgaatgaagtttgtctgaagttccttctaaatgtgcacgaagcacaaggactgacgtgtcagctcgaggctccagggtttgctgcttgggaagggctgctcggggtccacacaggagctcctcacttcctgctggtgctgtgctgcactgttcccaaagtgatggagcaagagaatttggcctggtcctactgtgtgctgttgctgtgtgaccctaggcatgttgcttcacgtctctggggctcagtctccacctgcaaaatgagtcatgaccttccaagacgagaagcttcacggcaggcaatgaacagagacggcgtcatctccaaggctcagtggagcgagtcacgtcaccctcacttagctgcatggtgcactaggctctacaaagataagttagaaacagtccctgtggcagggaactcacaacttagtcttggagaacacaatcttgaacccagagaaagcatggcaaatgtctgcaaacacattcagggggtccgagggactgacgagggtagagacccggtgacatggaaccagccaggcagcaacctatgcctgcaagtgagtgtggagaagaaggaggtgcaggatctgccgcaaggaggggcgctcagcatcagtcttgtgaagtcatcagtgtgctccgctgtccatgtagcagcagttacaccagccaaagagagaaacaaagtcagggcatgtagactccacacagataaagcccctgtgccacggattctagggggacggggcaagaagcccagtgccaggactgccatcatctgcataggaaaccaggcaaaggcagtggtcctaagggagagtcagtctccacctgtgtgcatgggctctggaccagacagcagctcagggaacaccgtcagctgcgtgtctcctggagctgactggctggaggctggtcctccacccatgctggtctttgagctggccgatgctggtgatgtggaccttcaatacttgtatgaaccatccgtcacacaagtacaggtctcgagtcacagatctgtcagcctgggaaccggcccccaaatggaagacctaggcagttctgatgggtccatctgcaagggcctcctgcacaagcaacagtcgctgcttgctgttactgtgggctccacgttgggatcagacacacctgtcttcagtggcttgcagttgcagcaaggaccgaatgtgagtgaaagcactttgtgcctggaaatggacagaacattgaaatatgatgccccgaaaatcgtccagaagacaggatctccatctactgagcccacctggaagctgcagggtggagctctagtgtccaaccaggtccatctcccagagtgctcggcagggcagaggagcatgggcagcagtctggaagagcaaaagaaatcgggcacaaaattcctaaggagacatttgatgaacttacagcagagctggaaactatatcttcaaaaatgtctatatttggctaaaaagaatcaagttattcaacaggagttattatctatgaaagaagtacaacagaaatgtaaaaaacttgaggaggttaacaaaattttggaacaagaagtagtgaatcttaagacacatgaaaaaaatatggtagaatttggtgacgtagaagaatgtaaattgcagttggaagaaagagcaggacaggaaatagaaaaattagaagaaatcaatttacagcgagcctgccttagtgccaaaaaggtcagagcagaaggggagctggagccccgcagacatcacaatcacactcttggatttactgaaggcccatggggactcatgtctgtgattactggagcttatgatctaatcaggtga

SEQ ID NO: 118878 - DNA, 457 bp, Homo sapiens
ggcggtccttgctgcaactgcaagccactgaagacaggtgtgtctgatcccaacgtggagcccacagtaacagcaagcagcgactgttgcttgtgcaggaggccctgtgtgccacatgttgctcttcactactgatcagggctgtttacgtgggtcccacacagctgctctgtgactagggaacttgacgtctccatttttcaactgaaaacacagaagtacaaaggggttcaccaccttgtccacggttgccctgcttctaactggtcatgttggaataaaaacaagcaactgtcatccgggatattaaccacgcaggctgtggtgttgcaaagcagggggagcacggagcagggagcattaccaccctgcttgagatcagctcactcacaagtggcagggctagggctgcagtgcagctcacttatgggcactgtgtaagcctgaaagcaaagtc

SEQ ID NO: 118879 - DNA, 1893 bp, Homo sapiens
accctgaccgcccttatagaaggaagcaatacacaaaacaaagcaccatcaaccattatccagggccagtggatcgcttctcctcccacgccagccatccgagaaaggctcagctatgcatctgccccacacatcacagagcaagagtgtggttctggcgtgtctcctggagctgactggctggaggctggtcctccacccatgctggtctttgagctggccgatgctggtgatgtggaccttcaatacttgtatgaaccatccgtcacacaagtacaggtctcggccccagcggcaacagctcctgtggcttctccagccccagcacgcaatccggggcttcattatgagccaacccagagctgtggggaaaggagtcggggaaccacctggaggctgaaattcggatggagccctcagctctcaggcaccctccttcgtgaagccttcccaagtctccctgtggtttatcacacgcttatgtgtgttgatgtatcaggcacatattgcctaagaattcacggcctcctgcacaagcaacagtcgctgcttgctgttactgtgggctccacgttgggatcagacacacctgtcttcagtggcttgcagttgcagcaaggaccgaatgtgagtgaaagcactttgtgcctggaaatggacagaacattgaaatatgatgccccgaaaatcgtccagaagacagaagctattcagtcaacctgctactgtttcctggatgttatgtccagccgcacttctgtgtcagttcccctcagtcccagttccctcacaggtgacacagcaggctcagatgaatgccgtgtgtgcagcgtgaagcgtggagcttggagaaggcgctgtgcttacagcaagccagaagccagcctgctgtttgcctggaggatcatggggaggggtcaatgttacctcacctctcagagttatcagctggacctgagaaatgggccagctaagggacactcagggccttgcagttgtggcatgctcagcaagggacagggatctccatctactgagcccacctggaagctgcagggtggagctctagtgtccaaccaggtccatctcccagagtgctcggcagggcagaggagcatgggcagcagtctggaagagcaaaagaaatcgggcacaaaattcctaaggagacaccctgccagcaccccatgctacccacggcccactccaacagcacctcaatattacgcataccctgatcctacccacacctcacttctacccgtgccctgccccaccagcaccccactcctagtgtgtccggaattggttccttttggtgcgttcttggtctcgctgacttcaagaatgaagctattgacccttgcgttccacatttttgggtatctttacggcagcacaccaccctactggtaccaacttactgtgttagtccattttcatgctgctgataaagacatacctgagactggtttgatgaacttacagcagagctggaaactatatcttcaaaaatgtctatatttggctaaaaagaatcaagttattcaacaggagttattatctatgaaagaagtacaacagaaatgtaaaaaacttgaggaggttaacaaaattttggaacaagaagtagtgaatcttaagacacatgaaaaaaatatggtagaatttggtgacgtagaagaatgtaaattgcagttggaagaaagagcaggacaggaaatagaaaaattagaagaaatcaatttacagcgagcctgccttagtgccaaaaaggtcagagcagaaggggagctggagccccgcagacatcacaatcacactcttggatttactgaaggcccatggggactcatgtctgtgattactggagcttatgatctaatcaggtga

SEQ ID NO: 118880 - DNA, 753 bp, Homo sapiens
atggctgccaaagtgtttgtgtccattggcaagtttggcctggccttagctgttgtaggaagcatgctgaactctgccttatataatgtggatgctggtcacagagctgtcatctttgaccgattctgtggagtacaggacattgtggtaggggaagggactcactttcctatcccatgggtacagaaaccaattatctttgactgccattctcgaccacttaatgtaccagtcatcactggtagcaaagacttacagaatgtcaacatcacactgcacatcctctcctggcctgtcgctagccagcttccttgcatcttcaccagcatcagagaggactatgatgagcgtgtgctgccatccatcactaccaagatcctcaagtcggtggtgtctcactttgatgctggagaactaatcacccagagagagctgctctccaggcaggagttcacagaagcagtggaagccaaagaggtggatcagcaggaagcagagagggccagatttgtggtggaaaaggctgagcagcagaaaatagcagccatcatctctgctgagggtgactccatggaagccaagctgatccccaactcactggccaccgcaggggacggcctgatcgagctgagcgtgctggaagctgcagaggacatcacataccagctctcagctctgagaacatcacctacctgcctcctccagctgtcccagtgggggcccaccctgcctgcacctctgcaggctgactag

SEQ ID NO: 118881 - DNA, 410 bp, Homo sapiens
  misc_feature (1)...(410): n = a,t,c or g
caggatgggtctcttgtcaaaatcagnnnnnnnnnnnnnnnnnnnnnnnnnnnnnnnnnnnnnnnnnnnnntatgacctctnnnnnnnnnnnnnnnnnnnnnnnnnnnnnnnnnnnnnnnnnnnnnnnnnnnnnnnnnnnnnnnnnnnnnnnnnnnnnnnnnnnnnnnnnnnnnnnnnnnnnnnnnnnnnnnnnnnnnnnnnnnnnnnnnnnnnnnnnnnnntggagttcagagtggaaacaggtgtgagagggttcaacagaagaaaacatagctgccaagtgtttgagtccatcggcaagtttggactggccttatctgttgcagaaggcatggtgaactctgccttatataacatggatgctgggcacagaactgtcatctttgaccgattctgtggagtacaggac

SEQ ID NO: 118882 - DNA, 410 bp, Homo sapiens
  misc_feature (1)...(410): n = a,t,c or g
caggatgggtctcttgtcaaaatcagannnnnnnnnnnnnnnnnnnnnnnnnnnnnnnnnnnnnnnnnnnntatgacctctnnnnnnnnnnnnnnnnnnnnnnnnnnnnnnnnnnnnnnnnnnnnnnnnnnnnnnnnnnnnnnnnnnnnnnnnnnnnnnnnnnnnnnnnnnnnnnnnnnnnnnnnnnnnnnnnnnnnnnnnnnnnnnnnnnnnnnnnnnnnntggagttcagagtggaaacaggtgtgagagggttcaacagaagaaaacatagctgccaagtgtttgagtccatcggcaagtttggactggccttacctgttgcagaaggcatggtgaactctgccttatataacatggatgctgggcacagaactgtcatctttgaccgattctgtggagtacaggac

SEQ ID NO: 118883 - DNA, 411 bp, Homo sapiens
  misc_feature (1)...(411): n = a,t,c or g
caggatgggtctcttgtcaaaatcagannnnnnnnnnnnnnnnnnnnnnnnnnnnnnnnnnnnnnnnnnnntatgacctctnnnnnnnnnnnnnnnnnnnnnnnnnnnnnnnnnnnnnnnnnnnnnnnnnnnnnnnnnnnnnnnnnnnnnnnnnnnnnnnnnnnnnnnnnnnnnnnnnnnnnnnnnnnnnnnnnnnnnnnnnnnnnnnnnnnnnnnnnnnnntggagttcagagtggaaacaggtgtgagagggttcaacagaagaaaacatagctgccaagtgtttgagtccatcggcaagtttggactggccttatctgttgcagaaggcatggtgaactctgccttatataacatggatgctgggcacagaactgtcatctttgaccgattctgtggagtacaggacc

SEQ ID NO: 118884 - DNA, 1170 bp, Homo sapiens
  misc_feature (1)...(1170): n = a,t,c or g
tgcgtgcgggcaattcgcacgagattcatgtggaggtcacgagtggaagcagttatcttggccccaggatgtcatccatctcctgcttccataagaagcatgtcgttcttaatacacgatgttgacaagcagtatggtgaggaggtgtgagaggtgttcagcagaaggaaacatgtgctttcaaagtgctagagtccattggcaagttgggccgtggccttatctgttgcaggaggcgcggagaactctgccttatataatgtggatgctgggcacagagctgtcatctttgaccgattccgtggagagcaggacattgtggtaggggaagggactcattttctcatcccgtgggtacagaaaccccaattatctttgactgccgttctcgaccacgtaactgtgccagtcatcactggtagcaaagatttacagaatgtcaacatcacactgcgcatcctctttccggcctgtcgccagccagcttcctcgcatcttcaccagcatcggagaggactatgatgagcgtgtgctgccgtccatcacaactggagaacctcaagtcagtggtggctccgtttgatgctggagaactaatcacccagagagagctggtctccaggcaggttgagcgacgacctttacagagcgagccgccacctttgggctcatcctggatgacgtgtccttgacacatctgaccttcgggaaggagttcacagaagcggtggaagccaaacaggtggctcaacaggaagcacagagggccagatttgtggtggaaaaggctgagcaacagaaaaaggcggccatcatctctgctgagggcgactccaaggcagctgagctgattgccaactcactggccactgcaggggatggcctgatcgagctgcgcaagctggaagctgcagaggacatcgcgtaccagctctcacgctctcggaacatcacctacctgcccancggggcagtccgtgctcctccagctgccccagtgaggggcccaccctgcctgcaccttccgcgggctgactgggcccacagccccggatgattcttaacaacagcctttcttttctgctcccaccccagaaaatcacttgtaaaatttcatgatttggccttaaagggaaggaaattaaagggtaaaattcacttcagatctct

SEQ ID NO: 118885 - DNA, 453 bp, Homo sapiens
  misc_feature (1)...(453): n = a,t,c or g
accagagggttgacccaaggaggacaattattttcttccccctccttgttatttcatatcattatttcctnnnnnnnnnnnnnnnnnnnnnnnnnnnnnnnnnnnnnnnnnnnnnnnnnnnnnnnnnnnnnnnnnnnnnnnnnnnnnnnnnnnnnnnnnnnnnnnnnnnnnnnnnnnnnnnnnnnnnnnnnngcagccactcccagagcccctggaactccggcccaaggctctctgactgactccttcccagatcttctcggcttagcggctgaagactgctgctcggttgcctcggaagccctgggctgtacttccgcaaggcttcacagacacacccccccacttcagtcaagcccaaatttcatcctcatctgttacctatctcagcataattctcgtaaaaacacacgtgctctgctctcccgaattccaccgcactggagtagtgat

SEQ ID NO: 118886 - DNA, 443 bp, Homo sapiens
  misc_feature (1)...(443): n = a,t,c or g
ccctgtgagagttacctagagcatctgtgatggtcctgtaggcttctgaggcgattgggcagtgtcagtcttcagctgctaagctgagaagatctgggaaggagtcagtcagagagccttgggccagagttccaggggctctgggagtggctgccaggtgagttgaacagtctgattttcagtagggtccggatttgaaattggtgagatgtttcttgggctggtcagtctgaggacttgaggttgtaggtggatctttctcatggagtaaagatcaggaggacaggggattgatctcccaaaggaggtcccccgatctgagtcacggcaccaaatttcatgcatgtcccnnnnnnnnnnnnnnnnnnnnnnnnnnnnnnnnnnnnnnnnnnnnnnnnnnnnnnnnnnnnnnnnnnnnnnnnnnnnnnnnnnnnacgtgagaa

SEQ ID NO: 118887 - DNA, 263 bp, Homo sapiens
catttttactcacgtcccctccactgtgagagttacccagagcatctgtgattgtcctgtaggcttccaaggcgattgggcagtgtcagtcttcagctgctaagccgagaagatctgggaaggagtcactcagagagccttgggccagagttccaggggatctggaagcggatgatttaaaattggtgagatgttccctggcctggtcggtctgaggaccagaggtcgtaggtggatctttcctcgtgccgaattcctgcagg

SEQ ID NO: 118888 - DNA, 741 bp, Homo sapiens
atgtctggccatctatgggggatagctcctgggagtctggaggtatatagggagaagctagcaattggcaaggccttgggaaacttggtacctaaactctcaggtggggagagactaacctgcatattggttggacagattaaagttgcaacaagagaagagatgtcagtctcagtagctatggagcatagaaaccaaaccaaaaacaagccacaggcgattcggcagtatcagtcttcagctgctaagccgagatctgggaaggagtcagtcagagagccttgggccagagttccaggggctctggaagtggctgccagatggactagagacttaaatgtaaaacccaaaactataaaagtcctggaagacaatctaggcaataccattcaagacacaggaactggcaaagatttcatgatgaagatggcaaaagcaattgcaacaaaagcaaaaattggcaagttggttctaattaaactaaggtgctactgcacagcaaagaaaactatcaacagagaaaacagacatcctatagaatgggaaaaaatatttgcaaactatgtatctgacaaaggtctaaaatctagcatctctaaggaacttaagcaagtttataagaaaaatacaaacaacaccattaaaaagtgggcaaaagacatgaacagacactttacaaaagaagatatagatgcagccaacaatcataggagaaaaaagctcaacatcactgatcattag

SEQ ID NO: 118889 - DNA, 526 bp, Homo sapiens
tctgttggaattcgagttggggagttttaagaggtttagaagcctggccgtcaacacccacaacagttatgaaggcaaaggaaacaggcccttgaaaagaaggtaacgtggagtgggtagcctccgtattgattaagaaggggacaggcttaccttccgctgtgagagttacgcgaagctcggcgtccgtgaatggtctagggggcttccgaggcgatcgtgcagtgtcagtcttcagctgctaagccgagaagatctgggaaggagtcagtcagagagccttgggctagagttccaggggctctgggagtggctgccagatgaatcctctgtctggccggccccaggttgtctgcttctttactgcacacatgttgacaaagaaaagggaagaaggagcctccatgttgaacatgccttgcttccagtgaaaggaagagatgatccaagcaaatttaggaccaatagcagactcttcacactgcctggggatagagggaccaccctgggctcctcttactcctgg

SEQ ID NO: 118890 - DNA, 385 bp, Homo sapiens
caagagcagcagaaaatgaacacattgcaggggccagtgtcattcaaagatgtggctgtggatttcacccaggaggagtggcggcaactggaccctgatgagaagataacatacggggatgtgatgttggagaactacagccatctagtttccttggcttatgaggtggcaacatcttgtacttcggagattctgaagccgagcaacttgcccaagtccttcttcttttcccattaacaagatatgatatcaccaagccaaacgtcatcattaagttggagcagggagaggagctgtggataacgggaggtgaatttccatgtcaacatagtcctgggatcgtgggactttaccaagatcggttgtaataacacctcgaagacgg

SEQ ID NO: 118891 - DNA, 520 bp, Homo sapiens
  misc_feature (1)...(520): n = a,t,c or g
acgttctgcattttatttctgcaggcaacacttttgctcaccagcaagaacacagcccgaggaagggacccaataacctttcaaaacgcaaactgctgcctgcggtgagggcccagggtcttccacggagaggacaggcatcttccttttccaccaggaaggagtgagcccggagcctctgctatgtgcaaggcggtgtgcaagcaccggctgcagctttttgctctcttctttctctttggggctgggctgggtgtgcgttctggtgctgatgctttggcctgtgagggtcggcaacttggacccgttcaattacagcaacgaagaagccaccgctaagcgtggtcttgggggaagcccggaggcagtgctcggcacccgggaacgtgctcaggcctcggtggggccgggcaggcagggcgggagctagcctgaaggcgcccgggttctgctgcagcgcatcttgtaccatgtcttcattctcctnctggcagagggagcacatggagtagacgagccg

SEQ ID NO: 118892 - DNA, 7011 bp, Homo sapiens
cgcttcctgcgcctcttcaggtcaccgcttgctctagttcccaggctttggcctctagtggatgagaatcaccgagtctgcggggctggacgctgaccgcccgggccagcacctaggcgggcgggagctgtgcggcccagggttcgcgcgggccgggtagaggctcgagccgggacccccgagcgtgaaccccggagccagcggcgctggggccagaggggccgggcgggaggtggtggcggaggcgaaggggcgacgggacctgggcctggcccgtgtgtgtcctcggcggcctggcgccggccgtcgctgtacggtgagccccagggaggcggatctgggccccgagaaggacacccgcctggatttgccccgtaggcccggcccgggcccctcgggagcagaacagccttggtgaggtggacaggaggggacttcgcgagcagacgcgcgcgccagcgacagcagcccgccccggcctctcgggagccgtggggcagaggctgcagagccccaggagggggccagtgtcattcaaagatgtggctgtggatttcacccaggaggagtggtggcaactggaccctgatgagaagataacatacggggatgtgatgttggagaactacagccatctagtttccctggcttatgaggtggcaacatcttgtacttcggagatctgaagccgagcaacttgcccaagtccttcttcttttcccattaacaagatatgatatcaccaagccaaacgtcatcattaagttggagcagggagaggagctgtggataacgggaggtgaatttccatgtcaacatagtccagcccttcacatcctcagccgaagatctcacttcctcccagaggcctttgctgactgacccctcagggattgtgggactttaccaaatcggtttgtaataacacctagaagacgctatccgatccatcaggcccagtattcctgtctgggggtacttcccaccgtgtgctggaatggttatcacaagaaggctgtgctgtcccctcgcaactccaggatggtgtgtagcccagtgactgtgaggatcgcccctcctgacagaagattttcgcgttctgcgataccagagcagataatcagctcaacactgtcctcaccatcaagtaacgccccagacccatgtgcaaaggagacagtactgagtgccctcaaagagaaggagaagaaaaggacagtggaggaagaagaccaaatattccttgatggccaggaaaataaaagaaggcgccatgatagcagtggcagtggacattcagcatttgagcccctggtggccaatggagtccccgcttcttttgtgcctaagcctgggtctctgaagagaggcctcaattctcagagctcagatgaccacttgaataagagatcccgaagctcttccatgagctccttgacaggcgcttacgcaagtggcatccctagctccagccgcaatgccattaccagttcctacagctccactcgaggcatctcacagctctggaagagaaatggccccagttcatcacccttctctagcccagcctcctcccgctcccagacaccggagaggccagcaaagaaaataagagaagaggagctgtgtcatcattccagttcttcaactccattggcagcagacagggagtcccagggagaaaaggctgcagatacaaccccaaggaagaaacaaaactcgaattctcagtctacacctggcagctctgggcagcgtaagcggaaagttcagctgctgccttctcggcgaggggaacagctgaccttgcctccacctccccagcttggctattcgatcactgccgaggacctagacttagagaagaaggcttcattacagtggttcaaccaggccttggaggacaagagcgatgctgcctcgaactctgtcactgagaccccacctatcactcagccttcatttacctttaccctgcctgctgctgcacctgcctccccacccacctccctcctggccccaagcaccaacccactgttagagagcttgaagaagatgcagactcccccgagcctgccaccctgcccagaatctgctggagcagcaaccactgaggccctctcacctccaaagacacccagcctcctacccccgctgggtttatcacagtcagggccgccagggctgctccccagcccctcctttgactccaaacccccgaccactttgctggggctgatccctgctccatccatggtaccagccactgacaccaaggcacctccaacccttcaggcagagacggctaccaaaccccaagccacatctgccccgtcccccgcccccaagcaaagcttcctgtttggaacacagaacacctcaccttccagccctgccgcccctgctgcatcttcagcacctcccatgttcaagcccattttcacggctccacccaagagtgagaaggaaggccccacaccgcctggcccttcagtcacagccacagcgccctccagctcctccctccccacgaccaccagcaccacagccccgaccttccagcctgtctttagcagcatggggccacctgcatctgtgcccttgcctgctcccttcttcaagcagacaactactcccgccactgctcccaccacaactgccccgctcttcactggcctggccagcgccacctctgctgtggctcccatcacctctgccagtccatccacagactctgcttcgaagcctgcgtttggctttggcataaacagtgtgagcagcagcagtgtgagtaccacgaccagcaccgccactgccgcctcacagcctttcctcttcggggcgccccaggcctctgctgccagcttcaccccggccatgggctccatattccagtttggcaaacctcctgccttgcccacaaccaccacagtcaccaccttcagccagtccctgcacactgccgtgccaacggccaccagcagcagcgctgccgactttagtggttttggcagcaccctcgccacctccgccccggccaccagcagccagcccactctgacgttcagtaacacgagcacccccacgttcaacattccctttggctcaagcgccaagtccccgctcccatcatatccgggagccaacccccagcccgcatttggggccgctgaggggcagccaccgggggccgccaagccggcccttgcccccagctttggcagctctttcacttttggaaactctgcagccccggctgctgcacccacacctgcacctccgtccatgatcaaggtcgtgcctgcgtacgtgcctacgcccatccatcctatctttggcggtgccacgcactcggcgtttgggttgaaagccacggcttcggccttcggcgctcccgccagctcacagcccgcctttggcggctccactgctgtcttcttcggtgcagccaccagctccggctttggagccaccacccagaccgccagcagcgggagcagcagctcggtgtttggcagcacaacaccatcacccttcacgtttgggggttcggcagcccccgctggcagtgggagctttgggatcaacgtggccaccccaggctccagcaccaccaccggagctttcagctttggagcaggacagagtgggagcacagccacctccacccccttcgcagggggcttaggtcagaacgccctgggcaccaccggccagagcacaccgtttgccttcaacgtgagcagcacaactgagagcaaacctgtgtttggaggcaccgccacccccacctttggtctgaacacccctgcgcctggagtgggcacatcaggcagcagcctctcctttggggcatcctcagcacccgcccaaggctttgttggtgttgcacctttcggcaacacttttgctcaccagcaagaacacagcccgaggaagggacccaataacctttcaaaacgcaaactgctgcctgcggtgagggcccagggtcctccacggagaggacaggcatcttcctttcccaccaggaaggagtgagcccggagcctctgctatgtgcaaggcggtgtgcaagcaccggctgcagctttttgctctcttctttctctttggggctgggctgggtgtgcgttctggtgctgatgctttggcctgtgaggctgagctagagaaatgtagatgttagatgtgccagtaccatcctgcgcctcccaagcatgcccccactcactcacgtcggcatctcgacccgttcaattacagcaacgaagaagccaccgctaagcgtggtcttgggggaagcccggaggcagtgctcggcacccgggaacgtgctcaggcctcggtggggccgggcaggcagggcgggagctagcctgcaagagaaacagccccaatgctgggtaagagagcagttcaccccatccccccctccacgaccctggcgcacgccctgtacctgaaggcgcccgggttctgctgcagcgcatcttgtaccatgtcttcattctcctcctggcagagggagcacatggagtagacgagccgctgcagggaagggaaagtgagcgcgtggcacagggctcgctgctggaaccctgccagggcatgcagacgcaccgggctaggtgtccctgccccgggctcctccagctgtctgctcggcatacctaaggaaaagcgtgtctcggttacacagcttcacaggctgcctcagtcctgaaatcctcgctcctgaaatcctcgcttcacagaggagaacttttgctccagggtcccaagcccattaaagtgtcagaactaagaccaaaacagatgactccaggtctaagctgctgtggacctctgagtccctcagccacgccttctcaccatctcacccgagccactgcaggaaggatccagcaggacatagtggacctcacgatagcgcggatctaagggggagaccgccaggaagtcctcctcagccagctcacagcaggagacgccagcccaggccagcagcgtggccatggatgccagccgcctggcatccaggtcaaaggcaaagatcttcctagggcagagggcagagcaggggtgagctgagcatgcatggagcagctaagggcctgtcacagctgacacagacaaccagaacatgcaggttaagccaggacacacaatattgaaacagcctatatttaaagggcccagggtcagaggtaactggcctggggtctctgccccaagggctaagggatccacatctcacacctgcagtggggaaagcttagcttggggcaaataccgtgaactactttggtgcagcaggaaagagttaagcgaaagtcatcctttcagccttcattacccactgaaaggcacaaaatcaaaccccatgtcctcctcctcctcctgtggcactcacccttggttcttcagaagagcagccaagtgactggtctttattgcctggggtggcacaggcatccatgacatgggagcctggcgggggtccagcagcatggctgggagacagctggcctggcaggcagaacacaggggccgggtaaacagagaccccaggctaggcccttcccgtgcctacacattcttcccttttctattcctcttgcctaccctgtcctgcagaatgaggtgtccggcccggtacagtgggtgttcatgcagatctgtctgggcgggaaacaccagcagctccggcatcaaggggtccaggagaaaatgcttccccttgagggctcgtaagtcatcgaggctgccagggaagaaccattcattcatcatttcctgaatttctccctgccaggccctatttcaacggtccattcatgcaacaaatgttaccacagctatggagaaatcaacagggtgataagggaatccgggatccgcagttgagggaatgggttgtcaagccagacttatgggtcaggagccccctctactgtttaccagcagtgggagcctgggcaagtgattcaatctcaagccccactggcatctctgtaaaatagtaggtgtgaggattcaatgagccaatatatccaagatacttacgtgccacaatttaataaatgttagctattcctgttgaagcataaccttggagaaaggttactttacaggggggtgaggagtggggaagtgagagctgagctcattcttgatggatgaggagttagtcatgtgaggcgcttaggttaaaactacattcactataactcagtaaagcagtcccgcccactctccgacccatgcagaaataggcctagagagtcacatgtctcagttcagaaatctatcgaagtggcagagctggaattcaaacacaagcagccgttctctgctattccaccctggtgtccaagcaacatggtagggcagaaggaagaggatcttacaaagagtaagggaaagggagaggggcagaggctgcttctcagagccaccaaaggacaaaataagacaggtgtgagcccagtggaggaggcacggggcagagaccagccactgttgctggcacgctggtgcacgtagcactgtggcagatggacctggagaggaagcaggagggacagcacaatggagccaagaaaggacttagcatggccgggcgcggtggttcatgcctgtaatcccagcattttgggaggccaaggtgggcagatcacctgaggtcaggagtttgagaccagcctggccaacatggagaaatcccgtctctactaaaaatacaaaattagccaggcatggtgctgcatgcctgcaatcctgtagggaaaagaaagagagatcagactgttactgtgtctgtgtagaaagggaagacataagaaattccattttgacctgtaccttgaacaattggttggctgagatgctgttaatttgtgactttgccccaaatttgagctcacaaaaacatgtgttgtatggaatcaaggtttaaaggatctagggctgtgcaggacatgccttgttaataaaacgtttacaagc

SEQ ID NO: 118893 - DNA, 197 bp, Homo sapiens
gtggcaaaatatccaaagaaagggtcccaagcggtacatcgtcatagccggaaacagtcagagccaccagccaatgatattttcaatgctgcgaaagctgccaaaagtgacatgcaggactggatggtttccatgatcgtggacagagagtacagtgtggcagtggaggccgtcagattactgatacttatccttaa

SEQ ID NO: 118894 - DNA, 431 bp, Homo sapiens
  misc_feature (1)...(431): n = a,t,c or g
gggaagcgctcaagtaatttaatatatggtatnnnnnnnnnnnnnnnnnnnnnnnnnnnnnnnnnnnnnnnnnnnnnnnnnnnnnnnnnnnnnnnnnnnnnnnnnnnnnnnnnnnnnnnnnnnnnnnnnnnnnnnnnnnnnnnnnnnnnnnnnnnnnnnnnnnnnnnnnnnnnnnnnnnnnnnnnnnnnnnnnnnnnnnnnnnnnnnnnnnnnnnnnnnnnnnnnnnnnnnnnnnnnnnnnnnnnnnnnnnnnnnnnnnnnnnnnnnnnnnnnnnnnnnnnnnnnnnnnnnnnnnnnnnnnnnnnnnnnnnngctctccacaaagaaggacagcagaagctggaagaaagtcctctgagcacctgggctctggcgttgctctctatccacccatcgttctgtcgggnncgtggctcgacccgggaaggcgt

SEQ ID NO: 118895 - DNA, 584 bp, Homo sapiens
ccgggagccgtggggcagaggctgcggagccccaggagggtgatttctgcctttgcaggccggagccctcatgacttcagtgacctgcttctgcccctctaggtctatcagccacagtctctgcatgtttccaagagcagcagaaaatgaacacattgcaggggccagtgtcattcaaagatgtggctgtggatttcacccaggaggagtggcggcaactggaccctgatgagaagataacatacggggatgtgatgttggagaactacagccatctagtttccttggcttatgaggtggcaacatcttgtacttcggagattctgaagccgagcaacttgcccaagtccttcttcttttcccattaacaagatatgatatcaccaagccaaacgtcatcattaagttggagcagggagaggagctgtggataacgggaggtgaatttccatgtcaacatagtcctggtaagttagtagagtatcaaatgttaaaaaatgctcatcccagacctttgggagtgactaaagagttgtttatatgtattcggtaccctcagtaacacctcccaacccccaaatatc

SEQ ID NO: 118896 - DNA, 372 bp, Homo sapiens
gtacagtggttgttcatgcagatctgtctgggcgggaaacaccagcagctccggcatcaaggggtccaggagaaaatgcttccccttgagggctcgtaagtcatcgaggctggaagcccgaccctgataggagaaaccttgtctcttgaaataatcaactacatcatcggagcaggtcttgagagtgttcacacgcacaaatcgaggcagctgggaggctggaccaggcctggatcccacttccaacaggtcctcattccggctcacaccccgatgaaccttgagccgagccaactcagccttgagcctcgcctggtgccggcccaacagagccttccatcggcccccaccccctcgaaagccctttcccaa

SEQ ID NO: 118897 - DNA, 496 bp, Homo sapiens
aatacaatggggggaagcgcgttaaaccagggagtcctggaaggggacgacgcccccggccaggtgagggcccagacgtgggggcgtagacgctgaggggtggccgggtgggtctgcggctctgaggcctggctttcattctccatcagtccctgtacgagcggttaagtcagaggatgctggacatctcgggggaccggggcgtgctgaaggacgtcatccgagaaggagctggagacctagtggcgcctgatgcttcggtgctaggtacgccctggggcggtttgtccgcaggatccatgtcatcgcactcttgctctccacaaagaaggacagcagaagctggaagaaagtcctctgggcacctgggctctggcgttgctctcttccacccatcgttcttatctcgcactcagggtagaaaagtttccagtacagaaattcacccacagcagaggccaggcctcaattagaggcctacacaatggggtagacg

SEQ ID NO: 118898 - DNA, 3895 bp, Homo sapiens
  misc_feature (1)...(3895): n = a,t,c or g
gcaggacgcctgagagcttgaggccacacgaggctgtggagcggcgtgactcaaacgtggcgcgcatcagctcgcacacttccaaacctcgcgatagctactggccctgggcgagccgttgggattgcgcttgcgcacagcgtgtcttctggatcgccatacctaccctgtggtcctcatcttcctggcctcatagctcctcctcgccaagcatgtccaccccgttgcaaagagctgtgggagataccaagagggccttgtctgcatcttctagttcctctgccagtctaccctttgatgacagggactcaaaccatacctcagaggggaatggcgactctttgttagctgatgaagacactgactttgaagacagcttgaatcgcaatgtgaagaagagagcagcaaaacgaccaccgaaaacaacaccggtggcaaaacatccaaagaaagggtcccgagtggtacatcgtcatagccggaaacagtcagagccaccagccaatgatcttttcaatgctgtgaaagccgccaaaagtgacatgcagtctttggtagatgagtggctggatagctacaagcaagaccaggatgcaggatttctggagcttgttaactttttcatccaatcttgcggatgtaaaggcattgtgacccctgagatgttcaagaagatgtccaactcagagatcatccagcacctaacagagcagtttaatgaggactcgggggactaccctctcatagctccaggtccatcctggaagaagttccagggcagcttctgtgaatttgtgaggacattggtctgtcagtgccagtacagcctcctctatgatggcttccctatggacgacctcatctccctgctcactggcctctcagactcacaagtccgcgccttccgtcacactagcaccctggctgctatgaaactgatgacctccctggtaaaagttgccctccaactgagtgtgcaccaagataacaatcagcgtcagtatgaggctgaaagaaacaaggggccagggcagagggcacctgagcggctggagagcctgttggagaaacgcaaagagctccaagagcatcaagaggagattgaggggatgatgaatgccctcttcaggggtgtctttgttcatcggtacagggatgtccttcctgagatccgtgctatctgcattgaggaaattgggtgttggatgcaaagctacagcacgtctttcctcaccgacagctatttaaaatatattggttggactctgcatgataagcaccgagaagtccgcctgaagtgtgtgaaggccctgaaagggctgtacggtaaccgggacctgaccacacgcctggagctcttcaccagccgcttcaaggaccggatggtttccatggtcatggacagagagtacagtgtggcagtggaggccgtcagattactgatacttatacttaagaacatggaagggttgctgacggacgcggattgtgagagcgtctaccccgttgtgtatccttctaatcgaggcctggcttctgccgcaggcgaatttctgtactggaaacttttctaccctgagtgcgagataagaacgatgggtggaagagagcaacgccagagcccaggcgcccagaggactttcttccagcttctgctgtccttctttgtggagagcgagctccatgaccacgctgcttacttagtagacagtctgtgggactgtgcaggggctcggctgaaggactgggagggtctgacaagcctgctgctggagaaggaccagaacctgggtgatgtgcaggagagcacactgatagaaatccttgtgtccagtgcccggcaagcttcagaggggcacccgcctgtgggccgggtcactgggaggaagggcttaacctctaaggagcgcaagacccaagccgatgacagggtgaagttgactgagcacctcatccccctgctgccccagctcctggccaagttctcagctgatgcagagaaggtcactcccctgctccagcttctcagctgctttgacctccacatctactgcactgggcgcttggagaagcacctggagctgttcctgcagcaactccaggaggtggtggtgaagcatgcagagccagcggtgcttgaggctggggcgcatgccctctacctgctctgtaatcccgaattcactttcttcagccgggcgggacttttgcccgcaagccaagctagtagcatttgctgactgaccgcttccagcaggagcttgaagagctgttacagtcgtccttcctagatgaggatgaggtatataatctggcagccactctgaaacgcctctctgccttctacaacactcatgacctgactcgctgggagctctatgagccatgttgccaactcctgcagaaggctgtggacacaggagaggttcctcaccaggttatcctgccagccttgactcttgtctatttttccattctctggacactaacccacatttctaaatcagatgcttcccagaagcagctgtcgagtttgagggacagaatggtggccttctgtgaactctgccagagttgcctctcagatgtggatactgagatccaggagcaggcttttgtcttattaagtgatctacttctcatctttagccctcagatgatagttgggggccgtgatttccttaggccacttgtcttttttcctgaagctactctccagtctgagctagccagcttcctcatggaccacgtcttcatccagccgggagacctgggcagtggtgattcccaggaggatcatttacagatagagcggctacaccagcggcgccgcctcctagccgggttctgcaagctgttgctttatggggtgctggagatggatgcagcctcagatgttttcaaacactacaacaagttctacaatgactatggtgacattatcaaggaaacattaactagagcaaggcagattgaccgaagtcattgttcccgaatcctgctgctgagcctnaagcagctgtacacagaactgctgcaggagcatgggccccagggcctgaatgagcttcctgccttcatcgagatgagggacctggcccggaggtttgccttgagttttggaccccagcagctgcagaaccgtgacctcgtggtcatgctacacaaggaaggcatccagttctccttgtctgagcttcctccagctggctcctccaatcagcctccaaatctggcattcctggagctcctttcagagttttccccccgactcttccatcaggacaagcagcttttgctgtcctatctagaaaagtgcctgcagcatgtctcccaggcacctggccatccctggggcccagtcaccacctactgccactccctcagccctgtggagaacacagcagagaccagccctcaggtcctccccagctccaagaggaagcgcgttgaagggcctgccaagcctaacagagaggacgtctcctcgtcccaggaagaaagtctgcagctgaacagcatcccgcccacgcccaccctcacctccacagctgtgaagagcaggcagcccctgtgggggttgaaagagatggaggaagaagatggctcagagttggattttgcccaggggcagcccgtcgcaggcaccgagaggtcaaggttcttgggtccacaatatttccagactccacacaacccttcaggtcctggcctgggcaaccagctgatgcgactcagccttatggaagaggacgaggaagaagagttagaaatccaggatgagtcaaatgaagaacggcaggatacagacatgcaagcaagtagctactcttccaccagtgagcgcgggctggacctcttagattctacagagctggatattgaggatttctga

SEQ ID NO: 118899 - DNA, 639 bp, Homo sapiens
ttttttggtagagacagggtctcactatgttgcccaagctggtctcaaactcctgggctcaaaggatcctcccacctcagcctcccaaagtgttgggcttacaggcgtgaaccaccaaccccagcccacttgtaggtcctatgcacaacagccagagttatctctgtgtatgtcaccttgctctccacaaagaaggacagcagaagctggaagaaagtcctctgggcacctggggctctggcgttgctctcttccacccatcgttcttatctcgcactcagggtagaaaagtctggtgggaatggacacaagggaaagggctcagcacaggagggaaacaaggaggtgtaattgattgaccacagagggaggagatggcccaaggagatgataaaggaaaaggaggtgcagagctaaggaaagccccaaggagctgagagaggaaaagagacagcagagagacttccacggagatggggaggccttaagtagggcagcagcacatgtgggagagaaaccgagagggtggtgttaaagaaacgtaaaaggagccccactcactttcagtacagaaattcacccacagcagaggcgcaggcctcaattagaggccctacacatggggtagacgcctctaca

SEQ ID NO: 118900 - DNA, 3019 bp, Homo sapiens
atggtgtgtagcccagtgactgtgaggatcgcccctcctgacagaagattttcgcgttctgcgataccagagcagataatcagctcaacactgtcctcaccatcaagtaacgccccagacccatgtgcaaaggagacagtactgagtgccctcaaagagaaggagaagaaaaggacagtggaggaagaagaccaaatattcctttgatggccaggaaaataaaagaaggcgccatgatagcagtggcagtggacattcagcatttgagcccctggtggccaatggagtcaccgcttcttttgtgcctaagcctgggtctctgaagagaggcctcaattctcagagctcagatgaccacttgaataagagatcccgaagctcttccatgagctccttgacaggcgcttacgcaagtggcatccctagctccagccgcaatgccattaccagttcctacagctccacttcgaggcatctcacagctctggaagagaaatgggcccagttcattaaccttcttcttagcccagccttcttcccggtttccaagacaccggagaggccaagcaaaagaaaattaggagaagaggaactttgtcatcattccagttcttcaactccattggcagcagacagggagtcccagggagaaaaggctgcagatacaaccccaaggaagaaacaaaactcgaattctcagtctacacctggcagctctgggcagcgtaagcggaaagttcagctgctgccttctcggcgaggggaacagctgaccttgcctccacctccccagcttggctattcgatcactgccgaggacctagacttagagaagaaggcttcattacagtggttcaaccaggccttggaggacaagagcgatgctgcctcgaactctgtcactgagaccccacctatcactcagccttcatttacctttaccctgcctgctgctgcacctgcctccccacccacctccctcctggccccaagcaccaacccactgttagagagcttgaagaagatgcagactcccccgagcctgccaccctgcccagaatctgctggagcagcaaccactgaggccctctcacctccaaagacacccagcctcctacccccgctgggtttatcacagtcagggccgccagggctgctccccagcccctcctttgactccaaacccccgaccactttgctggggctgatccctgctccatccatggtaccagccactgacaccaaggcacctccaacccttcaggcagagacggctaccaaaccccaagccacatctgccccgtcccccgcccccaagcaaagcttcctgtttggaacacagaacacctcaccttccagccctgccgcccctgctgcatcttcagcacctcccatgttcaagcccattttcacggctccacccaagagtgagaaggaaggccccacaccgcctggcccttcagtcacagccacagcgccctccagctcctccctccccacgaccaccagcaccacagccccgaccttccagcctgtctttagcagcatggggccacctgcatctgtgcccttgcctgctcccttcttcaagcagacaactactcccgccactgctcccaccacaactgccccgctcttcactggcctggccagcgccacctctgctgtggctcccatcacctctgccagtccatccacagactctgcttcgaagcctgcgtttggctttggcataaacagtgtgagcagcagcagtgtgagtaccacgaccagcaccgccactgccgcctcacagcctttcctcttcggggcgccccaggcctctgctgccagcttcaccccggccatgggctccatattccagtttggcaaacctcctgccttgcccacaaccaccacagtcaccaccttcagccagtccctgcacactgccgtgccaacggccaccagcagcagcgctgccgactttagtggttttggcagcaccctcgccacctccgccccggccaccagcagccagcccactctgacgttcagtaacacgagcacccccacgttcaacattccctttggctcaagcgccaagtccccgctcccatcatatccgggagccaacccccagcccgcatttggggccgctgaggggcagccaccgggggccgccaagccggcccttgcccccagctttggcagctctttcacttttggaaactctgcagccccggccccggctactgcacccacacctgcacctgcgtccacgatcaagatcgtgcctgcgcacgtgcctacgcccatccagcctacctttggcggtgccacgcactcggcgtttggattgaaagccacggcttccgccttcggcgctcccgccagctcacagcccgcctttggcggctccactgctgtcttctccttcggtgcagccaccagctccggctttggagccaccacccagaccgccagcagcgggagcagcagctcggtgtttggcagcacaacaccatcacccttcacgtttgggggttcggcagcccccgctggcagtgggagctttgggatcaacgtggccaccccaggctccagcgccaccaccggagctttcagctttggagcaggacagagtgggagcacagccacctccacccccttcacagggggcttaggtcagaacgccctgggcaccaccggccagagcacaccgtttgccttcaacgtgggcagcacaactgagagcaaacctgtgtttggaggcaccgccacccccacctttggtcagaacacccctgcgcctggagtgggcacatcgggcagcagcctctcctttggggcatcttcagcacccgcccaaggctttgttggtgttgcacctttcggcaacacttttgctcaccagcaagaacacagcccgaggaagggacccaataacctttcaaaacgcaaactgctgcctgcggtgagggcccagggtcctccacggagaggacaggcatcttcctttcccaccaggaaggagtga

SEQ ID NO: 118901 - DNA, 1668 bp, Homo sapiens
tagcgtgaattccttgctttggttgcgccatgccgatgtaccagacaagaagacaagaaaatgatttgaggacagcttctatcgcggtgtgaagaagaaagcagcaggacgaccactgaaaacaacgccggtggcaaaatatccaaagaaagggtcccaagcggtacatcgtcatagccggaaacagtcagagccaccagccaatgatattttcaatgctgcgaaagctgccaaaagtgacatgcagggatgtccttcctgagatccgtgctatctgcattgaggaaattgggtgttggatgcaaagctacagcacgtctttcctcaccgacagctatttaaaatatattgggtggactctgcatgataagcaccgagaagtccgcgtgaagtgcgtgaaggctctgaaagggctgtacggtaaccgggacctgaccgcacgcctggagctcttcactggccgcttcaaggactggatggtttccatgatcatggacagagagtacagtgtggcagtggaggccgtcaagattactgatacttatccttaaagaacatggaaggggtgctgatggacgtggactgtgagagcgtctaccccatttgtgtaggcctctaattgagccctggcctctgctgtgggtgaatttctgtactggaaacttttctaccctgagtgcgagataagaacgatgggtggaagagagcaacgccagagcccaggtgcccagaggactttcttccagcttctgctgtccttctttgtggagagcaagtctcattttgtcacccagggtggaggcagtgggcagttctcggctcaccgaaacctttgcctcccgggctcaggcaattttcatgtctcagcctcccgagtagctgggattgcgggtgcacccccccacacctggctgatttatgtatttttttcgtaaaaacggggttttcccgtgttggccgggctggtctcgagctcctgacctcgggtgatccgcccgcctcggcctcccaaagtgctgggcttacaggcgtgagccaccaaccccagcccacttgtaggtcctatgcacaacagccagagttctctctgtgtatgtcaccttgctctccacaaagaaggacagcagaagctggaagaaagtcctctgggcgcctgggctctggcgttgctctcttccacccatcgttcttatctcgcactcagggtagaaaagtttaaggataagtatcagtaatctgacggcctccactgccacactgtactctctgtccacgatcatggaaaccatccagtccttgaagcggccagtgaagagctccaggcgtgcggtcaggtccccggtaccgtacagccctttcagagccttcacgcacttcacgcggacttctcggtgctggtgaggagggaaaaccaagagaatggaaataagaccaaccacactctactcgcccctactgagcgtccagactcccctctccgatccctcattctagcttgggtgtcccctctactgaggactctgagatgtcagaaacaatgaacagctgtcttcatacttaaaaaaaaaaaaggatcacagcagtactcatgatgagaaggatcctttggctgccccttagcacctgcattaccatccatcaataaatctcttccattggaaagtcaaa

SEQ ID NO: 118902 - DNA, 1752 bp, Homo sapiens
atggtccaggcactgaaatacaccaggggacaaaatgaagtccccactctcatgcaccagagagtgcaaacaggggagtgtccagacacaaacaaggggcgtctatcagccacagtctctgcatgtttccaagagcaacaggaaatgaacacattgcaggaccctttgtctgcctttgacatccgttacttcgaaactgatattttctccatggagtctctcttttcttggcttttaaaaagattcatctttgtagataatgagcattttattaatacctatcttagtgggaaggggccagtgtcattcaaagatgtggctgtggatttcacccaggaggagtggcggcaactggaccctgatgagaagataacatacggggatgtgatgttggagaactacagccatctagtttccttggggccacctgagcgaggggtatggccagctgtgcagcatctacctgaaactgctaagaaccaagatggagtaccacaccaaagatccttggtgctgtaccagcctcatgcaagctattcaggtgctatcgtggcctctaaggacctccagagagagattgtggagagcggcaggcaccgagaagtccgcgtgaagtgcgtgaaggctctgaaagggctgtacggtaaccgggacctgaccgcacgcctggagctcttcactggccgcttcaaggactggatggtttccatgatcatggacagagagtacagtgtggcagtggaggccgtcagattactgatacttatccttaaacttttctaccctgagtgcgagataagaacgatgggtggaagagagcaacgccagagcccaggtgcccagaggactttcttccagcttctgctgccttcttttggagagcaagtccagtgcctggtgaatagcaggccctcaaccataaaagaatgcttgctttttgaaaaacagcaggctaccagccttgatgacttacaagccctcaaggggaagcattttctcctggactccttgatgccggagctgctggtgtttcccgcccagacagatctgcatgaacacccactgtaccgggccggacacctcattctgcaggacaggcggctggcatccatggccacgctgctggcctgggttggcgtctcctgctgtgagctggctgaggaggacttcctggcggtctcccccttagatccgcgctatcgtgaggtccactatgtcctgctggatccttcctgcagtggctcgggtgagatgcggctcgtctactccatgtgctccctctgccaggaggagaatgaagacatggtaccagatgcgctgcagcagaacccgggcgccttcaggctagtcccgccctcctgcccgccccaccgaggcctgagcacgttcccgggtgccgagcactgctccgggcttcccccaagaccacgcttaggtggcttcttcgttgctgtaattgaacgggtcgagatgccgacgcctgggtctctgaagagaggcctcaattctcagagctcagatgaccacttgaataagagatcccgaagctcttccatgagctccttgacaggcgcttacacaagtggcatccctagctccagccgcaatgccattaccagttcctacagctccactcgaggcatctcacagatcacctcctctccacggtcacatccatttccagctgcatcgagcaactggagaaaagctggagccagtatctggcctgcccagaagtcgtcatatgagtga

SEQ ID NO: 118903 - DNA, 1422 bp, Homo sapiens
ggaattcagtatcttggatatattggctcattgaatcctcacacctactattttacagagatgccagtggggcttgagattgaatcacttgcccaggctcccactgctggtaaacagtagagggggctcctgacccataagtctggcttgacaacccattccctcaactgcggatcccggatttccctaacaccccggtggatttcccaaaaccggtggaaccattggtggcatgaatggaccgttgaaatagggcctggcagggagaaattcaggaaatgatgaatgaatggttcttccctggcagcctcgatgacttacgagccctcaaggggaagcattttctcctggaccccttgatgccggagctgctggtgtttcccgcccagacagatctgcatgaacacccactgtaccgggccggacacctcattctgcaggacagggccacctgtctcccagccatgctgctggaccccccgccaggctcccatgtcatcgatgcctgtgccgccccaggcaataaagaccagtcacttgggctgctcttctgaagaaccaagggaagatcttttgccttttgacctggatgcaaagcgggctggcattcatggcccacgctgctggcctggggttggcgtctcctgctgtgagctggctgaggaggacttcctgggcggtctcccccttagaatccgcgctatcgtgaggtccactatgtcctgctggattccttcctgcagtggctcgggtgagatggtgagaaaggcgtggctgagggactcggaggtccacagcagcttagacctggagtcatctgttttggtcttagttctgacactttaatgggcttgggaccctggagcaaaagttctcctctgtgaggcaaggatttcaggagcgaggatttcaggactgaggcagcctgtgaagctgtgtaaaccgagacacgcttttccttaggtatgccgagcagacagctggaggatcccggggcagggacacctagcccggtgcgtctgcatgccctggcagggttccagcagcgagccctgtgccacgcgctcactttcccttccctgcagcggctcgtctactccatgtgctccctctgccaggaggagaatgaagacatggtaccagatgcgctgcagcagaacccgggcgccttcaggctagctcccgccctgcctgcccggccccaccgaggcctgagcacgttcccgggtgccgagcactgcctccgggctttcccccaagaccacgcttagggttggcttcttcgttgctgtaattgaacgggtcgagatgccgacgttgaattgaagttggggggcatgctttggggaggcgcagggatggtactgggacattctaacatctacacttctctagctcaggctcacaggccaaagcatcagc

SEQ ID NO: 118904 - DNA, 1883 bp, Homo sapiens
ccgaacgctcgcagcagggtcagaagggaggtggtcgccctccgtcgtggtctggcgtgtattccgagcgttggtgtctggcggtttccgagcgttggtgtctggcggtttctgaccgttggtgtctggcggtttccgaccgttggtgtctggcacgcgccaccctctcttgctttggttgcgccatgccgatgtaccagacaagaagacaagaaaatgatttgaggacagcttcaatcgcggtgtgaagaagaaagcagcaaaacgaccactgaaaacaacgccggtggcaaaatatccaaagaaagggtcccaagcggtacatcgtcatagccggaaacagtcagagccaccagccaatgatattttcaatgctgcgaaagctgccaaaagtgacatgcagcaccgagaagtccgcgtgaagtgcgtgaaggctctgaaagggctgtacggtaaccgggacctgaccgcacgccttgagctcttcactggccgcttcaaggactggatgggtttccatgatcatggacagagagtacagtgtggcagtggaggccgtcagattactgatacttatccttaagaacatggaaggggtgctgatggacgtggactgtgagagcgtctaccccattgtacttttctaccctgagtgcgagataagaacgatgggtggaagagagcaacgccagagcccaggtgcccagaggactttcttccagcttctgctgtccttctttgtggagagcaagctccacgaccacgctgcttacttagtagacaacctgtgggactgtgcagggactcagctgaaggactgggagggtctgacaagcctgctgctggagaaggaccagagcacgtgccacatggagccagggccagggaccttccacctcctagggtgaaaccaggagagattgcttgcttcacttgtacaaggcaggaacggtggcatggggtgggggaaacttggagttggaaggtggctaatctttgattctatgtttttgatcctcctggcactccagacctgggtgatgtgcaggagagcacactgatagaaatccttgtgtccagtgcccagcaactcctgcctcagcctcccgagcagctgggactacaggcatgtgacactatgcctggctaattttttttgttatttttaagtagagacggggttttgccatgttggcccaggcaggtggatcacttgaggccagaatttgagaccagcctggccaacatggcgaaaccctgtgtcactcttttagacccttctgagtgtttgcaggttgagtgttcacagggtgttagcctattgagctttcttttgtggttcttatgcaggtgatttctgcctttgcaggccggagccctcatgacttcagtgacctgcttctgcccctctaggtctatcagccacagtctctgcaagtttccaaagagcagcagaaaatgaacacattgcaggggccagtgtcattcaaagatgtggctgtggatttcacccaggaggagtggcagcaactggaccctgatgagaagatagcatacggggatgtgatgttggagaactacagccatctagtttctgtggggtatgattatcaccaagccaaacgtcatcattggagtggaggtgaaggaagtggagcagggagaggagccgtggataatggaaggtgaatttccatgtcaacatagtccaggtaagttagtagattatcacatgttaaaaaacactcatccccgacctttgggagtgactaaagagttgtttatatgtactcggtaccctcagtaacacctcccaacccccaaatatcactttccttcccacacacataccacatacatgaactcttttgttgattttacat

SEQ ID NO: 118905 - DNA, 2361 bp, Homo sapiens
atgacatgccacacagggagcccgttagaaggagctcctagagaaagggctcaagttagcaggtggttcaaaggaactgaaacagggcaggaactaatctacagttcaaaaggaggccactttcccaagatagcttgcatttcagacatcacaaagagaaacaatacagacttttccatgtgcatcactagcatcacaagagccaacactggcacctacaactgtgtgaagttctggaaagggggccctgacatggagcttaaatctggaccaggcactgagttgtctgtgcatagtgagtacagtgtgggcctccttcgtcccccagttcagaacacccctgacattcagacctcgagcctgactggaaaacaggtacacagcagcccctgtgggtgttgtggggatgggagcaggtctcaggtcactgggttgaccttccggaggggagtattgctgcctgtgctgcacagaagggttcgcacatggaatggcctccccaagtcggttcctgcgctggttggagttagagccttcccccattgcctggactttcagggtccctggtgggggtgtctatccccaaggcagtctctcccttcctctcactctggggactcgcagcccttgcctgactcacagtgtaggcggcagcctcctgcttccttcaaaaggtcttatctgaatacagtagtgaatgaaataggtgtttcattcacgaacaaaagtcctttcctgctgctgactctcctgctaggactcacaggagtggcaggtgaggagctgcaggtgattcagcctgaggcatttgtgtcagttgcagctggagagatggccactctgaactgcactgtgacctccctgctccctgtgggacccatccagtggttcagaggagcttgtccaggccagaaattaatctatagtccaaaaagatgccactctccccgggtaacaactatttcagaccagagaaagagaaacagcacagactattccatccgcatcagtagcatcaccctcgaagatgctggcacctactactgtatgaagctccggagagcaattcctgccaacgtggagattaagtctggaccagggactcagatgtctgtgcgtggtgagtacagtgtaggcctccttcatcccccaagtgctacgaagtcggagccatttgctgtcccttttacagatgaagacattgaggctcagagagggaacctgagtggtgaacaggtctcctcctgggctccaaggtgctgctgctggttgatgtctctgctgcctatgtccaccggaagcagaaggcctgactccctgaaatccctgcccctgggctttcagggattccagacaaacacaagtgctcccaaggatgaggccaagaggggcattgtttctgcatcaaaagccctggggaaattcatggccaacatgagtggtgaagagactccaacaggcatgaaagaagttggcaaaatttttatagagaagaggaatgagctctcaggcttccagatcaacgtggaccctgcaggagaaagtatgccctatagcacctgcagcacagccaggatggtgctggcctctggagacctttgccttcaggtcatctgcgaggtggcccacatcactttacagggggaccctctttgtgggactgaaaacttgtctgaaaccattcaagttccacccttcttggaggttactcaacagcccataaaggcagggaaccaggtgaacgtcacctgccagaacctacagctgacctggttggagaacagaaatgtgtcccagatagaaacagcctccatcctcattgagaacatggaaggcacctacgactggacaagctggctcctggtgaacatatctgcccacagggatgatgtgctcacctaccagatggcgcatgatgggcagctggtggtcagcaaaagccttgccctagaggtctcagcccaccaggagcagagctcagaggccacccttgtaggagagcctggcaccgggagatggggtgactggaaagaaggagcctctttccctggtttctgccttgggttggatccagggcatccagggaaggactcagattcaaaagttttggagccttgttgggcccaggtagctttggatgggagtaatgctgagaagccccagataggcaactctgaaagctgttcccactctgatcctctgagtgcctgcgtggaagggatgcgggaaagggcgccaggactcaggaggagggctgagctggcacagtcctatctcagagctgcctgtccaaccaccacagacatctcaggaggagatcagcaccgggaacataacaggctctccggaaacatttcctga

SEQ ID NO: 118906 - DNA, 1004 bp, Homo sapiens
atgagtggtgaagagactccaacaggcatgaaagaagttggcaaaatttttatagagaagaggaatgagctctcaggcttccagatcaacgtggaccctgcaggagaaagtatgccctatagcacctgcagcacagccaggatggtgctggcctctggagacctttgccttcaggtcatctgcgaggtggcccacatcactttacagggggaccctctttgtgggactgaaaacttgtctgaaaccattcaagttccacccttcttggaggttactcaacagcccataaaggcagggaaccaggtgaacgtcacctgccagaacctacagctgacctggttggagaacagaaatgtgtcccagatagaaacagcctccatcctcattgagaacatggaaggcacctacgactggacaagctggctcctggtgaacatatctgcccacagggatgatgtgctcacctaccagatggcgcatgatgggcagctggtggtcagcaaaagccttgccctagaggtctcagcccaccaggagcagagctcagaggccacccttgcccatctggacagcccctgccacttcctctgctaccaggactcacagcaatttcagataagcacaagcactgccaaggaaggtcaaggactggacattgtccaagagcagaagatcagggagctgagcactttctctgtggatctgcagctggctaccagaggcatcaaacctttgctccgttattggatcactaagcttgcgggagttatttatatcctactgctcaagggcatcgccaaggtctgatttttcacacaaaaaaacttgcaacctccggcataaatgggttaattaaggttagtgtagaagttaataaaatagaggctacaaaaataacacaggaaaatcaaaagttagttctttaaaaagagtttttaaaaagataaatctttagctcgatgaattccaacgctctcagtagggtctcagtgggccctcgcgcc

SEQ ID NO: 118907 - DNA, 313 bp, Homo sapiens
atgccccacactccccgatgcctcttcaggccccaggcgtcctgcttggtgcacttcctggagcagcagaacaagctgctggagacaaagctgcagttcttccagaaccgtgagtgctgcaagagcaacctggagcctctgtttgagggctacaactctgcgacgggaggccgagtgcatggaagccaacagtgggaggctggcctcagagctcaaccacgtgcaggaggtgctggagggttacaagaagaagtatgaagaagaggtggcactaaaggccactgctgaaaatgaatttgtggccttgaagaag

SEQ ID NO: 118908 - DNA, 479 bp, Homo sapiens
  misc_feature (1)...(479): n = a,t,c or g
aggggttcccccagggtgcccaaactgagaccacgtcagntgnctcgcgaaacggccagcgnggcgaatgacggaagaaactcgcattgtctactggatcaaggacagacagctcaccaaccgtgacagcaccatactggaacttcaaaaagttctgaaaacatgttgaagaccttactgctgatagcaccatcttcaaatttgtggaagcttattagttcggtgtagcactgtttgcggcgaggagaaaggaaggagaggagaaaactgcactggatcaaggaggtcttcccataggcctgcagtagggctgtttaccattggaagcaagggaaagaggaggagatcaatctagaagcatggagatctgcctgcatgtctgctgcagggcttaagatcactggaagcaaagaaacaaagaggagattgctcctgatcagtatagactgggtgtattgccaagagatgcaagaggagag

SEQ ID NO: 118909 - DNA, 666 bp, Homo sapiens
ggcacgagtggaagaattctgtgaaagcaggaacccttataactaaattatttctctccagtgctcagagcatgaaaattttctgctgtctttggaactttgtctacaaacagttagaagatgcagcccaagggctcaccatgggtggcgatgttgaagaacatggtgagtttgactgtggctggtggcagaggtctctgtgtgtcagcggcatctgcaaagcagcccaatcttaagtattttgttataacagcacatacagactaagacaacttccttgaccaaactttaattgggctcatctgagcattctgcttaaccaggggcatgaccttggtctgccatttaggcaaggaatcctgctaagttattttagagagaatctccgcaccttttatatctaattacctttgatatctgatcaagtttcttattccccacccttgatgtctaagtccttggcttccctctaccaagaatcctattagacaattttagcaagaatccccctacccttgatatctccttttgttaattctctatccactgaccttttcattcttctcattggcaatacatctatagctatctttgctgaatttggagtaagtgcaatctctctcccctcttgtaatagtcttgaataaagtcttccttaccatttca

SEQ ID NO: 118910 - DNA, 766 bp, Homo sapiens
atgagctctggcgaaggaaagaggacatggctgggatccttatggggtggtgtacgagtacccgtgccccccccgatctgtgggctgagggtggcggtgactagcgctgggaccagctccttctctctcgctcccaagcccacaagaattcggggagaaaggggaaagggacagggaagaggctgtcgggaaatggcggccgcggccgggctggggcttcagcgggaggcagcagaggggaagtggtcagcgtggcgaatgacggaaggtggcgagggagaggaagaggggtcgggtgtccgcggagctccaagagggaagacaatcgctttgccaaacacggcagggcatctggaaaggcctgggaacctcacccgccctcccaggcccttcgggctcttttcggtcccattaggaggagggggagggcggcagaaactcgcattgtctactggatcaaggacagacagctcaccaaccgtgacagcaccatactggaacttcaaaaagttctgaaaacatgttgtgctcagagcatgaaaattttctgctgtctttggaactttgtctacaaacagttataagatgcaggcccaagggctcaccatgggtggcgatgttgaagaacatgaagaccttactgctgatagcaccatcttcaaatttgtggaagcttatgtgagttggataggaaaatttcctacatataatgttggctcttccatttgtttctaatttagtatttctcaattgatattttttttgt

SEQ ID NO: 118911 - DNA, 468 bp, Homo sapiens
  misc_feature (1)...(468): n = a,t,c or g
gaattccagccatgnnnnnnnnnnnnnnnnnnnnnnnnnnnnnnnnnnnnnnnnnnnnnnnnnnnnnnnnggtgcatgagggtgttcgggcagtgggaacagccagtacagaggccctgtgggggcacatgcctgctgctacgggannnnnnnnnnnnnnnnnnnnnnnnnnnnnnnnnnnnnnnnnnnnnnnnnnnnnnannnnnnnnnnnnnnnnnnnnnnnnnnnnnnnnnnnnnnnnnnnnnnnnnnnnnnnnttaaaagagnnnnnanaannnnnnnnnnnnnnnnnnnnnnnnnnnnnntnnnnnnnnnnnnnnccccagganaaanaccaccccctttttttaaccaaaagagggggccncccccccttttcctttttttatttnnnnnnnnnnnntgcgatatttttgttttgttttgtgttttnttnnccaaaggggagggggngggagctgcgacccg

SEQ ID NO: 118912 - DNA, 1315 bp, Homo sapiens
atggctttcaggaagaagattattactgctggatgcatcgatcatgttttgtctgtatctgatagccagcagatgcaagcaaacctaacccaaagaacagaagcagaaatcagaaagcagacacagattgccccaacatttcctgctcattctctgccagataaatacctggggtttgctctattaaatcggaagataattggcactttcctcgtcttcaacatgtgtaaacgaaaccatgaagataagaatgaagcatttacagtgttgagagaaaaaaaagtcttcaatctagaattctgtaccctgcaaaattattcttcagaagtgaaggagaaagaaagacaaagattctcagacaaacaaacattgagggaatttgctaccagaaaacctgccttgaaagaaatgttaaaagttcttcagagatataaagagaggaagcacattagaaaaagaaacgttaaatacagcgccgaccacaccaccgaccacaccgcgaatcaggcagacccaaaccagcaggagccccatgtgccgggccatgctcctgacaataagaccataagacaaaaacaaaaccaacataaggacaatacaacacgcaaacacaaccagatgacgtccgacacatcacgaaccaacacaaaagtaagcgggcagccacgaggcaaacagacaagaagacgacacgagagacaacagaaagcaagagaacgaggacagcacagacaaaaacagacgcacagacgcgagagcatacacagcgccaacgacaagccagagcagaagaaccaggtaatagagaacaaacgagaagagaagagaacgtcagagcgaaccaacgatagcacgcgacgagagggcacgcgccgcccgaggcgaacagaaaaaggagagaggcaagaggaaggagacagggccacggccacacaccgcaaggaccacgacaggcaacagccacacggggctcctcactgttcccgtagcagcaggcatggtgcccccacagggcctctgtactgctgttccccactgcccggaacaccctcatgcaccatctgcactgtccaatacggccgcctctggccacacatggctactgagcagttgaacatggctggtccaaaccaagatttccaagacgtcgtatggtaaaaaataacataaaatcttgcaaaaatgtttctattgattatcttaaaattatgatgttttaggtatattaggttaaatcagctattttatcaaaatgaatctcacctgtttgtttttgctttttttttttgttttttttgtttttgagatggagtct

SEQ ID NO: 118913 - DNA, 1582 bp, Homo sapiens
  misc_feature (1)...(1582): n = a,t,c or g
atggcccccgcgctcctgctgctgctgctggccagtggagcggccgcctgcccgctgccctgcgtctgccagaacctgtccgagtcgctcagcaccctctgtgcccaccgaggcctgctgtttgtgccgcccaacgtggaccggcgcacagtggagctgcggctggctgacaacttcatccaggccctggggccccctgacttccgcaacatgacgggactggtggacctgacactgtctcgcaatgccatcacccgcattggggcccgcgcctttggggacctcgagagcctgcgttccctccaccttgacggcaaccaagctggtggagctgggcacccgngagccctccggggccccgtcaatctgcagcacctcatcctcagcggcaaccagctgggccgcatcgcgccgggagccttcgacgacttcctagagagcctggaggacctggacctgtcctacaacaacctccggcaggtgccctgggccggcatcggcgccatgcctgccctgcacaccctcaacctggaccataaccttattgacgcactgcccccaggcgccttgcgcccagctcggtcagctctcccgcctggacctcacctccaaccgcctggccacgctggctccggacccgcttttctctcgtgggcgtgatgcagaggcctctcccgcccccctggtgctgagctttagcgggaaccccctgcactgcaactgtgagctgctgtggctgcggcggctggcgcggccggacgacctggaaacgtgcgcctccccgcccggcctggccggccgctacttctgggcagtgcccgagggcgagttctcctgtgagccgcccctcattgcccgccacacgcagcgcctctgggtgctggaaggccagcgggccacgctgcggtgccgggccctgggtgaccccgcgcctaccatgcactgggtcggtcctgacgaccggttggttggcaactcctcccgagcccgggctttccccaacgggaccttagagattggggtgaccggcgctggggacgctgggggctacacctgcatcgccaccaaccctgctggtgaggccacagcccgagtagaactgcgggtgctggccttgccccatggtgggaacagcagtgccgaggggggccgcccgggccctcggacatcgccgcctccgctcgcactgctgccgaggtacaacagcagcgaagatgagaccctcatctaccggattgtcccagcctccagccaccacttcctgctgaagcacctcgtccccggcgctgactatgacctctgcctgctggccttgtcaccggccgctgggccctctgacctcacggccaccaggctgctgggctgtgcccatttctccacgctgccggcctcgcccctgtgccacgccctgcaggcccacgtgctgggcgggaccctgaccgtggccgtggggggtgtgctggtggctgccttactggtcttcactgtggccttgctggttcggggccggggggccggaaatggccgcctccccctcaagctcagccacgtccagtcccagaccaatgcccgtctctattaa

SEQ ID NO: 118914 - DNA, 403 bp, Homo sapiens
attctttgtacctggtgatagacaggtagtcataggaactaagacagggaagctgcagctttatgacttggcttcagggaatctgctggagacaatagatgcacatgatggagctttgtggtccatgtccctctctccagatcagcgtggctttgtgacaggtggtgcagataaatctgtcaaattctgggattttgagttagtgaaagatgaaaatagtacccaaaagagactttctgtgaagcaaacccgaactttgcaactagatgaagatgttctgtgtgtcagttactctcccaatcaaaagctattggctgtgtctttgctggactgtactgtgaaaattttctacgttgatactttaaagttttttctgtcactgtatggacacaaactgcctgtt

SEQ ID NO: 118915 - DNA, 594 bp, Homo sapiens
  misc_feature (1)...(594): n = a,t,c or g
ggccancccgggaanccaagaangcactnaaaagatngccaggtccacaaantctggtgaatgggggatatgatgtatagtaaggncccgttttcccctggcatccatattccaaggaccaaaaggaggaaagtcaatctgttctggtgatatggcagaaaacagctggtggaggctggtccacatggtggattttgtccttcagtcctgagacagaaaaggtggtaaaaaaacccatgttgacaccctttgaaacgaaatgtgggatgtaacaaaataaacagccttcaaaattccctcttgtacttgacatcaacaacatccgtagagtttcttcaggaagtcggagtcccaggtgattgtattcgctggtcagggtgtgaaaatacactaatacatactccttcacagcaatgtgatccattacatgaatgaaatataagagagccttgtccatatctattaatgttacaggaatgtttcttccaactaccaccatcactgttcgaccacagttatcaacacctgtttggtataaggcttttagagaagcaatatcagacagatcctcagatcttgcttgacataaccagc

SEQ ID NO: 118916 - DNA, 651 bp, Homo sapiens
ggaattcattaaacagtgggatgcagacaaatttgaacacatacagactctggagggtcatcaccaggaaatatggtgtttggctgtaagccccagtggagactatgttgtatcatcgtcccatgacaaatctctgagactttgggagagaacaagggagcctcttattcttgaggaagaaagggagatggaaagagaagcagaatatgaggagagtgtggccaaagaagaccaaccagccagttccaggagagattcaaggtgacagattactttacttgaaagaaaactattgaaacagttaaaagcagctgagaggattatggaggcttttgagttgtaccgagaagaaactgcaaaaatgaaggaacacaaagccatttgtaaagctgcagggaaagaggttccacttcccagcaaccccatcctaatggcttatggcagtatctcaccttcagcttatgtattagagatttttaaagggatcaagtcgagtgagctggaagaatctctacttgtgctgcctttctcttatgtcccagacattcttaaactctttaacgaattcattcagctgggctctgatgttgaacttatatgccggtgcctcttcttcctccttaggattcactttggacagatcactagcaa

SEQ ID NO: 118917 - DNA, 1160 bp, Homo sapiens
atggggctcaccaagcagtacctacgctatgttgctagtgcggtctttggcgttatcggcagccaaaaaggtaatattgtctttgtgacacttcgtggtgagaaaggacgttatgtggcagtaccagcttgtgaacacgttttcatctgggacttaaggaaaggagagaaggggcttaaacaagaagttacttgcttatgcccctccccagatgggctacacttagctgttgggtatgaggatgggtcgatccgaatcttcagtctcctgagtggggaaggaaatgtgaccttcaatggtcacaaagcagctatcactaccttgaagtatgatcagctaggaggcagactggcatctgggtccaagaacaacctggtggaattgtattcactgaatccatccttgcctactcctcagcctgtcaggacaagcagaatcactattgggggtcatcgcagtgatgtgcggactttgtcattcagctcagacaatattgctgttctttcagctgcagctgattccattaaaatatggaacaggtctacactgcagtgtattcgcacaatgacctgtgaatatgcactttgctcattctttgtacctggtgatagacaggtagtcataggaacaaagcccccaaaacgatgtttccaagatgcactgaaggcctggaccgtggcaacagacctgccacacattcctaaacgagtcttcggtcaggggagggtgacggagggttccacacaccgaacacacggtcatatcatcctcaggccagcccgtgcacacgcacggactcacctcagcctccacgaggctcccagccgattggacccgcccacaagacctgccccttccgggtccgttccggaagcctcttccgccagaggttccctttgccttctaggaggaaatgacggagaaagccgggcgctgattggctggtctgatcaatgtaagcattttgaaagacagatcagcactaaagatctaaaaaaattagctctcaacgtgaatcatgctctcttatatttcattcatgtaatggatcacattgctgtgaaggagtatgtattagtgtattttcacaccctgaccagcgaatacaatcacctggactccgacttcctgaagaaactctacgatgttgttgatgtcaa

SEQ ID NO: 118918 - DNA, 2616 bp, Homo sapiens
atggggctcaccaagcagtacctacgctatgttgctagtgcggtctttggcgttatcggcagccaaaaaggtaatattgtctttgtgacacttcgtggtgagaaaggacgttatgtggcagtaccagcttgtgaacacgttttcatctgggacttaaggaaaggagagaaggggcttaaacaagaagttacttgcttatgcccctccccagatgggctacacttagctgttgggtatgaggatgggtcgatccgaatcttcagtctcctgagtggggaaggaaatgtgaccttcaatggtcacaaagcagctatcactaccttgaagtatgatcagctaggaggcagactggcatctgggtccaagcgtggctttgtgacaggtggtgcagataaatctgtcaaattctgggattttgagttagtgaaagatgaaaatagtacccaaaagagactttctgtgaagcaaacccgaactttgcaactagatgaagatgttctgtgtgtcagttactctcccaatcaaaagctattggctgtgtctttgctggactgtactgtgaaaattttctacgttgatactttaaagagacggcgtccccgacaacgcctcgggaaagaacctaaccaacatgcgaggaagtggcgccaggctcgttcttcaagagaaaattttggtggtccaatccgggcgggggccggcacggatcaggttcttggaagaaggcggccaaccaatatttccggcgaccctaagcaggagcgcgccgagtacggagagtcaaagtcccaggagactggagtgaccagctgcaaatgctctgggctgaaaaacaccggtttccgctcctggccagagctcaccaaacagcgcccggtgtcaacatggttttttaccaccttttctgtctcaggactgaaggacaaaatccaccatgtggacagcctccaccagctgttttctgccatatcaccagaacagattgactttcctccttttgtccttgaatatgatgccaggatcagcactaaagatctaaaaaaattagctctcaacgtgaatcatgctctcttatatttcattcatgtaatggatcacattgctgtgaaggagtatgtattagtgtattttcacactctgaccagcgaatacaatcacctgtactccgactttctgaagaaactctacgatgttgttgatgtcaatgtgatgtacctacagtttgtacccaagtctcacctcttcttcactgccggaaaagatcataagattaaacagtgggatgcagacaaatttgaacacatacagactctggagggtcatcaccaggaaatatggtgtttggctgtaagccccagtggagactatgttgtatcatcgtcccatgaccaatctctgagactttgggagagaacaagggagcctcttattcttgaggaagaaagggagatggaaagagaagcagaatatgaggagagtgtggccaaagaagaccaaccagcagttccaggagagactcaaggtgacagttactttactggaaagaaaactattgaaacagtgaaagcaattgaagacccggaagaaccagaccccaagaaaatcaaaggatcttctcctggaatacaagatactcttgaggcagaggatggtgcctttgagacggatgaagcccctgaggatgtaattcattttcatttcttaagtttaattgtgttgaataatgggaaacgaatcctttcatgcagaaaagctggttccataatgcgggaaggaagagacagagttgtaaaccttgcagtcgacaagacaggcaggattcttgcttgccatggaactgactctgtgctagaattgttttgtatcctttccaaaaaggaaattcagaagaaaatggataagaagatgaagaaagctagaaagaaagcaaaattacattctagccaaggagaggaggaagatcctgaggttaatgttgaaatgagtctgcaagatgaaatccagcgggtgactgaatataaaaacttctgccaaaatcaaaacaacctggtggaattgtattcactgaatccatccttgcctactcctcagcctgtcaggacaagcagaatcactattgggggtcatcgcagtgatgtgcggactttgtcattcagctcagacaatattgctgttctttcagctgcagctgattccattaaaatatggaacaggtctacactgcagtgtattcgcacaatgacctgtgaatatgcactttgctcattctttgtacctgtgatagacagttataatcgctggttatgtcaagcaagatctgaggatctgtctgatattgcttctctaaaagccttataccaaacaggtgttgataactgtggtcgaacagtgatggtggtagttggaagaaacattcctgtaacattaatagatatggacaagactcgtttaggaatgtgtggcaggtctgttgccacggtccaggccttcagtgcatcttggaaacatcgttttgggggctgtaggttaggaagcggagatcatggggtctcggaagaaggtttggtcgtgaactgtcagaaaggaggcgaaagctgtgcacgtggaacaaagtga

SEQ ID NO: 118919 - DNA, 676 bp, Homo sapiens
tcccggagtgtacaggacgcacgctgaggtccgcgagccagcaacatgataccttttatattttggcgtgtgaactgaattcactggccgacgatgcacaacgctagtgacgtgcccaaactcatgcctctacccacctgatttaccttggcgcccagttatgcaggcaaagaagaaagagcttgccaggagagacgatatcgaggacggagacagcatgatctcttcagccacctctgatactggtagtgccaaaagaaaaagtaaaaagaacataagaaagcagcgaatgaaaatcttattcaatgttgttcttgaagctcgagagccaggttcaggcagaagactttgtgacctatttatggttaaaccatccaaaaaggactatcctgattattatataatcatcttggagccaatggacttgaaaataattgagcataacatccgcaatgacaaatatgctggtgaagagggaatgatagaagacatgaagctgatgttccggaatgccaggcactataatgaggagggctcccaggtttataatgatgcacatatcctggagaagttactcaaggagaaaaggaaagagctgggcccactgcctgatgatgatgacatggcttctcccaaactcaagctgagtaaggcagcctcacacttcattatttag

SEQ ID NO: 118920 - DNA, 425 bp, Homo sapiens
ttgttcagaagctcttagtttgtgggctgtccttgttatttcacttgaccatctgtacaacattacctgtggagtacaacattgatgagcattttcaagctacagcttcgtggccaacaaagattatctatctgtatatctctcttttggctgccagacccaaatactattttgcatggacgctagctgatgccattaataatgctgcaggctttggtttcagagggtatgacgaaaatggagcagctcgctgggacttaatttccaatttgagaattcaacaaatagagatgtcaacaagtttcaagatgtttcttgataattggaatattcagacagctctttggctcaaaagggtgtgttatgaacgaacctccttcagtccaactatccagacgttcattctctctgccatttggcacggg

SEQ ID NO: 118921 - DNA, 1117 bp, Homo sapiens
ctttgtagtgtgccaactctttgccttgctagcagccatttggtttcgaacttatctacattcaagcaaaactagctcttttataagacatgtagttgctacccttttgggcctttatcttgcacttttttgctttggatggtatgccttacactttcttgtacaaagtggaatttcctactgtatcatgatcatcataggagtggagaacatgcacaattactgctttgtgtttgctctgggatacctcacagtgtgccaagttactcgagtctatatctttgactatggacaatattctgctgatttttcaggcccaatgatgatcattactcagaagatcactagtttggcttgcgaaattcatgatgggatgtttcggaaggatgaagaactgacttcctcacagagggatttagctgtaaggcgcatgccaagcttactggagtatttgagttacaactgtaacttcatggggatcctggcaggcccactttgctcttacaaagactacattactttcattgaaggcagatcataccatatcacacaatctggtgaaaatggaaaagaagagacacagtatgaaagaacagagccatctccaaatactgcggttgttcagaagctcttagtttgtgggctggccttgttatttcacttgaccatctgtacaacattacctgtggagtacaacattgatgagcattttcaagctacagcttcgtggccaacaaagattatctatctgtatatctctcttttggctgccagacccaaatactattttgcatggacgctagggacggcacccaggaaatggtctccctgtcctgggccacaatgcatccagctccgcgctgctgacccatcaggaccagagcccctgctaatgctaagctcacaagaaaggcagccaaaggcaaagccccccaaagaggcccatgctgacatcgccggtacccctcgggaaggagagaagaccaggacagggggcccaggaaaagccttcctcagggatccaggagccagctcctctgtggagctctctcgcactcagctctgggtcctcactcctcctcctattgccaaggccccttgtgaatgcctccaataa

SEQ ID NO: 118922 - DNA, 932 bp, Homo sapiens
atggaaaatatggtcaccctattcagggtggtggaagaacactgtccttgctttcctgaaaagggaacgttagatgtggaactatgggatcgtgttggtgtaagattccaggaactggtcccgacaggaaattatgttcctgtcaccgtttggggtgatttggccttgtgcgtgcaaccatggaatggaagactggaggaacccatggtggccaaccatgggcccggtccctctggtatgggccatgagccagctgagcctgagtgcaaaaatggacagaaggcgaactggagtcatgatgacatcaacccctataacctgggggacactcgagaaaaccatgcaggaagctgagaaactactggagcgtcaaggccagacaaaaacccctgattccatgttcttggccatggaggaaaggtccaattcaagaaacaatatggaaagcagcactgctgttcacaaacggtagtatccgggtaggaacactctctaataccagtactgctactcaacacagtcttaatgttacatttgtaaagaatatcaccactcaatttatggtttgtggttttaatccttatgtctttttggcagctaaggcggaccagctccaggtggtagtcagccacaccacaactgccagccaggaaagggtaagggcgcagggctgcctgctgccccctcagtgccagtgtcctctgcccagaaaggtcaaatcggcagagcagggtgcggaaagcaccctgaggaaagcaggatccctagtttccaggcttccctgccagagagagactggaaagaccatagaaggaaagtttctcctttcacagggggaaggatacagggagacagcgcagaagttggagagcagcatcgaaatgtttctggcctatgtggcttgcaccatccgattcccggcagtgttataa

SEQ ID NO: 118923 - DNA, 180 bp, Homo sapiens
atgattcaattatctcctactgggtccctcccacaacacatgggaattatgggagctacagttcaagatgagatttggtgtgcagatgataataacgaagcatgtggcaatgctacagcagttatagtcacatggatccgggacatactagaaagaaacatgtcactgatccatgggcct

SEQ ID NO: 118924 - DNA, 261 bp, Homo sapiens
gtgcggactaggggctttttccacttgagccaggtgccaacgggatatgagggtgcagggcagaataagagcccagcgttggcttcctggaagacccaaattcactggcgagagcttcatcagatgaccaccgagagtggcaaaagagtctgggcagctgatttggtttggctgtgtccccacccaaatctcgtcttgaattgtagctcccataattcccacgggttgtgggagggtcccagtgggagataattgaatcat

SEQ ID NO: 118925 - DNA, 5058 bp, Homo sapiens
atgaaactgcgtggagtcagcctggctgccggcttgttcttactggccctgagtctttgggggcagcctgcagaggctgcggcttgctatgggtgttctccaggatcaaagtgtgactgcagtggcataaaaggggaaaagggagagagagggtttccaggtttggaaggacacccaggattgcctggatttccaggtccagaagggcctccggggcctcggggacaaaagggtgatgatggaattccagggccaccaggaccaaaaggaatcagaggtcctcctggacttcctggatttccagggacaccaggtcttcctggaatgccaggccacgatggggccccaggacctcaaggtattcccggatgcaatggaaccaagggagaacgtggatttccaggcagtcccggttttcctggtttacagggtcctccaggaccccctgggatcccaggtatgaagggtgaaccaggtagtataattatgtcatcactgccaggaccaaagggtaatccaggatatccaggtcctcctggaatacaaggcctacctggtcccactggtataccagggccaattggtcccccaggaccaccaggtttgatgggccctcctggtccaccaggacttccaggacctaaggggaatatgggcttaaatttccagggacccaaaggtgaaaaaggtgagcaaggtcttcagggcccacctgggccacctgggcagatcagtgaacagaaaagaccaattgatgtagagtttcagaaaggagatcagggacttcctggtgaccgagggcctcctggacctccagggatacgtggtcctccaggtcccccaggtggtgagaaaggtgagaagggtgagcaaggagagccaggcaaaagaggtaaaccaggcaaagatggagaaaatggccaaccaggaattcctggtttgcctggtgatcctggttaccctggtgaacccggaagggatggtgaaaagggccaaaaaggtgacactggcccacctggacctcctggacttgtaattcctagacctgggactggtataactataggagaaaaaggaaacattgggttgcctgggttgcctggagaaaaaggagagcgaggatttcctggaatacagggtccacctggccttcctggacctccaggggctgcagttatgggtcctcctggccctcctggatttcctggagaaaggggtcagaaaggtgatgaaggaccacctggaatttccattcctggacctcctggacttgacggacagcctggggctcctgggcttccagggcctcctggccctgctggccctcacattcctcctagtgatgagatatgtgaaccaggccctccaggccccccaggatctccaggtgataaaggactccaaggagaacaaggagtgaaaggtgacaaaggtgacacttgcttcaactgcattggaactggtatttcagggcctccaggtcaacctggtttgccaggtctcccaggtcctccaggatctcttggtttccctggacagaaaggggaaaaaggacaagctggtgcaactggtcccaaaggattaccaggcattccaggagctccaggtgctccaggctttcctggatctaaaggtgaacctggtgatatcctcacttttccaggaatgaagggtgacaaaggagagttgggttcccctggagctccagggcttcctggtttacctggcactcctggacaggatggattgccagggcttcctggcccgaaaggagagcctggtggaattacttttaagggtgaaagaggtccccctgggaacccaggtttaccaggcctcccagggaatatagggcctatgggtccccctggtttcggccctccagggcccagtaggtgaaaaaggcatacaaggtgtggcaggaaatccaggccagccaggaataccaggtcctaaaggggatccaggtcagactataacccagccggggaagcctggcttccgtggtaacccaggcagagatggtgatgtaggtcttccaggtgaccctggacttccagggcaaccaggcttgccagggatacctggtagcaaaggagaaccaggtatccctggaattgggcttcctggaccacctggtcccaaaggctttcctgggaattccaggacctccaggagcacctgggacacctggaagaattggtctagaaggccctcctgggccacccggctttccaggaccaaagggttgaaccaggatttgcattacctgggccacctgggccaccaggacttccaggtttcaaaggagcacttggtccaaaaggtgatcgtggtttcccaggacctccgggtcctccaggacgcactggcttagatgggctccctggaccaaaaggtgatgttggaccaaatggacaacctggaccaatgggacctcctgggctgccaggaataggtgttcagggaccaccaggaccaccagggattcctgggccaataggtcaacctggtttacatggaataccaggagagaagggggatccaggacctcctggacttgatgttccaggacccccaggtgaaagaggcagtccagggatccccggagcacctggtcctataggacctccaggatcaccagggcttccaggaaaagcaggtcggtctggatttccaggtaccaaaggtgaaatgggtatgatgggacctccaggcccaccaggacctttgggaattcctggcaggagtggtgtacctggtcttaaaggtgatgatggcttgcagggtcagccaggacttcctggccctacaggagaaaaaggtagtaaaggagagcctggccttccaggccctcctggaccaatggatccaaatcttctgggctcaaaaggagagaagggggaacctggcttaccaggtatacctggagtttcagggccaaaaggttatcagggtttgcctggagacccagggcaacctggactgagtggacaacctggattaccaggaccaccaggtcccaaaggtaaccctggtctccctggacagccaggtcttataggacctcctggacttaaaggaaccatcggtgatatgggttttccagggcctcagggtgtggaagggcctcctggaccttctggagttcctggacaacctggctccccaggattacctggacagaaaggcgacaaaggtgatcctggtatttcaagcattggtcttccaggtcttcctggtccaaagggtgagcctggtctgcctggatacccagggaaccctggtatcaaaggttctgtgggagatcctggtttgcccggattaccaggaacccctggagcaaaaggacaaccaggccttcctggattcccaggaaccccaggccctcctggaccaaaaggtattagtggccctcctgggaaccccggccttccaggagaacctggtcctgtaggtggtggaggtcatcctgggcaaccagggcctccaggcgaaaaaggcaaacccggtcaagatggtattcctggaccagctggacagaagggtgaaccaggtcaaccaggctttggaaacccaggaccccctggacttccaggactttctggccaaaagggtgatggaggattacctgggattccaggaaatcctggccttccaggtccaaagggcgaaccaggctttcacggtttccctggtgtgcagggtcccccaggccctcctggttctccgggtccagctctggaaggacctaaaggcaaccctgggccccaaggtcctcctgggagaccaggtctaccaggtccagaaggtcctccaggtctccctggaaatggaggtattaaaggagagaagggaaatccaggccaacctgggctacctggcttgcctggtttgaaaggagatcaaggaccaccaggactccagggtaatcctggccggccgggtctcaatggaatgaaaggagatcctggtctccctggtgttccaggattcccaggcatgaaaggacccagtggagtacctggatcagctggccctgagggggaaccgggacttattggtcctccaggccctcctggattacctggtccttcaggacagagtatcataattaaaggagatgctggtcctccaggaatccctggccagcctgggctaaagggtctaccaggaccccaaggacctcaaggcttaccaggtccaactggccctccaggagatcctggacgcaatggactccctggctttgatggtgcaggagggcgcaaaggagacccaggtctgccaggacagccaggtacccgtggtttggatggtccccctggtccagatggattgcaaggtcccccaggtccccctggaacctcctctgttgcacatggatttcttattacacgccacagccagacaacggatgcaccacaatgcccacagggaacacttcaggtctatgaaggcttttctctcctgtatgtacaaggaaataaaagagcccacggtcaagacttggggacggctggcagctgccttcgtcgctttagtaccatgcctttcatgttctgcaacatcaataatgtttgcaactttgcttcaagaaatgactattcttactggctctctaccccagagcccatgccaatgagcatgcaacccctaaagggccagagcatccagccattcattagtcgatgtgcagtatgtgaagctccagctgtggtgatcgcagttcacagtcagacgatccagattccccattgtcctcagggatgggattctctgtggattggttattccttcatgatgcatacaagtgcaggggcagaaggctcaggtcaagccctagcctcccctggttcctgcttggaagagtttcgttcagctcccttcatcgaatgtcatgggaggggtacctgtaactactatgccaactcctacagcttttggctggcaactgtagatgtgtcagacatgttcagtaaacctcagtcagaaacgctgaaagcaggagacttgaggacacgaattagccgatgtcaagtgtgcatgaagaggaca

SEQ ID NO: 118926 - DNA, 1650 bp, Homo sapiens
cagaagatgaaggaagagcaaagggacatcatacatggcagcagacaagagaaaatgagagccaagcgaaaggggaaacaccttataaaaccatcagatttcgtgagacttactatcacaagaacagtatgggggaaaccacccccatgattcaattatctcccaccgggtccctcccacaacacgtgggaattatgggagctacaattcaagataagatttgggtgactcctggacttcctggatttccagggacaccaggtcttcctgtaaaacgtggatttccaggcagtcccggttttcctggtttacagggtcctccagtaatacctggtcccactggtataccagggccaattggtcccccaggaccaccaggtttgatggtaactcctggtccaccaggacttccaggacctaaggtaaatatgggcttaaatttccagggacccaaaggtgaaaaagtgaagcaaggtcttcagggcccacctgggccacctgggcagatcagtgaacagaaaagaccaattgatgtagagtttcagaaaggagatcaggtgattcctggtgaccgagggcctcctggacctccagggatacgtggtcctccagtaaccccaggtggtgagaaaggtgagaagggtgagcaaggagagccaggcaaaagagtaaaaccaggcaaagatggagaaaatggccaaccaggaattcctgtaatgcctggtgatcctggttaccctggtgaacccggaagggatggtgaaaaggtaatgcagttatgggtcctcctggccctcctggatttcctggagaaaggggtcagaaaggtgatgaaggaccacctggaatttccattcctggacctcctggacttgacggacagcctggggctcctgggcttccagggcctcctggccctgctggccctcacattcctcctagtaacaaaggtgacacttgcttcaactgcattggaactggtatttcagggcctccaggtcaacctggtttgccaggtctcccaggtcctccaggtaattccaggagctccaggtgctccaggctttcctggatctaaaggtgaacctggtgatatcctcacttttccaggaatgaagggtgacaaaggagagttgggttcccctggagctccagggcttcctggtttacctggcactcctggacaggatggattgccagggcttcctggcccgaaaggagagcctgtgagaattacttttaagggtgaaagaggtccccctgggaacccaggtttaccaggcctcccagggaatatagggcctatgggtccccctggtttcggccctccaggcccagtaggtgaaaaaggcatacaaggtgtggcaggaaatccaggccagccaggaataccaggtaataaaggggatccaggtcagactataacccagccggggaagcctggcttgcctggtaacccaggcagagatggtgatgtaggtcttccaggtatccctggacttccagggcaaccaggcttgccagggatacctggtagcaaaggagaaccaggtatccctggaattgggcttcctggaccacctggtcccaaaggtattattctcacaaatggcaagagcacacagtggtctgaggacagttcttaaatat

SEQ ID NO: 118927 - DNA, 257 bp, Homo sapiens
atgaccggtgtgagccgccgcacccagcctcaacctttgtttttctgactcctgtgtgcaggcatgcatcaccacaccggtctatgacaacaccctcacatcagagtagtgtagcggaacctaccgatgctacagcttcccagcagggacccatacctgtggtcagcccccagcgaccccctggagctgtggtcacaggtcctgcccgccagtactacaccaagggcaacctggtccggattgcctcggggctgtga

SEQ ID NO: 118928 - DNA, 2888 bp, Homo sapiens
gttaagtgacccctgttcaagccgatgggatgaaagaagcttgtctcagagatccagatcatggtcctataatggatattattcagaccttagtacagcaagacactctggccaccataaaaaacgcagaaaagaaaaaaaggttaagcataaaaagaaagggaaaaagcagaaacactgcagaagacacaaacaaacaaagaagagaaggattcttataccgtctgacatagaatcctcaaaatcttccactcgaagaatgaaatcctcttgtgatagagaaaggagttctcgttcttcctcattgtcatctcatcactcatcaaagagagactggtctaaatctgataaggatgtccagagctctttaacccattccagcagagactcatacagatcaaaatctcactcacagtcttattctagaggaagctcaagatcaaggactgcgtcaaagtcctcatcacattctcgaagtagatcaaagtccagatctagttccaagtctgggcaccgaaagagagcatcaaaatcaccaagaaaaacagcttctcagttaagtgaaaataaaccagttaaaacagaacctttaagagcaaccatggcacaaaatgaaaatgtagtagtacaaccagttgtagcagaaaatattcctgtaataccactgagtgacagtccccccccttcaagatggaagcctggacagaaaccttggaagccctcttatgagcgaattcaggaaatgaaagctaaaacaacccatttgctacccatccaaagcacttacagtttagcaaatattaaagagactggtagctcatcatcctaccataaaagagaaaaaaattcggaaagtgatcagagcacttattcaaaatacagtgatagaagttcagaaagctcaccaaggtcaaggagcagatcttctaggagtagatcttattccagatcatatacaagatcacgtagtctagctagttcacattcaaggtctaggtctccatcatctagatctcattcacgaaataaatacagtgatcattcacagtgtagtagatcatcttcatatacttctattagcagtgatgatggaaggcgagctaagaggagacttagatccagtgggaaaaaaaatagcgtttcacataaaaagcatagcagcagctctgaaaagacacttcacagtaaatatgtcaaaggtagagacaggtcttcatgtgtgagaaagtatagcgagagcagatcatctttagattattcttcagacagtgagcagtcaagtgttcaggccacacagtcagcccaggaaaaagagaagcagggccaaatggaaagaacacataataaacaagaaaaaaacagaggtgaagaaaaatccaagtctgaacgggaatgccctcattcaaaaaaaagaactttgaaagagaatctttctgatcaccttagaaatggcagtaagcccaaaaggaagaattatgctggtagtaaatgggactctgagtcaaattcagaacgagatgtcactaaaaacagtaaaaatgactcccatccatcctctgacaaggaagaaggtgaggccacatccgattctgaatcagaggttagtgaaattcacatcaaagtcaaacccacaaccaagtcgtccacaaatacttcactgcctgatgataatggtgcttggaaatcaagcaaacagcgcacatcaacttctgactctgaggggtcctgttccaattcggaaaacaataggggaaagccacaaaagcacaaacatgggtcaaaggaaaatcttaaaagagaacacaccaaaaaagtgaaagagaaattgaaagggaaaaaagacaaaaagcataaggctccaaaacgaaagcaagcatttcactggcagcctccactagaatttggtgaagaggaggaggaggagattgatgacaagcaagttactcaggaatcaaaagagaaaaaagtttctgaaaacaatgaaaccataaaagataatattctaaaaactgagaaatccagtgaagaggacctttcaggtaaacatgatacagtgactgtttcatcagatcttgatcagtttactaaagatgatagtaaactcagtatttctcccacagctttaaatactgaggaaaatgtggcctgtttacaaaacattcagcacgttgaagaaagtgttcccaatggagtggaagatgtgcttcaaacagatgacaacatggagatctgcactcctgataggagttccccagcaaaagtagaggagacttcccctctaggaaatgcacggcttgataccccagatataaacattgttttgaagcaggatatggcaacggaacatcctcaagcagaggtagtaaaacaggaaagcagcatgtccgaaagtaaagtgttgggtgaagtggggaaacaggacagcagctctgctagcttggctagtgctggagaaagtaccgggaagaaggaggtggctgagaagagccagatcaacctcattgataagaaatggaagcccctgcaaggtgtggggaacctggcagcacctaatgctgccacatccagtgctgtggaagttaaggtgttgaccactgtgcctgaaatgaaaccacaaggcttgagaatagaaattaaaagcaaaaataaagttcggcctgggtctctctttgatgaagtaagaaagacagcacgcttaaaccgtagaccaagaaatcaggagagttcaagtgatgagcagacgcctagtcgggatgatgatagccagtccaggagtccaagtagatctcgaaatcaagaagctactctagaagtcggagcagaggatggtacagcagaggccgaaccagaagccggagcagttcctaccggagttacaaaagtcacag

SEQ ID NO: 118929 - DNA, 1831 bp, Homo sapiens
ctggatgttgcgctcgcagtctgtctgcctgtgcagcagcagctcgctctccagcaggaagcgcttgccgcactggtcgcagatctgcatgcggctgtgggtcacattcatgtgtttctccaggtaccagcggttgttgaaaactcgtgggcacttctggcatggatggtgctgcttctcctccagcttcaccttggcccccagcccatcagtggctggcggccctcgggccgatgcagaggccactccagggggtggctttggcctcttcccaccccgccgcccagcttcttcaggttcaggggtaccccggcgccgggcgttctcccgggaccgtgtggccatgtgactgtggggaggggggtctgcccggctgcttcggcttccccgtggcccctgcttgcccccagcctccccctcctccccctcctcctcctcagagctctcttgatcctgctcactaggcccttcctcctcttcctcctcctcttcctcttcctgctcactgtgcccgtcctcctcctcttcttcctcttctccctgactgccaccctcttcctcctcctcctcctcccgtccactgccaccaccttcctcttcctcttcttcctcctcctcctcctcgtcgtcctcctcctcctcgtccgagtgtctctgcagcccgtcctcccggcccagaaccacggtggctgggcttggcccggcacctggcttcccctctggccccgtggacacgtgcagtgtctggttgttgaggttcacctccacgatgatctgggattgctccctgcggctgtaggtgccagaacccccaagctcttcctccaactcttctccaccctccagcttgcacaagctggctgggggcccaccggcctcctcgacaccaccctccttctcctccttaaagaagggctgggctggcccaatggtggcaggcactgtgccaccagcagtccctgccccgtcctcaacacgcaccgagtaagggtcagggccctcgcgggcatagatcttgggcaggcctggggtgtcggcctcctgcttgatgtcacagtagtagggcggcgcagctggagtgcagctggcagccggctgggccagggccacagtgcccggacctggtgggcctagagagcgggcgtccagcagctcttggcaggacgcagcgatgtcagccatctgcagcaatgaggcggcgctgagcacctcgtggacgttggccgcgttgaccagcagcttggacgtatagatgaagttgaggatctgctgcaggccaccaggtgccagtgcctccagggacagctccacacgctgcagctgcttgttctgggtgaagagtgagtggaagaactggctgtaggcggctagcacacccttgtgtgccggaaagacgctgcgctggggcaccagcaccaagtccacgtcgcagaggtcaggctggaagaggcgctgctcgttcaggcggcccatcaagcaggcaaagtgcagcgccacgtcctccaccagcgagaactcagccgccggggagtcagttgtcttctcaaccagcaacatggtgccgtggcgctgggggctcacagggccccgcgggatcgcgctgcccccggcggccaggccagggccgctccatgaagcgccgcgctgggggccgcccccgcgcagggccccgcgaccatggcccccgggggcgcggccaggcaggcggaggcgcagggccgcggcgagtccagcgccaagcagctgcggccccagagcctcgggcgcggcgggcggggggcgcggggcgccgattggagcccgcgcgtcagctggggccgccgtctggacg

SEQ ID NO: 118930 - DNA, 855 bp, Homo sapiens
tcacagtcttattctagtaggaagctcaagatcaaggactgcgtcaaagtcctcatcacattctcgaagtagatcaaagtccagatctagttccaagtcagctgtgctggcctccacagccagatgtgctggttcccggaagcaatgcgtgcccctccccatccggctgtgccagctgcagtccaggtcactccagcctagcatggtgccgtggcgctgggggctcacagggccccgcgggatcgcgctgcccccggcggccaggccagggccgctccatgaagcgccgcgctgggggccgcccccgcgcagggccccgcgaccatggcccccgggggcgcggccaggcaggcggaggcgcagggccgcggcgagtccagcgccaagcagctgcggccccagagcctcgggcgcggcgggcggggggcgcggggcgccgattggagcccgcgcgtcagctggggccgccgtctggacgcctatctctaccacatagctggccctttctgccccggagttcctctgactatgtgatgtacagctggggatactggggtccagagaggggccaggaccctggccgcctgcctttggtgctgagcttccaaggggcggctgctcggccgctgggtgacaccgggtcagccccttttctcgtttattcgtccctggcatggggagcggggtcaccagctctgcgccctgggagcgcgtcttcttgtggaccaagcgcaggtggctgctagccctctttctacgggctcgagcctgcacaatcgaggctggagatgtggtcgcggcggcaggatagagtggctggcggagccgtgtgacagaaggagaggcggagttcat

SEQ ID NO: 118931 - DNA, 4581 bp, Homo sapiens
gtactctcgcggtatttgtcccgactctcgcggggtttagcgtggcattgggaggcccggcctgggggaggagacggcgttccgttagcggcgttggggtttggctgcagtggcagtgctttctcttctgctcacggggacccgctcaggctggaggccagccagctcttgccgccacctcggtcgcgatgggggcgcaggaccggccgcagtgccacttcgacatcgagatcaaccgggagccggttggtcgcattatgtttcagctcttctcagacatatgtccaaaaacatgcaaaaacttcctttgcttgtgctcaggagagaaaggccttgggaaaacaactgggaagaagttatgttataaaggttctacgttccatcgtgtggttaaaaactttatgattcagggtggggacttcagtgaaggtaatggaaaaggtggagaatcaatttatggtggatattttaaagatgaaaactttattctcaaacatgacagagcgttccttttatcaatggcaaatcgagggaaacataccaatggttcccagtttttcattaccacaaagcctgctccacacctggatggggtgcatgtagtctttggactggttatttctggttttgaagtaatcgaacaaattgaaaatctgaagaccgatgctgcaagcagaccatatgcagatgtgcgagttattgactgtggagtacttgccacaaaatcaataaaagatgtttttgagaaaaaaaggaagaaaccaactcattcagaaggctcggattcctcttccaattcctcctcttcttcagaatcatcttcagaaagtgaacttgaacatgagagaagcagaaggaggaaacataagaggaggccaaaagttaaacgttctaaaaagaggcgaaaggaagcaagcagttcagaagagccaaggaataaacatgcaatgaacccaaaaggtcactctgagaggagtgataccaatgaaaaaaggtcagttgattccagtgctaaaagggaaaaacctgtggtccgcccagaagagattcctccagtgcctgagaaccgatttttactgagaagagatatgcctgttgttactgcagaacctgaaccgaagattcctgatgttgcacccattgtaagtgatcagaaaccatctgtatcaaagtctggacggaagattaaaggaaggggcacaattcgctatcacacacctccaagatcaagatcctgttctgagtcagatgatgatgacagcagtgaaactcctcctcactggaaagaggaaatgcagagattaagagcatatagaccacctagtggagaaaaatggagtaaaggagataagttaagtgacccctgttcaagccgatgggatgaaagaagcttgtctcagagatccagatcatggtcctataatggatattattcagaccttagtacagcaagacactctggccaccataaaaaacgcagaaaagaaaaaaaggttaagcataaaaggaaggggaaaaaagcagaacacttgcagaggacacaaacaaacaaagaggagagggattcttatcccgtctgacatagaatcctcaaaatcttccactcgaagaatgaaatcctcttgtgatagagaaaggagttctcgttcttcctcattgtcatctcatcactcatcaaagagagactggtctaaatctgataaggatgtccagagctctttaacccattccagcagagactcatacagatcaaaatctcactcacagtcttattctagaggaagctcaaggatcaaggactgcgtcaaagtcctcatcacattctcggaagtaggatcaaagtccagatctagttccaagtctgggcaccgaaagagagcatcaaaatcaccaagaaaaacagcttctcagttaagtgaaaataaaccagttaaaacagaacctttaagagcaaccatggcacaaaatgaaaatgtagtagtacaaccagttgtagcagaaaatattcctgtaataccactgagtgacagtccccccccttcaagatggaagcctggacagaaaccttggaagccctcttatgagcgaattcaggaaatgaaagctaaaacaacccatttgctacccatccaaagcacttacagtttagcaaatattaaagagactggtagctcatcatcctaccataaaagagaaaaaaattcggaaagtgatcagagcacttattcaaaatacagtgatagaagttcagaaagctcaccaaggtcaaggagcagatcttctaggagtagatcttattccagatcatatacaagatcacgtagtctagctagttcacattcaaggtctaggtctccatcatctagatctcattcacgaaataaatacagtgatcattcacagtgtagtagatcatcttcatatacttctattagcagtgatgatggaaggcgagctaagaggagacttagatccagtgggaaaaaaaatagcgtttcacataaaaagcatagcagcagctctgaaaagacacttcacagtaaatatgtcaaaggtagagacaggtcttcatgtgtgagaaagtatagcgagagcagatcatctttagattattcttcagacagtgagcagtcaagtgttcaggccacacagtcagcccaggaaaaagagaagcagggccaaatggaaagaacacataataaacaagaaaaaaacagaggtgaagaaaaatccaagtctgaacgggaatgccctcattcaaaaaaaagaactttgaaagagaatctttctgatcaccttagaaatggcagtaagcccaaaaggaagaattatgctggtagtaaatgggactctgagtcaaattcagaacgagatgtcactaaaaacagtaaaaatgactcccatccatcctctgacaaggaagaaggtgaggccacatccgattctgaatcagaggttagtgaaattcacatcaaagtcaaacccacaaccaagtcgtccacaaatacttcactgcctgatgataatggtgcttggaaatcaagcaaacagcgcacatcaacttctgactctgaggggtcctgttccaattcggaaaacaataggggaaagccacaaaagcacaaacatgggtcaaaggaaaatcttaaaagagaacacaccaaaaaagtgaaagagaaattgaaagggaaaaaagacaaaaagcataaggctccaaaacgaaagcaagcatttcactggcagcctccactagaatttggtgaagaggaggaggaggagattgatgacaagcaagttactcaggaatcaaaagagaaaaaagtttctgaaaacaatgaaaccataaaagataatattctaaaaactgagaaatccagtgaagaggacctttcaggtaaacatgatacagtgactgtttcatcagatcttgatcagtttactaaagatgatagtaaactcagtatttctcccacagctttaaatactgaggaaaatgtggcctgtttacaaaacattcagcacgttgaagaaagtgttcccaatggagtggaagatgtgcttcaaacagatgacaacatggagatctgcactcctgataggagttccccagcaaaagtagaggagacttcccctctaggaaatgcacggcttgataccccagatataaacattgttttgaagcaggatatggcaacggaacatcctcaagcagaggtagtaaaacaggaaagcagcatgtccgaaagtaaagtgttgggtgaagtggggaaacaggacagcagctctgctagcttggctagtgctggagaaagtaccgggaagaaggaggtggctgagaagagccagatcaacctcattgataagaaatggaagcccctgcaaggtgtggggaacctggcagcacctaatgctgccacatccagtgctgtggaagttaaggtgttgaccactgtgcctgaaatgaaaccacaaggcttgagaatagaaattaaaagcaaaaataaagttcggcctgggtctctctttgatgaagtaagaaagacagcacgcttaaaccgtagaccaagaaatcaggagagttcaagtgatgagcagacgcctagtcgggatgatgatagccagtccaggagtccaagtagatctcgaagtaaatctgaaaccaaatcaagacacagaacaaggtctgtctcctatagtcactcaagaagtcgatcgagaagttccacatcatcttatcgatcaagaagctactctagaagtcggagcagaggatggtacagcagaggccgaaccagaagccggagcagttcctaccggagttacaaaagtcacaggacgtccagcaggagcagatccaggagcagctcatatgatccccacagtcgatccaggtcctacacctacgatagctactatagcaggagtcggagtcgaagtagaagccagagaagtgacagttaccaccgaggcagaagttataatcggcggtccaggagttgtagatcttatggctctgacagtgaaagtgaccgaagttactctcatcaccggagccccagtgagagcagcagatacagttga

SEQ ID NO: 118932 - DNA, 1692 bp, Homo sapiens
atggttggagaaggtggaactaagctggaggacacccgagtactcttaagcaatccccatgataagccaatttggatagaacaatggctgctaagtaaagagaaactggaggctttagaggacttagttactgaacaattagaaaatggacacatagctccaacattttccccttggaattctccagtttttgtaattaagaaaaaatcagaattggacctgaccagaaataatgaacgtgcttgtttgggaagatttcattgcagaacaggcagaggtgctggcaacgaatcctatggaatcattattgattggtcccctaaggggatgtttagcttgaattgcacctctcagtctgcgtcccacgaccacactatgttcagctggtctaaacaaaatggtcagatggtagaaatgtttacacattttcttggacaagcccgactgttcctctcactggttcgcataaagctcatgtttacaaagccgcccagacctttctctgggactctcatatttaacttaattctggatatacccagccgctggccaaggccgcggtcgcgcaggcgcagtgccgcgtcccgccgccgccccgccctgcccgtcgctgcggaaggcgccgcgcgcagcaacgcgcacttcctctccaggaatccgcggagggagcgcaggctcgaagagctcctggacgcagaggccctgcccttgccagacggcgcagacatgtcagaacaaagtaaggatctgagcgaccctaactttgcagccgaggcccccaactccgaggtgcacagcagccctggggtttcggagggggttcctccgtccgcgaccctggcagagccgcagagccctcctctaggcccgacggccgctccgcaggccgcgccgcctccccaggccccgaacgacgagggcgacccgaaggccctgcagcaggctgcggaggagggccgcgcccaccaggccccgagcgcggcccagccgggcccggcaccgccagccccggcgcagctggtgcagaaggcgcacgagctcatgtggtacgtgctggtcaaggaccagaagaagatgatcatctggtttccagacatggtgaaagatgtcatcggcagctacaagaagtggtgcaggagcatcctccggcgcaccagcctcatcctcgcccgggtgttcgggctgcacctgaggctaaccagcctgcacaccatggagtttgcgctggtcaaagcgctggagcccgaggagctggacagggtggcgctgagcaaccgcatgcccatgacaggcctcctgctcatgatcctgagcctcatctacgtgaagggccgcggcgccagagagagcgccgtctggaacgtgctgcgcatcctggggctgcggccctggaagaagcactccaccttcggggacgtgcggaagctcatcactgaggagttcgtccaaatgaattacctgaagtaccagcgcgtcccatacgtggagccgcccgaatacgagttcttttggggctcccgggccagccgcgaaatcaccaagatgcaaatcatggagttcctggccagggtctttaagaaagacccccaggcctggccctcccgatacagagaagctctggaggaggccagagctctgcgggaggctaatcccactgcccactaccctcgcagcagtgtctctgaggactag

SEQ ID NO: 118933 - DNA, 1606 bp, Homo sapiens
atgggtatttcctgcccagggtcctcaaaaatgcttaatagtcgagcgctccctgtgctgaaactgacccaaggagctctgcgggattgtaaagaacgagcaaactacacaaacttcaacatttacaaggctgtagagagccagggaaagtttgtatgtgttctctataatggacagcaaagccctgaatatgtcatgataccatgtacatctgtgtctccaacaggccaggaagtccctgaggacagaggaatgagaatggtgatgaagaataaacccaataagcctagcaaaatgcagagtctgaaatccagtaagcatctcacaaattctgtcattgttattgctgtaggaattttcttctcggtcactttgcaagccagggacccccagctggatgatgccatagaacagcttagaggagtgtgcattagagcttgggaaaaaatcacttcaggtggagaacaatacccttcctttagtgctataaaacagggaccaaaagaaccatacattgattttatagctcggttacaggagtctcttaaaaagatgattgcagattcggctgctcaggatatagtgttgcagttattagctttcgacaatgctaatcccgattgccaggctgctctgcgacctatcagagggaaagcacatttagttgattgtatcaaggcctgtgatgatattggagatgggtctagtaatggtaaagcttcttattttggctcaaaaagtaaagttttccagacatcctatacttcagctcaaaaagcagagcttgtagcggtaattgaggtattgactgcttttgatatgcctattaatgtgatttctgattcttcatacatggtttattccacacagttaattgaaaatgctcagttacgatttcatacagatgaacaactgatgactttatttacccaattgcaaacagcatttaggagtacaatgcatcctttttacatcactcacattagggctcgctcatacacctcttccaggacctttgactgaagggaatcaaatggccgattgcctagttgctaatgcaatatctaatgctagacactttcacaatttaacccatgttaatgcctctggtctcaaacacagatacagcattacctggaaagaagctaaaaatattatccagcgatgcccaacttgccaaatggtacattcctcatcttttagaggaggagttaatcctcgaggactggaacctaattcactttggcaaatggatgtcacacatattcccttgtttgggagactagcttatgtacataaaagaagaagaataagaggaggaggaggaggagaaggagaaggagaaggagaaggagaaggagaagaagaagaagaagaagaagaagaagaagaagaagaagaagaagaagaagaagaagaagaagaagaacaagaacaagaacaagaagaacaagaacaagaagaacaagaacaagaagaacaagaacaagaagaaagaagaagaaaagacactgaagagctttcatactctctccccctcaacagaacccaaccatgctggcaccctgattttggacttccagccaccagaactgtgagaagataa

SEQ ID NO: 118934 - DNA, 1437 bp, Homo sapiens
atggttggagaatgtggaactaagctggaggtcatgcaagtacacttaagcaatccccgtgatgagttagaaggggagctcagaagcatcagggtgacaatgggacaagtgtgggctctggttcattccaccttggaaccttttcacactaatgaagaggaggaaggattatataacaaagtaacagaagaggtgacagagcaggtttgtttgccagctaaagctaaagcagcaaaggaaggagaggttcatccctacccttctccattccctcattattttgaagaaacagagtggcctgaccctccagatctttcttttctggaggacactggaggagatcctagtctcactagccattggcaattaacaaaggaggctgaggcagagttacagctgattgaaaagcaagtccataaagctcaaataaatagaatagatccagagaagattccagatttgctaattttttcaactcagcattcacctactggtgttattgtccaagaacaggacttagtagaatggctttttcttccacatactaattcatggactctaactccttatttggatcaaaacgctactatgataggaaatgagagaactcagattgttaaattacatggatatgatcctagaaaaattattgtcctcctcatgaaggcaaacatacagcaagcttttataaatggtcttacttggcaaactcatttagctaactttgtggttattctcgataatcattttcctaaaatgaaactgtttcaatttttgaaattaactaattggattctccctaaaataactaaatttaaaccaattaaaggtgctgaaaatgtcttcacagatgggtctagtaatggtaaagcttcttattctggctcaaaaggactgagtcaacagctgatttggatatcatcaagaaacctgaaaccttatcatgagtcagatgctgaggaagagattccaggaagaacccaaggaacccctggttgcagtcatgtcgagactgacactgaggaggaccccaactgtcatgagcagcacccattgaacacagccacccacctggggacagatcaagaagctgtcacagatggtggaagaaaacctgaggaaagagggacaaccagtcacaatgagtaatttggtgatctatcacagtgatgatcaccattgccatgagtattccttcaacaagggctgacacagagaacaattatacttattgggcatatttatcaatcttgtctggcaataatgcctagatgatttcactctatggcacagttacacatgctttctgatctcagtatttaccataataaatctgctcctataattgaggcataccaccctcaaaaacctatttgtaaacaaaatagaacctggccagaaataatgaacaacttgtttagtaagattgcattgcag

SEQ ID NO: 118935 - DNA, 1754 bp, Homo sapiens
atgggacaagtgtgggctctggttcattccaccttggaaacttttcacactgatgaggaggaaggagagtataatgaagtaacagagcaggtttgtttgccagctaaagccggtagtgctgcagtagatttatgctgcacaaaagctgtgagccttctgcctggggaatccccgcaaaaggtcccaacaggagccggtggacccttgccagcggggatgacaggattacttctaggcaggtctagtttaaatataaaagcggtacaagtacaaacaggagtcactgattctgattacaatggggaaattcaaattgttacatctacttctgttccctggaaagcaaagcctggagaccatatagcacagctcctaattgtgccgaaaaaatttgcaaggtttgaaggaaccgcttcaagtggaaagacaaagttcctgccaaggtttaggatatcatttttgatggcggccattgttaagcctccagaacctatacctttaaaatggttaacagataagccaatttggacagaacaatggccgctgagtaaagagaaactggaggctttagaagacttaattactcaacaattaaaaaagggacacatagctccaacattttccccttggaattctccagttttcataattaagaaaaaatcagctgagcaggactgtgaatggtttgtatttacaattcttgcagtaaacaatctgcagcttaagcctgctaaacgttttcactggaaagtgttgccacaaggaccaaatcaacagccaatttggataccatcaagatacctgaaaccttatcataagccagatgccaaggaagagattccggaaggatcccaaggattcccagttgcagccatgtcaagactgacgctgaggaggaccccaactgtcacgagcaacacccatcgaacacagccacccacctggggacagatcgagaagctgccacagatggcggaagaaaacctgaggaaagctggacaaccagtcacaataagtaattggattctccctagaataactaaatttaaaccaattgaaggtgctgagaatgtttttacagatgggtctagcaacggtaaagcttcttattctggctcaaaaggacctttgactgaagggaatcaaatggctgatcgccttgttgctaaagtaatatctaatgctagacactttcacaatttaacccatgttaatgcctctggtctcaaacgcagatacagcattacctggaaagaagctaaagctattatccagcgatgcccaacttgccaagtgatgctatcagcagctgaacagcatctacagaaatcagctgcaaagacagaagcagaaaaactggtttggtggagagacccaataacaaaaagtcgggaaataggtaaaataataacttggggtagaggttatgcttgtgtttctccaggaccaaatcaacagccgatttggataccatcaaaacacctgaaaccttatcataagccagatgctggggaaaagatttcgggaggaaactgtggaccccacccccacccccggttgcagccatgtccagactgacgctgaggaagaccccaactgtcacgagcaacacctgtcaaacacagccacccacctggagacagatcaagaagctgtcacagatggtggaagaaaacctgaggaaagcgggacaaccagtcacaatgaataatttaatgatagcggtgatcaccactgccttcaacaagggctga

SEQ ID NO: 118936 - DNA, 423 bp, Homo sapiens
atgacaaatatcagtaccacccttaaagacctaaaagatgcagggatgatagatcccatcaaatccacatttaatttgccatctggatcccacaaaaaccagatggatcctggaaaacgacagcaaacaatcaaactcaaccaagcaacaatctcaattgcagccatagtgcttgatgtggcatctttgccggggaaggcgaggagttaccatgggttttctagccatgcaggaagggtaattgactccaataatcagaaggacattgagggctgcacttacatactgaatgtggcagggaagaatatgtttggaatccagcttaggcgttctgtaatattcccttgtccaaatttgatgtatacagacaattgcagcagccatggcccaagagggcccagtgattatgactcagatccttga

SEQ ID NO: 118937 - DNA, 771 bp, Homo sapiens
ttagccatcgtaaaacttgacattatgaagcagaaaacaggtgtcatctgtctctggtgttcctggaatttctaacccaaatgccaattcctccacaactcccttcacacacttcatgtcgaagaccagctcaagagcctggacccatatgccaccttcagcagggttgactgcagcttcttgttcttcctgagcatcttctccaatggtgacctgagcacattctcccaggggcccaagaggggccatcgtgtctctagaaccagaactggaaggtgaaacatgagcagctggaacacactctctgagagctgcaagatgcatggggacctcaagtacctgtttgtaattacagccaaggaccagcaggcagcattgctgcatccacatgggcttttgctggaaccagtaagtctctgccagcccctcccaggctcctgggatgccacttgttctgggtagaaggctgtggcagggctctcggcttggtgggctaagcatctccctctctgatgactgccatggggcccacaaccactcattcaagagggtcaccaccacattgcaggtgttcagctggacggttccccaggcagagcctgccatggactgcatacacacagcggttccccaaggcagaggctgccatgacaagctcatgagagtgtggcagaggtgatcatcacctgatatttgtggcagaagagaaaagtccagcgtgaaggccaggtaggggagacgtgccaggctgtggggccaggccctgcgcat

SEQ ID NO: 118938 - DNA, 651 bp, Homo sapiens
atgagcagctggaacccactccctgagagcttcaagaagcatgggtacctcttgtacctgtttgtaattacagccaaggaccagcaggcagcattactgcatccacatggggcttttactggaaccacctctcagggcaagaacccagagcagatggaggcctcacagaagcctgtggcagggctctgggcttggtggctgaacatctccctctctgctgccagccatggggcccagaaccacccattcaagagggtcaccaccacattgcagagccagggctggaacaaggacctgtggataatgagggaactgctctgcaataaccggcctgagcagctgcttcaagaaacagccacaatcaaggcacctatagcccctgctgacccgtggagccaggaggtgatttacaacttctgcaaggcagtcagctccgtcagctgtatgcccttcaacattcacttcaactcaaacatcccaccagaaagcagtggggactggcgaatgcagcagccctgcaaagtggaacagagcatcctgggagcccaacgtggaggaggaggttgccgccctgggagcctgagggagctcttcccttgcctgctggcagagcccaacatggaggaggaagttgccgccctgagagcctga

SEQ ID NO: 118939 - DNA, 597 bp, Homo sapiens
atgggacgctggagcccgcggccgagtggtcggtactgctgggcgtgcaactcccaggacgggcccctggacggcgcgcacacccgcgcagtggccgccatcgtggtgccggccaactacagccaagtggagctgggcgccgacctggccctgctgcgcctggcctcacccgccagcctgggccccgccgtgtggcctgtctgcctgccccgcgcctcacaccgcttcgtgcacggcaccgcctgctgggccaccggctggggagacgtccaggaggcagatcctctgcctctcccctgggtgctacaggaagtggagctaaggctgctgggcgaggccacctgtcaatgtctctacagccagcccggtcccttcaacctcactctccagatattgccagggatgctgtgtgctggctacccagagggccgcagggacacctgccagcccagtccagagcccggtccaatgtgcatcagcgaagccacatccagcgcttacgcgacgcggtctcccacacatggcaacgcgggactgagcccgccagactgggcagctgggagcggcggcagcggcagcaacagcaggggcctgtaa

SEQ ID NO: 118940 - DNA, 655 bp, Homo sapiens
  misc_feature (1)...(655): n = a,t,c or g
tttttttttttttttctggcccatatttattactgctcgagctgagcttttgctcgctgtccaccactgctgtttgccgctgtcgcagacccgcggctgacttcacccctctagatccggcagggtgtctgctgcacttctgacccagtgaggcagcgcccactgccgctcccaatcgggctagaggctcgccattgttcctgcgagggctaagtgccccgagttcgtcctaatcgagctgaatagagggataacacctcaccgcatgggtcaagaatccattctttgaaatccgtgaggccaagaaccccaggtcagagaacaagaggcttgccaccatcttggaagctctaagaacaaggatgcccaggtaacatatgcttcagtttccttccactgtgagagttaccggaagcttggcatccgtgatggtccagggggcttccgaggcgatcgggtagtgcagtcttcagccgctaagccaagagatctgggaaggagcagtcagagagccttgggccaagatccaggggctcctggagtggctgccaggtgagatgaaccagtcgaattttcagtggtcccacacagatggnacgccgctttagagaatcctgggctgcgggcattcctttggccagtgggcagatttccg

SEQ ID NO: 118941 - DNA, 612 bp, Homo sapiens
tgcaattcctgaagcttgagaccccggatatatactctccagggggctgcggtgcgctcttcgggtccccgagccctgtgtttatgaacacgcggggacgttcaaacacccgctcctctcccgccgggcgggctcctttgtcttctgggctttcgtcgcgagatggaacgctggatataaatttacttcaacaccttttacactgaaagatattctcctaggagacagagaaatttcagctggtatttcatcttatcaattactgagttatgaagatgaatcagatgttccactctatggaaggcgaggtaaccatattgtaaatgacgttgggattaacgttgctggatcacattccattgcagagaaagcttcatttggtatagcaaccatacatgaagtggtagtatcaacattactcaaagaaattactacacgaaaaattaactttgaccacagcttgatacgtcagtcaaggagcagcagaaaggcagtattgtgtgtggtcatggagagcatccgaaccacacgacagtgctcactgtctgtgcatgctggaattcgaggggaagcaatgcggtttcactttatggatgaacagaatcccaaggg

SEQ ID NO: 118942 - DNA, 1131 bp, Homo sapiens
atgaagaacactttggaggttcctcaaaaactaaaagtagagctcccatatgatccatcaatcacattgctagatatatgcccgaaagaaaggaaattaatatatggaagtgcttctaatagagctgtaacactcatcacatggcccaagattccattccttggaatccgtgaggccaagaaccccaggtcagagaacacgaggcttgccaccatcttggaagtggcccaccgccatcttggaagtggctcgccaccatcttgggagctctgtgagcaaggacccccggtaacattttggcgatcacaaagggacctccaaagtgctgtacctagcccttatactctgctttcccaaataccagaggaagcagagtggtttacagtcctggacgttaaggatgcctttttctgcatccctgtacatcctgactctcaattcttgtttgcctttgaagatccttcaaacccaacgtctcaactcacctggactgttttaccccaagggttcaaggatagcccccatctatttggccaggcattagcccaagacttgagccaattctcatacatggacactcttgtcctttggtatggggatgatttaattttagccacccattcagaaaccttgtgccatcaagccacccaagtgctcttaaatttcctcactacctgtggctacaaggtttccaaacgaaaggctcagctctgctcacagcaggttaagtacttagggctaaaattatccaaaggcaccacggccctcagtgaggaatgtatccagcctaaactggcttatcctcatcccagaaccctaaagcaactaagagcattccttggcataacaggcttctgccaaatgtggattcccaggtacagcaaaatagccaggccattatatacactaattaaggaaactcagaaagccaatacccatttagtaagatggacacctaaagcagaagcagctttccataccctaaagaaggcccttaacccaagccccagtgttaagcttgccaacagggcaagacttttctttatatgtcacagaagaaaaaggaatagctctaggagtccttatacaggtccgagggacgagcttgcaacctgtggcatacctgaataa

SEQ ID NO: 118943 - DNA, 620 bp, Homo sapiens
  misc_feature (1)...(620): n = a,t,c or g
gatgacagatnncccaagggaagggacanagctattgttttcccagcacatacaaccatagctttcagtgtttttgaactcttcatatacctggatggtgcctttgacctttgtgtcacttcagtgtcaaaaggaggatttgaaagggaagaaacggcaacatttgcactgctgtacaggttgagaaatatcctatttgaaagaaatagaagagtgatggatgtcatttctcgttcacagcctttacttgaatgatcttttttctgactactatggacaaacctcctcagcatgactgatatttcactcaaagaagggacccatatccgagttaacttacttaatcacaacattcccaaagggccttgcatactctgtggaatggggaacttcaaaagggagacagtttatgggtgctttcagtgttctgttgatggtcagaagtatgtgagacttcatgcagttccttgttttgatatttggcacaagaggatgaaataaaatgaaaaatgaataccccgtgttggtgttttaggtgcagttgtgccacaaaccttccctaaattatctaggtttgaaatgatcccttaaattaaaatgagaaaaaaaaaataaagaaa

SEQ ID NO: 118944 - DNA, 529 bp, Homo sapiens
aaaaaggatgcagagaatcatgaggcccagctcaagaacggcagccttgactccccagggaagcaggatactgaggaagatgaggaggaagatgagaaggacaaaggaaaactgaagcccaacctaggcaacggggcagacctgcccaattaccgctggacccagaccctgtcggagctggacctggcggtccctttctgtgtgaacttccggctgaaagggaaggacatggtggtggacatccagcggcggcacctccgggtggggctcaaggggcagccagcgatcattgatggggagctctacaatgaagtgaaggtggaggagagctcgtggctcattgaggacggcaaggtggtgactgtgcatctggagaagatcaataagatggagtggtggagccgcttggtgtccagtgaccctgagatcaacaccaagaagattaaccctgagaattccaagctgtcaaacctggacagtgagactcgcagcatggtggaaaagatgatgtatgaccagcgactgtatt

SEQ ID NO: 118945 - DNA, 1672 bp, Homo sapiens
ttttaagatgtataattatatttaaaaacaagcaatgcttaattttgtgcctgattttcctctttaaaaatggatttatctgggggttgcagttgatgacgttttgattttaatatgtttgctgctgctaccaagagctttgtcaagcaagttggagatggagggagattatttcctgttccaagcctcagtgaagctgaccaatatcaacccttaagtcttgtgggtaaaaaagaagcgatgctttctgtttcctagatataaacttacttcaacaccttttacactgaaagatattctcctaggagacagagaaatttcagctgggatttcatcttatcaattactgaattatgaagatgaatcagatgtttcactctatggaaggcgagggaagcagaagactgaggaagatgaggaggaggaagatgagaaggacaaaggaaaactgaagcccaacctaggcaacagggcagacctgcctgattaccgctggaccaagaccctgtcggagctggacctggcggtccctttctgtgtggacttccagctgaaagggaaggacgtggtggtggggctcaaggggcagccagcgatcatcgatggggagctctacaacgaagtgaaggcggaggagagctcgtggctcattgaggacggcaaggtggtgactgtgcatctggagaagatcaagaagatggagtggtggagccgcttggtgtccagtgaccctgagatcaataccaagaagattaaccctgagaattccaagctgtcagacctggacagtgagactcacatcatggtggaaaagacaatctatgaccaaaaaattaactttgaccacagcttgatacgtcagtcaaggagcagcagaaaggcagtattgtgtgtggtcatggagagcatccgaaccacacgacagtgctcactgtctgtgcatgctggaattcgaggggaagcaatgcggtttcactttatggatgaacagaatcccaagggaagggacaaagctattgttttcccagcacatacaaccatagctttcagtgtttttgaactcttcatatacctggatggtgcctttgatagaagagtgatggatgtcatttctcgttcacagctttacttggatgatcttttttctgactactatgacaaacctctcagcatgactgatatttcactcaaagaagggacccatatccgagttaacttacttaatcacaacattcccaaagggccttgcatactctgtggaatggggaacttcaaaagggagacagtttatgggtgctttcagtgttctgttgatggtcagaagtattatcaaattaaaagcacactgaactcaacatggggttttgtgtacacagttaacaaggtgactgatagtagtaatgggctgccattctatgatgtggatatgctcacgagttttgtcttcataaaacgcaatacggtcattgtgaagttaagacagattccattccttggaatccgtgaggccaacaaccccaggtcagagaacacggggcttgccaccatcttggaagtggcctgccgccattttggaagtcgcccaccaccttcttgggagctctgggagcaaggacccccggtaacactttggcgaccacgaagggacctccaaggtgaattgaaactgtaa

SEQ ID NO: 118946 - DNA, 657 bp, Homo sapiens
ctgcctcatttataaatatatgtatatattttattaccattatatacatggcatatctatacagttacatttacacttgatttagagtcaaagtcatatctccacacacaggacttggactcaaagcttttaatgacaagcatgcaaaatttcttagtatagaccctaagagtacccttaatataagtatgtttatttaaaaattctatgtatctactactgttaccagggggtccttgctcccagagctcccaagatggtggtgggccacttccaagatggtggccggccacttccaagatggtggcaagcctcgtgttttctgacctggggattcttggcctcacggattcgaaggaatggaatcttgggccgtgcggtgagtgttatagctctattagaagtcgtgggtcacggaagagaaccgtggaacccagtgactagtgttcagcttgattaggacaaacccgggcacctagctgtgcaggaacaatgggcaagcctttagccggatcgggagcggcaatgggtgcctcattggatcaggagcacagtggacaccctgccggatccagacggatggcagtcagcagcgggtctgcgacagcgacaaacagcagtggtggacggcgagcaaaagctcagctcgaaccatga

SEQ ID NO: 118947 - DNA, 379 bp, Homo sapiens
atggtgcgatttctccagttcactgcatcgaagcgtgcaagcattgcggactttctgcgttaccctatccggagccttcgtcagagactgcacgactgtgctaagttcaacgacatgcgaaccttctacagatgtggctgggcaatgaacatcgtgacctcggtgctcctgctctatggcagtgaggaggaggccttctggctcctggtggccctgtgctgagcgcatgctgcccgactactacaacaccagggtggtggtgatacgcacatacgaccaacggtatgaacaatgtgtcgacctctacgacggactccccactaccctgttcacgaccgacgactggcatgtgtggcccgacctcactggactaccctga

SEQ ID NO: 118948 - DNA, 251 bp, Homo sapiens
accgaggccagaaaagccgctgcagtcatgcccaagacagctgtcctggcagccgagaggcccaagaaagcttggggcgtccttattccgaaaaagagtactaagcggaccccaaaagcttttgctggtggaggctgctggagaaggttggttggtcaaaggtggccaagaaagttcccaagccggaggcatccaagcctaagaaagcggcccccaaaacaaggagatataagagtaccttaaagacgaaa

SEQ ID NO: 118949 - DNA, 427 bp, Homo sapiens
aaagcagtgctggtcaagaggagtcaatttagaatagtcaaaaaagtcttattttaggcaactttgtctcatcttggctggccagcagactgctactgggatttataatgattctgtcttctctctttggataatctgggttttccagaagaaaattacaaagtcttgtccccgatggcagtgaaagttgttcaagtgaattacctcttcattgttgtttccctcttccattttcaaatgcagacatgcacatacgggactgctaatatctaaacatggtgaccatctgtttcaaaagagtcgccactcaactcgccggctagccaggcgggttcggcgactttcgctaccacgccgcttactcctccaaagctgcagctacgagctccgtggcagccgctgcactccttccggccctgccacgaaa

SEQ ID NO: 118950 - DNA, 1098 bp, Homo sapiens
atgactgtcagtttcctgaggcctccccagccacgcttcctgtacaggctgcagaactacctcacgctcagtttatccatggctaaaatctatggcaaagccagccctgatcaagagggtggagccgcctgccagtcccgtgctgtgcgcctgcactcctcagcccttgggcggtcaatgggatccggcgccgaggagcaggggacggcactcgtcggggaggctcaggctgcgcaggagcccacagtgccgggttggttgcaagtggcccagagtcttggatccctggtcctgttccaccgggagcagaaccacctcgacgcggggacagcggcctcgctcgctgcccagcgcccggacacccgagccgggccagcccccagcgccccgcagaagggtttgacgcacttgcggcgccctcgcgagtgccgggtgacagtcgccaactttcgcggaacaacacgcgctccagatgtgaggggagaggaggaaaaacgccgcccgcctgggctggggttcacaggcacgggccgcctcccgccgctcctccaggccgcgctcgggtgcacggacaccgcctccgcggcggcctcgggcccgggggagggaagcgcggtctcccgggctgttgccctcgcgcagcagacccgaggggccggcccgcgaaacttcgcgaagtggcgagagggggccacccggccgctcagcgcctttgtcgctccagcctcgccaccgcaccgggctcgagacgcccagcccagccccttggcccgatcccgcccgggcctcggcccgcgcccctcagctcggcggccctcacggcccgcgcccccgcccccacccccggagctccacagaggcgcccctcagagaggccgcgtcgcctcacagacccgcccaggagctcgagcgcgccccgcagccgacactcactcgtcactcaagtcgccggctagccaggcaggttcggcggccttcgctaccgcgccgcttactcctcagaagccgcagctgcgagctccgtggcagccgctgcactccttccggccctgccgcggcgtcacctcgcgcctgcgcacagcgccccctcccgactaa

SEQ ID NO: 118951 - DNA, 499 bp, Homo sapiens
agacgtgccggaccggaattgccgggtcgacgatttcgtaggtgacgccgcggcaggctcggaaggagtgcattggctgccacggagctcgcatctgcggcttctgaggagtaagcggcgcggtagcgaaggccgtcgaacctgcctggctagccggcgacgttgagtgacgactcttttgaaacagatggtcaccatgtttagatattagcagtcccatatatgcatgtctgcatttgaaaatggaagagggaaacaacaatgaagaggtaattcacttgaacaactttcactgccatcggggacaagagtggatcaatctccgagatgggcccatcaccatatctgactcctcagatgaggaaaggattccaatgctggtcaccccagctcctcagcagcatgaagaagaggacctggatgatgatgtcatcctgacagaaactttgtaattttcttctggaaaacccagattatccaaagagagaagacagaatca

SEQ ID NO: 118952 - DNA, 353 bp, Homo sapiens
accggagatacctgtcccccaaatacatcaagatgtttgtactggatgaagctgacgaaatgttaagccgtggattcaaggaccagatctatgacatattccaaaagctcaacagcaacacccaggtagttttgctgtcagccacaatgccttctgatgtgcttgaggtgaccaagaagttcatgagggaccccattcggattcttgtcaagaaggaagagttgaccctggagggtatccgccagttctacatcaacgtggaacgagaggagtggaagctggacacactatgtgactttatccgccatgcatggagatatggaccaaaaggaacgagacgtgattatgaggga

SEQ ID NO: 118953 - DNA, 410 bp, Homo sapiens
ccaacctccaggagtggaagctggacacactatgtgacttgtatgaaaccctgaccatcacccaggcagtcatcttcatcaacacccggaggaaggtggactggctcaccgagaagatgcatgctcgagatttcactgtatccgccatggtgtgtttgcccgctgccagcctgttgtgggtctgcccgtcagaagtgtcctacttgaagccagggttcctggaacccaggtgcctacctggtctgctgcatatttgttttctcttccagcatggagatatggaccaaaaggaacgagacgtgattatgagggagtttcgttctggctctagcagagttttgattaccactgacctgctggtgagtagagggaactgatagcaaaggcagaagggaggatccaaggtgatt

SEQ ID NO: 118954 - DNA, 534 bp, Homo sapiens
atgctttcttatgtgcttgaggtgaccaagaagttcatgagggaccccatttggattctggtcaagaaggaagagttgatcctggagagtatccaccaattctgcatcaatgtggaacaagagaagtggaagctggacacactgcgtgacttgtatgaaactctgaccatcacccaggcaagtcatcttcaccaacactcgaaggaagtgctgttcaaaggtgagggagatatagaaggaaaagtggagagaagaggcaatgaaaacaatgatcagtaccagtggctgtacaggagactggaacttacttcactaattcttcagtgtgaaggctttagaacagattacaactgggatcaagagcctgcaaaatctgcatcctccctgcctgtcattcaaactactgctgtagtggccacaatcggtagtaatacaacatccaagatagctcttgacgccctgcctttgatccatgaggaagcatgctataaaaattgggcttcccgggccaggcgcagtggctcaccccagtaa

SEQ ID NO: 118955 - DNA, 467 bp, Homo sapiens
ggaattccaacgtggaacgagaggagtggaagctggacacactatgtgacttgtatgaaaccctgaccatcacccaggcagtcatcttcatcaacacccggaggaaggtggactggctcaccgagaagatgcatgctcgagatttcactgtatccgccatgcatggagatatggaccaaaaggaacgagacgtgattatgagggagtttcgttctggctctagcagagttttgattaccactgacctgctggtgagtagagggaactgatagcaaaggcagaagggaggatccaaggtgattccctctccaaggggacatcagtgcctctcaggaaagtagcagcttggaatataatctggcatgcctaaggcctttggggaactgggatgcttatttcctctgccttccttggctgcccacatggatgcctaagtgtcttccctccgggatagagtgtcctccgtg

SEQ ID NO: 118956 - DNA, 879 bp, Homo sapiens
cgcgcaattcccgacgagattagatctaaaagccacccaggccttggtcctagcacccactcgagaattggctcagcatatacagaaggtggtcatggcactaggagactacatgggcgcctcctgtcacgcctgtatcgggggcaccaacgtgcgtgctgaggtgcagaaactgcagatggaagctccccacatcatcgtgggtacccctggccgtgtgtttgatatgcttaaccggagatacctgtcccccaaatacatcaagatgtttgtactggatgaagctgacgaaatgttaagccgtggattcaaggaccagatctatgacatattccaaaagctcaacagcaacacccaggtagttttgctgtcagccacaatgccttctgatgtgcttgaggtgaccaagaagttcatgagggaccccattcggattcttgtcaagaaggaagagttgaccctggagggtatccgccagttctacatcaacgttgaacgagaggagtggaagctggacacactatgtgacttgtatgaaaccctgaccatcacccaggcagtcatcttcatcaacacccggaggaaggtggactggctcaccgagaagatgcatgctcgagatttcactgtatccgccatgcatggagatatggaccaaaaggaacgagacgtgattatgagggagtttcgttctggctctagcagagttttgattaccactgacctgctggccagaggcattgatgtgcagcaggtttctttagtcatcaactatgaccttcccaccaaccggggaaaactatatccacagaatcggtcgaggtggacggtttggccgtaaaggtgtggctattaacatggtgacagaagaagacaaga

SEQ ID NO: 118957 - DNA, 1764 bp, Homo sapiens
atggcttctctggaggagggtatctacagccttaaaattaattccaaacgtagctcctataattccatgaaccctcaatttacagctggaagtgagggtcaaaatgaaactgaggaaccaaacaagttccagagcaggaagggtagacctcaagatagtggctcttcattgtctctgagtgttctccaggagatcctgggagatgacattccaaaagtaaaggaagaggctgtcattagttcacaatcagacctaggagagtgtccctactgtggagaaagaccagccaggaatgccactatctttgctcctcaaaaagagaaagagtcagccccagaaatgagcagctcctgtgacaagagggtgactgttaatcctcctgagaaattcagtgaggggcgacctaaaacacaaaatacactcatttgtgaaaaatgctctcagccttcaaattttctggatgactataacccccatgtaataatccaaaagcgacttagcaaccaaagtagagtcatttgtgaaaaaagctctccacctttaaatgttccggataactataactcccattcagtaattcaaaagcacaaagaaaagatggcaattgagcgcccctcttcagggagtgactggtctgatgtaggtggaaccacagtcatattctctgaagagaagccattctcactgtgtcttcctgtagtgtcagagcctccatactacgccactgactacaccacttttccacctcattatagtccttggcatgactacaccagctcttggttcagcagtaccaagtcttcttgctatccctccttgggcagcagcagtaacacattgcaggctgggaagagcagctgtagcagcagcagcagaagcaacaacaacatattccagggtgagaggagcagccaccagagcttcctgagtgattattccaccagttttccagtgagctccgaaaacacatccagagatctgaagatgacagaggaaggcagatccaagaattcttccttattttactactccagaaatgtggaagcagaggcgaaggaggagagagtatatcaagaggagacattaggacatccttatggaggacgtgcatctagctttccgccaaggaccatctggcagccagagcaaccgggtttcattgatacccactgtcatttagacttgctatattccaggctgcctttcaaaggcacctttaccaaattcagaaaaatttatagcaacaccttccccaaggagtttcagggctgcatttcttgcttctgcaatcctcaaaacctaagtgataacctgtgggaggatcagttgaaagatgatctggtttggggggtctttggctgtcgccctcattttgcccattattataacaactatcaagaaagaagtattttaaaagccttacgacaccccaaggctgtggcattcggcgaaatgggcttggattactccagtaagtgcaccacgcatatcccagagcagcagaaagtatttaagagactgctgcggctggccgtctctcttaaagaagcccatgatgatccactgccgagaagccgatgaagacctactgggcatcttgaaaaaatatgtgccctctgaccacaagatgtaccagcattgcttcactggcagttacccagtcatcaagcccctgttgagctgctttcccaacctgtatgtgggcttcatggcaattctgacttactcttctgctgagcaagcccgagaaactgtgaaaaagat

SEQ ID NO: 118958 - DNA, 1027 bp, Homo sapiens
ccatggtccagcatagaggtgtttgtgtctctgtctgtgcctggggtctgcctcaacagcttcttaaggtttggattaattctataccagtcttattccacccaggtataaggtctgttcttgagtcctagccccaaattatcatattacctttagaaatctatcttctgtttcttccccagtgacatcagcagaaccggttttgcaggctgggcaggcaagggagctcagtttctcctctctgcatccagcctctcctttgcttgtgccctcaacccctgctctcacccttcatgcattcaatgccctggtactttttccttcttttcccctggaaaaagctgccaagagagaaaggcccaaatcaaaaattcagataacagcaagagttggaaagatgagaagaacttggagccctcataccaccatttctgctggtggaagtgtaaatggtgcatccactttgaaaaacagtctagtttgggaggccaagccagccgacaccacaaacccaacaccacccaccacccaccccaaccccggaccaacaccccccacaaacaccaaccgacaccccccaccacaccaccctctaacaaacaccccagcaccgccgcaccagccacccgcaaccacacccacccgcagacccagacaccaaactactgcccaaacactgaccacaccacccccactcacgacaccccaaatcctgtccccccgacgcgcagaacgccccccaacagaaccggaaagcgcaccaacacaagtcaaaactacaggttggtatcaccagcacccaagattcactgggaggcatagtagtgggctcaggatatatgacagggaggagaaatttctcatctcaaatgaaaagaagatattttctgaaaatagtttaaagtctgaagaacctatcctatggaccaagggtgagattcttggaaagggagcctacggcacaaataaactcaaagccggcaatgccctggcatttttgggtcttgagagaaaacaatttgaatga

SEQ ID NO: 118959 - DNA, 759 bp, Homo sapiens
gggaaaatcattttttatttgcacatgaaataatgtactgcttttcagaatgaaaacacttacaaatcatttttattatgaataatttaggatatttgggacattcatttctgagtaaaatagttcaaaataggattttgttgatacctgttgatacatatttagaaacaaaaatgagatatccttttgaaagtttgcctttgtagtaaattcagtcattcaaattgttttctctcaagacccaaaaatgccagggcattgccgagctttgagtttattctttgtttcttcatcaaattcttccatgggactctattagtttcccaggttccagctcacctagtgggaaaggggggtaatcgggttcccaaaatgactttatcctttcctatggacatctggttaacagcttgaggggacagaggatcatgaaccaaagcatctgtgtaaaaggaaccaaggtatttctccgggttcatgggggttgtcctgggcacacagatctgggcgcatgctgaatccatgggagattcttcccactgtgaaggggaaggcaccaccaccatgtgcgaaacacactttcagtttgggaaacttctcaaatactccacccatgatcatggagcaaatggctatggtggtctctgctggcattcctacaagccaagggagccagtatttggccattcgtccatccatctgcatgtccccaggatgcacgaacaaggaacactttagcctttcggctggcgcatagac

SEQ ID NO: 118960 - DNA, 429 bp, Homo sapiens
atgaggaaaaacaagcacaaaaagccagaacgcctcttctcctccaaaggatcacaactcctcgccagcaagggaacaaaactgatcgagaatgaatttaacgaattgacagaagtaggcttcagaagaataactagcttagagaagaacataaatgacctgatggagctgaaaaacacagcacgagaacttcgtgaagcatacacaagtatcaatagccaaatcaatcaagtggaagaaaggatatcagagattgaagatcaacttaatgaaataaagcatgaagacaagattagagaaaaaagaatgaaaaggaaccaacaaagcctccaagaaatatgggactatgtgaaaagaccaaacctacgtttgattggtgtacctgaaagtgacattgagaatggaaccaagttggaaaatactctttag

SEQ ID NO: 118961 - DNA, 2267 bp, Homo sapiens
atgacaggacagtttcaggatgtggtgagggaagaggccagaccattgccaaatagaataatgagacttcgtttcaatcattttgctacagagtgtagttgggaccatttatatgtttatgatggggactcaatttatgcaccgctagttgctgcatttagatgtgaggtagaaaatcgataccaaggaaaccctctcagaggaacatgttattatactcttcttattgactatcagttcacctttagtctatcccaggaagatgatcgctattacacagctatcaattttgtggctactcctgacgaagagacacctcccatcaggggtcgacagacagctcatacaggagagctccagctgacatctggtggatacccctctgggatgaagcttccagaggaaggaacaggtgaaaggaataggatcaccatcaacaaaaaggacgtccatacagaaaccccatccaaaggtcaccaacatcaaagaccaaaggtagataaatccacgaagataaagaaaaaccagcgcaaaaaggctgaaaattccaaaaacaagaacgcctcttcttctccagaggatcacaactcctcgccagcaagggaacaaaactggatggagaatgagtttgatgaattaacagaagtaggcttcagaaggtgggtaataacaaactcctccaagctaaagaagcatgttctaacccaatgcaaggaagctaagaaccttgaaaaaaggttagggcaattgctaactagaataaccagtttagagaagaatgtgaaagagctgatggagctgaaaaacaaagcacaagaactttgtgaagcatacacaagtatcaatagccaaatcgatcaagcagaagaaagcatatcagagattgaagatcaacttaatgaaataaagcatgaagacaagattagagaaaaaagaatgaaaaaggaacaaacaaagcctccaagaaatatgggactatgtgaaaagaccaaacctgcgtttgattggtgtacctgaaagtgatggggagaatggaaccaagttggaaaacactcttcaggatattgttcaggacaacttccccagcctcgcaaggcaggccaacattcaaattcaggaaatactgaaaacgccacaaagatacttctcaagaagagcaaccccaagaaacataatcatcaccttcaccaaggttgaaattaagggaaaaatgttaagggcagtcagagagaaagaccacagtgcaatcaaattagaactcaggattaagaaactcactcagaactgcacaactatgtggaaactgaacaacctgctcctgaatgaatactgggtacataacgaaattaaggcagaaataaataagttctttgaaaccaatgagaagaaagacacaacataccaggatctctgggacacagctaaagcagtgtttaaagggaaatttatagcattaaatgcccacaggagaaagtgggaaagatctagaatcgacacccttacatcacaattaaaagaactagagaagcaagagcaaacaaattcaaaagctagcaaaagacaagaaataactaagatcagagcagaattgaaggagatagagacacaaaaaacccttcaaaaaattaatgaatccaggagctggttttttgaaaagattaacaaaatagatagactgctagccagaccaataaagaagaaaagagagaagaatcaaatagacacaataaaaaatgataaaggagatatcaccactgaacctacggaaatgcaaactactatcagagaatactataaacacctctatgcaaataaactagaaaatctagaagaaatggataaattcctggacacatacaccctcccaagactaaaccaggaagaagttgaatccctgaatagaccaacaacaagttctgaaattgaggcaataattaatagcctaccaaccaaaaaaagcccaggaccggatggattcacagctaaattataccagaggtacaaagaggaggtggtaccactccttctgaaactattccaaacagtaggaaaagagggacccctccctaactcattttactgggccaacatcatcctgataccaaaacctggcagacacacaacaaaaaaagaaaatttctggccaatatccctgatgaacattgatgcaaaaatcctcaataaaatacgggcaaaccaaatccagcagcacatcaaaaagcttatccgccacgatcaaatgggcttcaaccccgggatgcaagggg

SEQ ID NO: 118962 - DNA, 769 bp, Homo sapiens
ttagtttggctggatatgaaattctgggttgaaaattctttctttaagaatgttgaatattggcccccactttcttctggcttgtagggtttctgccaagagatctactgttagtctgatgggcttcgctttgtgggttacctgaccttttctctctggctgcccttaacattgtttccttcatttcaaccttggtgaatctgacaattatgtgtcttggggttgctcttctcgaggagtatctttgtggtgttctctgtatttcctgaatttgaatgttggcctatcttgctagttcggggaagttttcctgaatagtatcctgaagtgtgttttccaacttgtttccattctccctgtcattttcaggtacaccaatcaaacgtagttttggtctttttcacatagtcccatatttgttggaggctttgtttgttccttccttctcattcttttttctctaatcttgtcttcacactttatttcattaagttaatcttcaatctctggtatcctttcttccacttgatcgatttgactattgatacttgtgtatgcttcacgaagttctcgtgctgtgtttttcatctccatcaggttatttatgttcttctctaaactggttattccagttagcagttcctataaccttttatccagattcttagcttcctcgcattgggttagaacatgctcctttagcttggaggagtttgttattactcaccttctgaagccgtcgacgcggccgcgaatttagtagtagtag

SEQ ID NO: 118963 - DNA, 412 bp, Homo sapiens
  misc_feature (1)...(412): n = a,t,c or g
ctctttgggtctgcatgtttctctaatgnnnnnnnnnnnnnnnnnnnnnnnnnnnnnnnnnnnnnnnnnnnnnnnnnnnnnnnnnnnnnnnnnttcaatcaagaaaagacctttgatcaggagaagacttctcgtctcatttctggggacacattcaggatttctccaaagcaggtgaaggtacgctcgagcgtggtcattgaggacaagtcgacgagagatcccgagtacatctacagtcagccttacggagaaaatcagcttcctgtttggatacccactagacatttgaagttctacaatgaacccattggagatgcaaagaaaagggcctccacggagatgtctgcaggtgtacccaacagctccgaagagacagcgaccatcgagaacgggccatgatgacgatggt

SEQ ID NO: 118964 - DNA, 1540 bp, Homo sapiens
atgccaattcagatgcagtatccacaatataagctggtagaaaataagacccaaccaccagtaatttatcagtactggccgccagccgaccttcagtatcggccacctccagaggttaaatacagacctcaagtggtgtgtcctgtgccaaatagcacggcaccataccagcaacccacggcagtggtgtttaatcctaccgcaccacctagtggacaaggcattattgctcaaaatacagatcttgtggagtggttcttccttcctcatagtacaattaagacttttacattgtacttggatcaaatggctacattaattggtcaggcaagattacgaataataaaattgtgtgaaagtgactcagataaaatcattgttcctttaaacaaggaacaggttagacaagcctttatcaattctggtgcatggcagattggtcttgctgattttgtgggaattattgacaatcattacccaaaaacaaaaatcttccagtttttaaaattgactacttggattttacctaaaattactagacataaacctttagaaaatgctctgacagtgtttactgatggttccagcaatggaaaagcggcttacaccaggccaaaagaacgactcattgaaactcaatatcactgggctcaaagagcagagttggttgctgtcattacagtgttaacaagattttaatcagtctattaacattgtatcagattctgcatatgtagtacaggctacaaaggatgttgagacagccctaatcaaatatagtatagatgatcagttaaaccagctgtttaatatgttacaacaaactgtaagaaaaagaaatttcccattttatgttactcatattcgagcacatactaatttaccagagcctttaactaaagcaaatgaacaagttgacttgctagtatcatctgcattcctggaagcacaagaacttcatgccttgactcatgtaaatgcaacaggactaaaaaataaatttgacatcacatggaaacaggcaaaaaatattgtacaacattacacccagtgtcagattccacacctgcccactcaggaggcaggagttaatcccagagaacaacattttactggtaaaaagaatagcccacatgaaggaaaactgatttggtggaaagacaagaaaaataagacatgggaaatagggaaggtgataacatgggagagaggctttgcttgtgtttcacaaggagaaaatcagcttcctggttggatacccactagaaatttaaagttctacaatgaaccccttggagatgcgaagaaaagcgcctctgcggagacaaaaaaccctcaattgagcatcatcgactcgccagggaaggcaccaggatgtttaatgcctacaacccaaaactggttggtagaagtacctaccgtcagtgccaccagtaaatttacttatcacatggtgtatccaccagctccgaagagacagcgaccagcaagaacgggccataacgacgatggcagttttgtcaaaaagggggatatgtag

SEQ ID NO: 118965 - DNA, 759 bp, Homo sapiens
tttcgtatggttatcaggtgccttccacagagggaactggactgcgacagagggaactggactgcgacgtctgctgaactcacgggaatcaaatggcgtaggtacaattttggagggcatggggactgtggacccataatttcagtcccagcccaagatgatccaattctgttaagtttcatccgctgtctgcaagctaacctgctttgtgtatggcgtcgtgatgtctaaccagattgctgagagttatggatattctgttggggagatgaacccaacctagtgggtgtaatacatcatgaactgcaggttgtggaagaaggactctgggaaaatggcctttcctatgaatgtaggacgctgctcttcaaagcgatacacaatctgttagaaaggtgcctaatggataagaacttcgttaggattgggaaatggtttgtccgaccctacgaaaaggatgaaaagccagtcaacaaaagtgagcatttgtcctgtgcctttcacattctttctgccatggagaaagtaatgtatgcacaagtgtggagattgcccagcaccagccaatttatttgatcaatgaggagcatatacacatggctcagtcttcacctgcaccatttcaagtactggtaagtccttatggcttaaatgggacgctaacaggccaagcatacaagatgtcagacccagccactcgtaagttgattgaggaatggcagtatttctacccgatggtgctaaaaaaaaaaaaaaaaa

SEQ ID NO: 118966 - DNA, 1504 bp, Homo sapiens
atgaggcatccttgtgatggaaatagtctgtattttgaccatatcagtgtcaatatgctggctgtgatgttgtactacggttttggaagagttagcattgggaaaactgggttaaggggtgttcagcgtcatctctggcccctgccattggatgccagcagtaccaagacagtgtcgtcgagccacagtgataaaggtgaaatcttttcaccttttccttgtagcttaattaattgcaacaattttgaaatgcgaaacaccacaaagtgcctaatggataagaacttcgttaggattgggaaatggtttgtccgaccctacgaaaaggatgaaaagccagtcaacaaaagagttacttctcaggagatctggctgtttgatgagtatgtgtgtgtctctcccctgctttgcagtggaaagatgtgccttgcttcccctttgccttctaccacgattgatgatatccataagctccacgagcagacaaccacagtacataagcagaagaggattaaaagccaagatttcatgggtggtttagtaagctgctggcagcccaaaagggtcacaatgtttttctctgtggaaggttctttgcagtatagtaagcacacaaggattgacattgcccttgtacatatcgtgctgacattcttctttgtggttgtggaagaaggactctgggaaaatggcctttcctatgaatgtaggacgctgctcttcaaagcgatccacaatctgttagaaagaagaatacgaacaaatgcgaaaatgaattacattcttttaagttttgtactggcaatggtagcatgtttctttgtcgagagacaattagaagagcagaaaaactgggagggaggggaaatgcagtattatcagctgtcagatgcatctgaggctgattacggcaggcacatagaactttccagtgctagattcacgaagaacccctgtaccctgaagcttatgttagataaagaggccagtatgcttgctcattgttgggtttgttgctgttacgtacagggactggagtacaggacagggaagggtggtaacaacattgaagctgtaaagaaagtgaaagaactgaagacctcttgggtggtccctggaattctctctcaatgttcttttctgcaagggaagcagcggccaagctggaatgctcacaaagctacagcgtctttttatgggttccatctagctctagagttttatgattcagtaaggtatttcacgttttctcatgaaaacgtttacaacaccaaaataataccttttgatccaagcctattagcgctgtgggcagtgctagagttcatttcaccgctgaagttacattttgccacacagtcttcaacaaagctcaagacatctgacttccttttcctgtatctggctgtctcctccaagcggcattccctacctgaccctctaatggaaagtagtcctgtcccagtcagtcactttctcatctattgctttgtagcagacaact

SEQ ID NO: 118967 - DNA, 1017 bp, Homo sapiens
atgaagctggttggttgctcctaagttcagtggacgaagtgatgaaagaaaatgatgaactcagggattctatctcccagcttcagaagcagatactgagtctcaaatctgctaagattgccctgactgagagtcttatctcctttagagaaagagctgaaattgtggaaaaacagacacaagctcttatcatgtgagtggctgacctgcaacaaggaaatgatcagacatttcagggactactggacactggctctgagctgacgttgattccaggggacccaaaacatcattgtggtcctccaggaccaaaagtaagggcttatggagatcaggtaattaacggagttttggctcaggtccaacttatagtgggtccagtgggcccctggactcatcctgtggtcatttccccagtgccagaatgcgtaattggcatagccatacttaacagctggcagaacccccacattggctccctgactggtagggtgagggctattatggtgggaatcagctggcaaggccagcaatatacctttactgtcctacctcaaagatatatcaactttccagctttgtgtcataaaacagcaaaaagacacacagctaggaggtaaccacagattgcactagaagccaggatccagacaagcccctgcagacccaggaactacaactgccacaacatgaggccaaacccagactctagaccagactctgtgttctcagagtccagaagacaaagggtccaggattgccctaacagacccaggatccaggcccatcccagtagacccaaataccaggccagttccccatgcactgaggatccagtaccatccctgaagacccatgctcaaggtcagacaccatggacccaggaccctttcagactcaggctcaagggccaccccaagagcaagccagcccccatggacccaggcttcaggctagctcctgtgaatacagattccaggcccaaccccacccaggtaacacgtccacccacctgct

SEQ ID NO: 118968 - DNA, 1268 bp, Homo sapiens
tccaagtcccaaaactgaagaaccctgactaatacagattttggtattgggagtggttctagaggaacagaatattaaggatggagttctttgattggttttgggctttctggagttggctgcttaatatgattagatcccaaaatgctaaggattctagttctaatagtatggagaacactgatagtccttggtgtgaactgtttagagaattatgcaaaataaatgcacttgacgttcctgattcactgcttgtgagaggcaatgagtttagtgcctctgtacataatacttttgaccatatgtggagaaccaaggaacgatatgaagccggttggttgctcctaagttcagcggacagagtgatgaaagaaaatgatgaactcagagattctgtctcctggcttcagaagcagatactgagcctcaaatctgcgaagattgccctgagtgggagtcttatctcctatagagaaagagctgaaattgtggaaaaacagacacaaactcttatcatgcgagtggctgacttgcaacaaaaggggtatatcaactctccggctttgtgtcataatcttatttggagagaccttgatcacttttcctttccatacgatatcacactgtttcattacattgatgacattatgctcattggatccagtgagcaagaggtagcaaacacactggacatattgaaagggcagaggtttgtcctcactgtaatagatacttactccagatattggtttgcctctcctgaatgcaatgcttctgccagactaccattcatggattcacggaatgcattatccactatcatggtattccacacagcattgcttcttaccaaggcactcactttatggctgaagaaccaggatgggtccaagaatcaaggggtggaagtgacaccattcaccatcacccctagtgatccagtagcaacatttttgcttcctgttcccatgacattacgttctgctggcctagaggtcttagttccagagggaggaacactgccaccaggagacacaacaatgattccattaaactggatgttaagactgccacctggacactttgggctccttctacctttaagtcaacaggctaagaagggagttacagtgttggctgtggtgattgacccagactatcaagatgaaatcagtctactattccataatggagcaattattagcgacggcaatggggttatcttgattggcttgcttcagtggttctcaaccctggatgcaatttag

SEQ ID NO: 118969 - DNA, 2212 bp, Homo sapiens
caagcaggatatcaagtccacaaactgctctaagacaaggctgacggcaaagtgcctacagacatcgccacaaagactgcatgagctctgcatcgtgccaatcacacacatcacacctcgtgctaccttcccaacaagccgtggggataaacacgcctatggcttccattttaacggatcaagttggttcacttgttcagcctggccaaactaccccagtcccgcctccgagcaccgcccgctgcggcccggggcgccggagcccccggcccggagcgacgccccttccgcccgccgcgcctccgcggggcccggcgtcccggccgcggccgcccagcgctcagacaatgacggcgcggggacccgcctggccgtcccgggccccgcggggacgccaaccacaaataggggtgttaccatgaaagagccacgcaaccacagggaagcacagctgcccgagcagcaggtctgcgggcacagcagcttcccctggaaggagcgtggccctggcaggcctgctgaggcttgtccagtccagtactatgaacgctgtgacaaagctgacaaagttggctgccctgggacctggttcctatggacttctgcgggctctgagcaggtcagcctgcatcttccaggcagtgatagcttctcccagggcagctgcaaaccaaaattcaaaaaggacaagttgggccgtcaagccccagacagccaggtatacctcatgctaaagcttatgatcttgtctgcggaaagaatatggttttctaggttagaattccaacccttccagcagggtattcctcacagcatgctaattgtcattattattcttgtcaatgtttttttggctaaggaaataacaaggaagcagattctgaaattggacacaggattggtaaaagtcctgtgcacattggcagaaagcttatcaggaagtgagaatgcccttcctattgccttctctgtgtccatgtgttctcattgttcagttcccacttacaagtgtaaggattgcagctcctcaccagcaatggaacaaagctggatggagaatgactttgacaagttgatagaagtacgcttcagaagaataaacagtgcagagaagaccttaaatgacctgatggagctgaaaaccatggcacaagaacttcgtgacacatgcacaagcttcaatagccgatttaatcaagtggaagaaaggatatcagtgattgaagatcaaattaatgaaataaagcaagaagacaagaaatacaaactaccatcagaatactataaacatctctatgcaaataaactagaaaatctagaagaaatggagaaattcctggacacatacactctcccaatactgaaccaggaagaagttgaacctctgaatagaccaatgacaggctctgaaattgaggcaataatttatagcctaccaacaaaaaatgtccagggccagatggattcacagtcaaatactaccagagtatggggcattctggccagggcaatcaggcaagagaaagaaataaaggatattcaattagaaaatgaggaagtcaaattgtccctgtttgcagatgacatgactgtatatttagaaaactccatcgtctcagcccaaaatctcctcaagctgagaataaaatacctaggaatccaacttacaacagatgtgaaggacctcttcaaggagaactacaaaccactgctcaacaaaataaaagaggacacaaacaaatggaagaatattccatgctcatggataagaggaatcaatatcatgaaaatggccatactgcccaaattaatttacagattcaatgccatccccatcaagctaccaatgactttcttcacagaattggaaaaagctactttaaagttcatatggaaccaaaaaagagcccacattgccaagacaatcctaagcaaaaagaacaaagctggaggcatcatgctacctgacttcaaactatactacaaggctacagcaaccaaagcagcatggtactggtaccaaaacagagatatagacaaaaaactcacacaaatttacaagaaaaaaacaaacaaccccatcaaaaagtgggcaaaggatatgaacagacacttgtcaaaagaagacatctatggagccaacagacacatgaaaaaatgctcatcatcactggtcatcagagaaaagcaaatcaaaaccacaatgagatag

SEQ ID NO: 118970 - DNA, 3252 bp, Homo sapiens
atggatacattcctcgacacatacactctcccaagactaaaccaggaagaagttgaatctctgaatagaccaataacaggagctgaaattgtggcaataatcaatagtttaccaaccaaaaagagtccaggaccagatggattcacagctgaattctaccagaggtacaaggaggaactggtaccattccttctgcaactattccaatcaatagaaaaagagggaatcctccctaactcattttatgaggccagcatcattctgataccaaagccgggcagagagacaaccaaaaaagagaattttagaccaatatccttgatgaacattgatgcaaaaatcgtcaataaaatactggcaaaacgaatccagcagcacatcaaaaagcttatccaccatgatcaagtgggcttcatccctgggatgcaaggctggttaaatacatgcaaatcaataaatgtaatccagcatataaacagagccaaagacaaaaaccacatgattatctcaatagatgcagaaaaagcctttgacaaaattcaacaacccttcatgctaaaaactctcaagaaattaggtactgatgggacgtatttcaaaatagtaagagctatctatgacaaacccacagccaatatcatactgaatgggcaaaaactggaagcattccctttgaaaactggcacaagacagggatgccctctctcaccattcctattcaacatagtgttggaagttctggccagggccatcaggcagaaggaaataaaaggtattcagttaggaaaagaggaagtcatattgtccctgtttgcagatgacatgattgtatatctagaaaaccccattgtctcagcccagaatctccttaagctgataagcaacttcagcaaagtctcaggatacaaaaccaatgtacaaaaatcacaagcattcttatataccaataacatacaaacagggagccaaatcatgagtgacctcccattcacaattgcttcaaagagaataaaatacctaggaatccaacttacaagggacatgaaggacctcttcaagaactacaaaccactgctcactgaaatgaaacaaagaaatggaagaacattccatgctcatggaattggaaaaaactactttaaagttcataggaaccgaaaaagagcccgcatcgccaagtcaatcctaagccaaaagaacaaagctggaggcatcacactacctgacttcaaactatactacaaggctacagtaaccaaaacagcatggtactgggaccaaaacagagatatagatcaatggaacagaacagagccctcagaaataacgccacatatctacaactatctgatctttgacaaacctgagaaaaacaagcaatggggaaaggaatccctatttaataaatggtgctgggaaaactggctagccatatgtagaaagctgaaactggatcccttccttacaccttatacaaaaattaattcaagatggattaaagacttaaaccttagacctaaaaccataaaaaccctagaagaaaacctaggcattaccattcaggacataggcatgggcaaggacttcatgtctaaaacaccaaaagcaatggcaacacaagccaaaattgacaaatgggagctaattaaactaaagagcttctgcacagcaaaagaaactatcatcagagtgaacaggcaacctacaaaatgggagaaaattttcacaacctactcatctgacaaaggtctaatatccagaatctacaatgaactcaaacaaatttacaagaaaaaaaaacaaccccatcaaaaagattttgcctaccattttacagtatttgtcttctattttggagcctttttattggaagcagcagccacatccctgcatgatttgcattgcaatacaaccataaccgggcagccactcctgagtgataaccagtataacataaacgtagcagcctcactatcacctacctttgcaggtctgggtgaattatctggtggtgtgacccacacactcattcttgaagggtctgaaaccaagacaacagtaactttttcagttatatccaggtggtcttcagattatgacatacaacaggagaattatgccagtcccagtacaaatctgtcaacgtcagatgtggccaatatgatgattcaggcctttcccaaaaatctccttaagctgataagcaacttcagcaaagtctcaggatacaaaatcaatgtgcaaaaatcacaagcattcctatacaccaataacagacaaacagagagccaaatcatgagtgaactcccattcacaattgcttcaaagagaataaaatacctaggaatccaacttacaagggatgtgaaggacctcttcaaggagaactacaaaccactgctcaatgaaataaaagaggatacaaacaaatggaagaacatttcatgctcctgggtaggaagaatcaatattgtgaaaatggccatactgcccaaggtaatttacagattcaataccatccccatcaagctaccaatgactttcttcacagaattggaaaaaactactttcaagttcatatggaaccaaaaaggagcccgcattgccaagtcaatcctaagccaaaagaataaagctggaggcatcacactacctgacttcaaactatactacaaggctacagtaaccaaaacagcaaagtactggcaccaagacagagatacagacgaatggaacagaacagagccctcagcaataatgccgcatatctacaactatctgatctttgacaaagctgacaaaaacgagaaatggggaaaggattccctgtttaataaatggtgctgggaaaactggctagccatatgtagaaagctgaaactggatcccttccttacaccttatacaaaaattaattcaagatggattaaagacttacatgttagacctaaaaccctagaagaaaacctaggcaataccattcaggacataggcatgggcaaggacttcatgtctaaaacaccaaaagcaatggcaacaaaagccaaaattgacaaatgggatctaattaaactaaagagcttctgcacagcaaaagaaactaccatcagagtgaacgggcaacctacagaatgggagaaaatttttgcaatctactcatctgacaaagggctaatatccagaatctacaatgaactcaaacaaatttacaagaaaaaaacaaccccatcaaaaagtgggcaaaggatatga

SEQ ID NO: 118971 - DNA, 1362 bp, Homo sapiens
atggataaattcctcgacacatacaccctcccaagactaaaccaggaagaagttgaatctctgaatagaccaataatcggctctgaaattgaggcaataatcaatagcttaccaaccaaaaaaagtccaggaccagatggattcacagccgaattctaccagaggtacaaggaggaactggtaccattccttctgaaactattccaatcaacagaaaaagaggaggccagcatcatcctgataccaaagcctggcagagacacaaccaaaaaagagaattttagaccaatatccttgatgaacatcaatgcaaaaatcctcaataacatactggcacaccgaatccagcagcacatcaaaaagcttatccaccatgatcaagtgggcttcatccctgggatgcaaggctggttcaacatgcacaagtcaataaatgtaatccagcatataaacagaaccaaagacaaaaaacacatgattatctcaatagatgcagaaaaggcctttgacaaaattcaacaacccttcatgctaaaaactctcaatacattaggtattgatgggacgtatctcaaaataataagagctatgtatgacaaacccacagccaatatcatactgaatgggcaaaaactggaagcattccctttgaaaatgggcacaagacagggatgccctctctcaccactcctattcaacatagtgttggaagttctggccagggcaatcaggcaggagaaggaaataaagggtattcagttaggaaaagaggaagtcaaattgtccctgtttgcagatgacatgattgtatatctagaaaaccccatcatctcagcccaaaatctcctcaagctgataagcaacttcagcaaagtctcaggatacaaaatcagtgtacaaaaatcacaagtattcttagacaccaataacagacaaacagagagccaaatcatgagtgaactctcattcacaattgcttcaaagagaagaaaatacctaggaatccaacttacaagggatgtgaaggacctcttcaaggagaactacaaaccactgctcagtgaaataaaagaggatacaaagaaatggaagaacattccatgctcatgggtaggaggaatcgatatcatgaaaatggccatactgcccaaggtaatttacagattcaatgccatccccatcaagctaccaatgactttcttcacggaattggaaaaaactactttaaagttcatgtggaaccaaaaaagagcctgcatcgccaagtcaatcctaagccaaaagaacaaagccggaggcatcacgctacctgacttcaaactatactacaaggctacagtaaccagaacagcatggtactga

SEQ ID NO: 118972 - DNA, 948 bp, Homo sapiens
atggataaattcctggacacatacaccctcccaagactaaaccaggaagaagctgaatccctgaatagatcaataacaggctctgaaattgaggcaataactaatggactaccaaccaaaaaaaagcccaggaccagacggattcacagccgaattctaccagaggtacaaagaggagctgtgttggaagttctggccagggcaatcaggcaggagaaagaaataaaggctattcaattaggaaaagaggaagtcaaattgtccctgtttgcagatgacatgattgtatatttagaaaaccccatcatctcagcccaaaatctccttaagctgataaggaacttcagcaaagtctcaggatacaaaatcaatgtgcaaaaatcacaagcattcctatacaccaatcacagacaaacagagagccaaatcatgagtgaactcccgttcacaattgcttcaaagagaataaaatacctaggaatccaacttacaagggatgtgaaggacctcttcaaggagaactacaaaccactgctcaacaaaataaaagaggacacaaacaaatggaggaacattccatgctcatggataggaagaatcaatatcgtgaaaatagccatactgcccaaggcaatttatagattcaatgccgtccccatcaagctaacaatgactttcttcacagaattggaaaaaactactttaaagttcatacggaaccaaaaaagagcccatatagccaagacaatcctaagcaaaaagaacaaagctgaaggcatcatgctacctgacttcataccatactacaaggctacagtaaccaaaacagcatggtactggtaccaaaacagagacatagaccaatggaacagaacagagccctcagaaataataccacacatctacaaccatctgatctttgacaaacctgagaaaaacaagaaatag

SEQ ID NO: 118973 - DNA, 984 bp, Homo sapiens
atgaaggcagaaataaagatgttctttgaaaccaacgagaacaaagacacaacataccagaatctctgggacacatgcaaagcagtgtgtagagggaaatttatagtactaaatgcctacaagagaaggcaggaaagatctaaaattgacaccctaacatcacaattgaaagaactacagaagcaagagcaaacactttcaaaagctaacagaaggcaagaaataactaagatcagagcagaactgaaggaaatagagacagaaaaatcccttcaaaaaatcaatgaatccaggagctggttttttaaaaagatcaacaaaattgatagactgctagcaagactaataaagaaaaaaagagagaagaatcaaatagacgcagtaaaaaatgataaaggggatatcaccactgatcccacagaaatacaaactaccatcagagaatactataaacacctctatgcaaataaactagaaaatctagaagaaatggataaattcctcgacacatacactctcccaagactaaaccaggaagaagttgaatctctgaatagaccaataacaggctctgaaattgaggcaataattaacagcttaccaaccaaaaaaagtccaggaccagatggattcacagccaaattctaccagaggtacaaggaggagctgaattggaaaaactacttaaagttcagatggaaccaaaaaagagcccacatcgccaagtcaatcctaagccaaaagaacaaagctggaggcatcacgctgcctgacttcaaactatactacaaggctacagtaaccaaaacagcatgcttcctgaaatatgaacacggtgggaagagcttgagcagccacaccagaacaggatgtaagctgtgcactgaggatggtggtgcagaaagctgggagtctggctccctgatgacaggttatagccatcattacagcccctactccccacctttggatctagagaaataa

SEQ ID NO: 118974 - DNA, 3750 bp, Homo sapiens
atggataaattcctggacacatacaccctcccaagactaaaccaggaagaagttgaatccctgaatagaccaataacaggctccgaaattgaggcaataattaatagcctatcaaccaaaaaaagtccaggaccagatggattcatagcccaattctaccagagaaccaaagataaaaaccacatgattatctcaatagatgcagaaaaggcctttgacaaaattcaacagcacttcatgctaaaaactctcaataaactaggtattgatgggacatacctcaaaataatcagagctgtttatgacaaacccacagccagtatcatactcaatgggcaaaaactggaagcattccctttgaaaactggcacaagacagggatgccctctctcaccactcctattcaacatagtgttggaagttctggccagggcaatcaggcaggagaaagaaataaagggcattcaattaggaaaagaggaagtcaaattgtccctgtttgcagatgacatgattgtatatttagaaaaccccatcgtctcagcccaaaatttccttaagctgataagcaaattcagcaaagtctcaggatataaaatcaatgtgcaaaaatctcaagcattcctacacgctaataacagacaaacagagagccaaatcatcagtgaactcccattcacaattgctacaaagagaataaaatacctaggaatccaacttacaagggatgtgaaggacctcttcaaggagaactacaaaccactgctcaatgaaataaaagaggacacaaataaatggaagaacattccatgttcatggagaggaaaaatcaatatcgtgaaaatggccatactgcccagggtaatttatagattcaatgccatacccatcaagctaccaattactttcttcagagaattggaaaaaactactttaaagttcatgtggaaccaaaaaagagcccacattgccaagacaatcctaagccaaaagaacaaacctggaggcatcatgctacctgacttcaaactatactacaaggctacagtgaccaaaacagcatggtacttgtaccaaaacaaatatatagaccaatggaatagaacagagccctcagaaataatactacacatctacaaccatctgatctttggcaaacctgacaaaaacaagaaatggggaaaggattccctatttaataaatggtgctgggaaaactggctagccatatgtagaaagctgaaactggatcccttccttataccttatacaaaaattaattcaagatggattaaagacttaaatgttagacctaaaaccataaaaatcctacaagaaaacctaggcaataccattcaggacataggcatgggcaaggacttcatgactaaaataccaaaagcaatggcaacaaaagccaaaattgacaaatgggatctaattaaactaaagagcttctgcacagcaaaggaaactaccatcagagtaaacaggcaacctacagaatgggagaaaatttttacaatctacccatctgacaaaggggcagaggagcctcaacctgcagccaccaccaccccaggccacagggagtactgccagacaactatcgatgttcccttaaggcccaacatctcttcaatcagcttgtgtgcctcttttagcaatatgaaattaaaaccaggaatctccctggcctctgagctgggtgatggcagctgtcctctaaggagcgtccctctgccttcagtctggctccccacactcacagccactgggctccctgcaaacaaagcaatcaatgatctccctttccccaaaaggaacaggattcatcactcggtgtttgatgtgaagtcccttcagctctccaagccccagtgtcctcgtgaatcaagcggagatcatcttaaagccctcaacagggacaagtgtgaaggaaccactggctcaccacctgcctctcccagtatgagcacagaaggtagtacaggccctggaggaccaccaggtagagccacatggctttgcagaggacagacccaggaaaggttggctgagcagtgggagctggcatattgtttgtaccaggcaacctccaagtcccagatcatgtctctgtggggtctggtctccaagatgcccccagaaaaagtgcagcggctctatgtcgactttccccaacacctgcggcatcttctgggtgactggctggagagccagccctgggagttcctggtcggctccgacgccttctgctgcaacttggctagtgccctactttcagacactgtccagcaccttcaggcctcggtgggagagcagggggaggggagcaccatcttgcaacacatcagcacccttgagagcatatatcagagggaccccctgaagctggtggccactttcagacaaatacttcaaggagagaaaaaagctgttatggaacagttccgccacttgccaatgcctttccactggaagcaggaagaactcaagtttaagacaggcttgcggaggctgcagcaccgagtaggggagatccaccttctccgagaagccctgcagaagggggctgaggctggccaagtgtctctgcacagcttgatagaaactcctgctaatgggactgggccaagtgaggccctggccatgctactgcaggagaccactggagagctagaggcagccaaagccctagtgctgaagaggatccagatttggaaacggcagcagcagctggcagggaatggcgcaccgtttgaggagagcctggccccactccaggagaggtgtgaaagcctggtggacatttattcccagctacagcaggaggtaggggcggctggtggggagcttgagcccaagacccgggcatcgctgactggccggctggatgaagtcctgagaaccctcgtcaccagttgcttcctggtggagaagcagcccccccaggtactgaagactcagaccaagttccaggctggagttcgattcctgttgggcttgaggttcctgggggccccagccaagcctccgctggtcagggccgacatggtgacagagaagcaggcgcgggagctgagtgtgcctcagggtcctggggctggagcagaaagcactggagaaatcatcaacaacactgtgcccttggagaacagcattcctgggaactgctgctctgccctgttcaagaacctgcttctcaagaagatcaagcggtgtgagcggaagggcactgagtctgtcacagaggagaagtgcgctgtgctcttctctgccagcttcacacttggccccggcaaactccccatccagctccaggccctgtctctgcccctggtggtcatcgtccatggcaaccaagacaacaatgccaaagccactatcctgtgggacaatgccttctctgagatggaccgcgtgccctttgtggtggctgagcgggtgccctgggagaagatgtgtgaaactctgaacctgaagttcatggctgaggtggggaccaaccgggggctgctcccagagcacttcctcttcctggcccagaagatcttcaatgacaacagcctcagtatggaggccttccagcaccgttctgtgtcctggtcgcagttcaacaaggtcattctcctgccctttggacctcccacccccaagctcttcatccctggggcactcagggcctgctcagcctccatgcagggaccttccactggattctccacagtgccccctcaggtcctttag

SEQ ID NO: 118975 - DNA, 1878 bp, Homo sapiens
atgggagactttaacacccctctgtcaacattagacagatcaatgagacagaaggttaacaaggatatccaggaatttaactcagctttacaccaagcagacttaatagacatctacagaactctccactccaaatcaacagaatgtacattcttctcagcaccacatcgcacttattccaaaattgaccacatagttgtaagtaaagcactccttagcaaaagtaaaagaaaagaaattataacaaactgtctctcagactacagtgcaatcaaactagaacttaggattaagaaactcacgcaaaaccactcaactacatggaaactgaagaacttgctcctgaatgactgctgggtaaataatgaaatgaaggcagaaataaagatgttttttgaaaccaatgagaacaaagacacaatacaccagaatctctgggacacatttaaagcagtgtgtagagggaaatttatagcactaaatgcccacaagagaaagcaggaaagatctaaaattgacaccctaacatcacaattaaaagaactagggaagcaagagcaaacacattcaaaagctagcagaaggcaaaaaataactaagatcagagcagaactgaaggagacagagacacaaaaaacccttcaaaaaatcaatgaatccaggagctggttttttgaaaagatcaacaaaattgatagaccactagcaagactaataaagaagaaaagagagaagaatcaaatagactcaataaaaaatgataaagaggatatcaccacccatcccacagaaatacaaactaccatcagagaatactataaacatctctacacaaataaactagaaaatctagaagaaatggataaattcctggacacatacaccctcccaagactaaaccaggaagaagttgaatctctgaatagaccaataacaggctctgaaattgaggcaataattaattgcttaccaaccaaaaaaagtccaggaccagacggactcacacccgaattctaccagaggtacaaggaggagctgggatgtgaaggacctcttcaaggagaactacaaaccactgctgaacaaaatgaaagaggacacaaacaaatggaagaacatgccacgctcatggataggaagaatcagtattgtgaaaatggctatactgcccaaggaaaaaacctgctcaactatccaattagcagccctgctggcagcccaggcaatggttctcagaagccaacagcaggaaatctggagagaagccactgtttatgtagcagaataaaggatgcaacttgtctgtttataactcatgaccttggcaggttttatacaaagtcttacttccttaaccaattgcaaataaaaaaaatctctaaatctacctcttgtgtccggaattggttccttccgtgggttcttggtctcgctgacttcaagaatgaagccgcggaccctcgtggaatgaagccgcagactttcgcagtgagtgttacagctcttaaacgtggcacacttctggcacgctttgctcctcccggtgggttgctggtctcgctgactgcaggagtgaagctgcagaccttcgcgtgtcagataccacaggctgtgggctcagtccccaagactgccccccttccttcagacaccaatcgcaagtctgggcctacagaacttccgaccaatcagcttcaagttgaagttcccatgaacccctctgtgggttcaattaatttgctggagtggctcacagaactctggggaacacttacgttgactggtgtattaaaaggatttaatgaagaggtgtataggaaattggcagttggggctgaaagtcccaaccctctaatcctgccttggtcattccagtga

SEQ ID NO: 118976 - DNA, 2241 bp, Homo sapiens; identical to SEQ ID NO: 117145

SEQ ID NO: 118977 - DNA, 3927 bp, Homo sapiens; identical to SEQ ID NO: 114395

SEQ ID NO: 118978 - DNA, 1071 bp, Homo sapiens
atggcagatttgatgactgattggaaggaagaaatacaaactaacatcagagaatactataaacacctctacacaaataaactagaaaatctagaagaaatggataaattcctggacacatacaccctcccaagactaaaccaggaagaagttgaatctgtgactagaccaataacaagttctgaaattgagggagtaattaatagcccaccaaccaaaaaaagctcaggaccagatggattcacagccgaattctaccagaggagctggttttttgaaaagataaacaaaattgatagaccactagcaagactaataaagaagaaaagagagaagaatcaaatagatgcaataaaaaatgataaaggggatatcaccactgatcccacagaaatacaaactaccatcagagaatactataaacacctctatgcaaataaactagaaaatctagaagaaatggataaattcctggagacatacaccctcccaagactaaaccaggaagaagttgaatctctgaatagaccaataacaggctctgaaattgaggcaataattaatagcttaccaaccaaaaaatgtccaggaccagatggattcacagccaaattctaccagagatacaaggaggagctggtaccattccttctgaaactattccaatcaacagaaaaagagggaatcctccctaactcattttatgaggccagcatcatcctgataccaacgcctggcagagacacaacaaaaaaagagaattttagaccaatatccctgatgaacattgatgcaaaaatcctcaataaaatactggcaaaccgaatccagcagcacatcgaaaagcttatccaccatgatcaagtgggcttcatccctgggatgcaagacgttgtatgttatcacctaaggtctaacccggaagacagtaaggacactgacagcagtggaaaatcaatggtggatgaggctgtgctgtcccgtgagaagagcaaacgaagagccctgatggggccctgccagttggcaactgtggccctgaacactttcggtgctgttgcatatttttga

SEQ ID NO: 118979 - DNA, 389 bp, Homo sapiens
gcaacaagttaacaggagtgatgcacctctgatgtcaggcccccaatcacgtgtcttgcaggaaagcgtctctagcagctgatatccccagacttggatatagttcctcatcccatcacaagtacatcccccggagggcagtgctttatgtacctggaaatgatgaaaagaaaataaagaagattccatccctgaatgtagattgtgcagtgctcgactgtgaggatggagtggctgcaaacaaaaagataagagtcaatcctacaccagctcacgtggggaggagaggaggctctcgcggctgtcctggggatgaccgtcccggggatgaccgtccccaggatgaccgagagatgcctgcgctgtgcttgagcattgcctgggtttga

SEQ ID NO: 118980 - DNA, 3969 bp, Homo sapiens
atggccacagagtgctggaatgtggctggtctgaactgcaatgtgctggaaaggcatgaagggtggggcctgaaaccttatccaatcaggggccgtggactagaaactggccaatcaggcgtgcagctggagagaccaggacgcttccgtattcgcagatttatggctgaaagaccgggatcccctggaagccgagaaatggtgagtgctgggtctgtcatcgtgagaggggcgggagacggttggaaccggctgaaagtggcttgtagcaggacccaaacttcctcgcagtcagctctggagtctgaggacccaaatcctccttgtcccagctcggcttttagtcccctcgaaccggctggtgaattaccagatctcctcaagtgcagcaaccagatccagttggaagtgcatcttttggaggcagaaaacaaagccatggccactggggcctttactcagggccagctgaaggtgcggctgactgcacagacgtcactggggcctttgtctgacttctacacactccctgtggggatccgcactgtggctgtcactgagagccagttcttcatcaacgggaaacctttttatttccacagcatcaacaagcacgaggatgcggacctgcgtttgtgctcctgggtcctcgttggggctgcttctggtcaccttccacttttgccttccatcctagggaagggcttcaactggctgctgctggtgaaggacttcaacctgcttcactggcttggtgccaacgccttctgcaccagccactacccctacgcgggggaagtgctgcagatgtgtgaccgctatgggattgtggtcattgatgagtgtcccgctgtgggcctggtgctggcagcttttcaacaatgtgtctgtgcatcaacacatgtgggtgatggaggaactggtgtgcagggacaagaaccaccccgccgtggtgatgtggtctgtggccaacaagcctgcatcctacctggaacctgccggctactacttcaggatcacagcctcttgccagcaacagaacaaagctggatggagaatgactttgacgagttgacagaagtaggcttcagaagatcagtaataacaaacttctccgagctaaaggaggatgttcgaacccattgcaaggaagctaaaaaccttgaaaaaagattagatgaatggctaactagaataaacagtgtagagaagaccttaaataaccggatggagctgaaaaccatggcactagaactatgtgacgcatgcacaagcttcagtagccgattcaatcaagtgaaagaaaggtaccacatcacacttattccaaaaattcaccacatagttggaagtaaagcactcctcagcaaatgtaaaagaacagaaatcacaacaaactgtctctcagaccacattgcaatcaaattagaactcaggattaagaaactcactcaaaaccgctcaactacatggaaactgaacaacctgctcctgaatgactactgggtacataacgaaatgaaggcagaaataaagatgttctttgaaaccaatgagaacaaagacacaacataccagaatctctgggacacatttaaagcagtgtgtagagggaaatttatactactaaatgcccacaagagaaagcaggaaatatctaaaatcaacaccctaatatcacaattaaaggaactagagaagcaagagaagacaaattcaaaagctagcagaaggcaagaaacagctaagatcaaagcagaactgaaggagatagagacacaaaaaacccttcaaaaaatcaatgaatccaggagctggctttttgaacagatcaccaaaattgatagaccactagcaagactaataaagaataaaagagagaagaatcaaatagacacaataaaaaatgataaaggggataccaccaccgatcccacagaaatacaaactaccatcagagaatactataaacacctctacacaaataaactagaaaatctagaagaaatggataaattcctggacacatacaccctcccaagactaaaacaagaagaagttgaatccctgaatagaccaataacaggctctgaaattgaggcaataattaatagcctaccaaccaaaaaaagtccaggaccagatggattcacagccgaattctaccagaggtataaagaggagctgataccattacttcttaaactattccaatcaatagaaaaagagggaatcctccctaactcattttatgaggccaacatcatcctgataccaaagcctggcagagacacaacaaaaaaagagaattttagaccaatatccctgatgaacatcgatgcgaaaatcctcaataaaatactggcaaaccgaatccagcagcacatcaaaaagcttatccaccacgatcaagtcagcttcatctctgggatgcaaggctggttcaacatacacaaatcaataaacctgataagcaacttcagcaaagtctcaagatacaaaaccaatgtgcaaaaatcacaagcattcctatacaccaataacagacaaacagagagccaaatcatgagtgaacttccattcacaattgctacaaacagaataaaatacctaggaatccaacttacaagggatgtgaaggacctctttaaggagaacttcaaaccactgctcaatgaaataaaagaggacacaaacaaatggaagaacattccatgctcatggataggaagaatgaatattgtgaaaatggccatactgcccaaggtaatttatagattcaatgccatccccatcaagctaccaatgactttcttcgcagaactggaaaaaactactttaaagttcatatggaaccaaaaaagagcccacattgccaagacaatactaagccaaaagaacaaagctggaggcatcacactacctgacttcaaactatactacaaggctacagtaaccaaaacagcatggtactggtaccaaaacagagatatagaccaatggaacagaacagagccctcagaaataacaccacatatctacaaccatctgatctttgacaaacctgacaaaaacaagaaatggggaaaggattccctattcaataaatggtgctgggaaaactggctagccatatgtagaaagctgaaactggattccttccttataccttatacaaaaattaattcaagattgattaaagactcaaatgttagatctaaaaccataaaaaccctagaagaaaacctaggcaataccatacaggacataggcatgggcaaggacttcatgactaaaacactaaaagcaatagcaacaaaagccaaaatggacaaatgggacctaattaaactaaagagcttctgcacagcaaaggaaactaccatcagagtgaacagacaacctacagaatgggagaaaatttttgcaatctacccatctgacaaagggctaatatctggaatctacaaagaacttaaacaaatttgcaagaaaaaatcaaacaaccccatcaaaaactgggcaaaggatatgaacagacacttctcaaaagaagatatttatgcagccaacagacatgtgaaaaaatgctcatcatcactggtcatcagagaaatgcaaatcaaaaccacaatgagataccatctcacaccagttagaatggtaatcattaatacatcaggaaacaacagctgctggagaggatgtggagaaataggaacacttttacactgttggtgggactgtaaactagttcaaccattgtggaagacagtgtggcgattcctcaaggatctagaactagaaataccatttgatccagtgatcccattactgggtatatacccaaaggattataaatcatgctactataaagacacatgcacatgtatgtgtattgcagcactactcaacaatagtaaagacttggaaccaacccaaatgtccataaagaatagactggattaa

SEQ ID NO: 118981 - DNA, 1475 bp, Homo sapiens
atggcagtgagcaccacagtgagagtggacatgccctgctgtgcagtgatgctatactgctggggaaggtcagggaaggaacaacagccagatgaggccctcaagggaaaaggatttacagtgtgctttgaaggtctaagatttggacaaaagccggggtcttatttcagtctggaccagattggccatgtggagatacaaatgataacacccccctggagggggaccacactctcaacaaagcgggggggaagaaaaagagggaaaacagagagcgaccgcgaacacaatttggccccccccaaggggcgggacaccccaaaaaaagagggcgcccatgtgcgggggggccctctctcgggaacccccccgacggaaaaaaaagggaaagcgcggtcacctcgctatggcgacacccacaggggagaggggctaaataaaactcaccgcgccccccaaaatttttcggagagcccggagccaacgatcaacaaaattgatagaccactagcaagactaataaagaaaaaaagagagaagaatcaaatagacacaataaaaaatgataaaggggatatcaccaccaatcccacagaaatacaaactaccatcagagaatactacaaacacctctatgcaaataaactagaaaatctagaagaaacggataaattcctggacacatacactctcccaagactaaaccaggaagaagttgaatccctgaatagaccaataacaggctctgaaattgaggcaataattaatagcctaccataccaaaaaaagttccaggaacagacggattcactgccaaattctaccagaggtataaggaggagctggtaccattccttctgaaactattccaatcaatagaaaaagagggaatcctccctaactcattttatgaggccagcatcatcctgataccaaagcctggcagagacacacaaaaaaaagagaattttagaccaatatccctgatgaacatcgatgcaaaaatcgtcagtaaaatactggcaaaccgaatccaggtgcacatcaaaaagcttatccaccatgatcaagtgggcttcattcctgggatgcaaggctgtgttggaagttctgccagggcaatcgggcaggagaaagaaataaagggtattcaattaggaaaagaggaagccaaattgtccctgtttgcagatgacacgattgaatgtttagaaaaccccatagtctcagcccaaaatctctttaagctgataagcaacttcagcaaagtctcaggatacaaaatccatgtaccaaaatcagtatcatttttatacaccaataacatccaagctgagagccaaatcaagaatgcaatcccattcacaattgcttcaaagagaataaaatacctaggaatacagctaaccctggaggtgaaagagctctacaacaagaattacaaaacactgctgaaagaaatcagagatgaataa

SEQ ID NO: 118982 - DNA, 1005 bp, Homo sapiens
tttcgtgtcgggaagatggcgctacgtctgctgcggagggcggcgcgcggagctgcggcggcggcgctgctgaggctgaaagcgtctctagcagctgatatccccagacttggatatagttcctcatcccatcacaagtacatcccccggagggcagtgctttatgtacctggaaatgatgaaaagaaaataaagaagattccatttctgaatgtagattgtgcagtgctcgactgtgaggatggagtggctgcaaacaaaaagaatgaagctcgactgagaattgtaaaaactcttgaagacattgatctgggccctactgaaaaatgtgtgagagtcaactcagtttccagtggtctggactgaagaagacctagagacccttttgtcaatcccgggtccttccttccagccttgatgctaccaaaggtggaaagtcctgaagaaatccagtggaccgctagcaagactaataagaaaagagagaagaatcaaatagacgcaataaaaaatgataaaggggatatcaccaccgatcccacagaaatacaaactaccatcagagaatactataaacatctttacataaataaactagaaaatctagaagaaacggataaattcctggacacatacaccctcccaagactaaaccaggaagaagttgaatccctcaatagaccaataacaggctctgaaattgaggcaataattaatagcttacaaaccaaaaaaagtccaggaccagacggattcacagccaaactctaccagaggtacaaggaggagctggtaatttatagattcaatgccatccccatcaagctaccaatgactttcttcacagaattggaaaaaactactttaaagttcatatggaaccaaaaaagaatccgcatcgccaagtcaatcctaagccaaaagaacaaagctggaggtatcacgctacctgacttcaaactatactacaaggctacagtaaccaaaacagcatggtactggtag

SEQ ID NO: 118983 - DNA, 2505 bp, Homo sapiens
atgttctttgaaaccaatgagaacaaagacacaacataccagaatctctgggacacattcaaagcagtgtgtagagggaaatttatagcactaaatacccacaagagaaagcaggaaagatccaaaattgacaccctaacatcacaattaaaagaaccagagaagcaagagcaaacacattcaaaagctagcagaaggcaagaaataactaagatcagagcagaactgaaggagatagagacacaaaaaacccttcaaaaaatccttcaaaaaatcaatgaatccaggagctggttttttgaagagatcaacaaaattgatagactgctagcaagactaataaagaagaaaagagagaagaatcaaatagatgcaataaaaaatgataaaggggatatcaccactgatcgcacagaaatacaaactaccatcagagaatactataaacacctctacgcaaataaactagaaaatctagaagaaatggataaattcctggacacatacaacctcccaagactaaaccaggaagaagttgaatcccttcagtagactaataacaggctctgaaattgaggcaataattaatagcttaccaaccaaaaaaagtccaggaccagacggattcacagccaaattctaccagaggtacaaagaggagctggtaccattccttctgaaactattccaatcaatagaaaaagagggaatcctccctaactcattttatgaggccaacatcatcttgataccaaagcctggcacagacacaacaaaaaaagagaattttagaccaatatccctgatgaacatcgatgtaaaaattctcaataaaatactggcaaacagaatccagcagcaaatcaaaaagcttatccaccacgatcaagtgggcttcatcccagggatgcaaggctggttcaacatacacaaatcaataaatgtaatccagcatataaacagaaccaaagacaaaaaccacatgattatctcaatagatgcagaaaaggcctttgacaaaattcaacagcccttcatgctaaaatctctcaataaattagtgttggaagttctggccagggcaatcaggcaggaaaaagaaatgaagggtattcagttaggaaaagaggaagtcaaactgtccctgtttgcagatgatatgattgtatatttagaaaaccccatcatctcagcccaagatctccttaagctgataagcaacttcagcaaagtctcaggatacgaaattaatgtgcaaaaatcacaagcatccttatacaccaataacagacaaacagagagccaaatcatgagtgaactcccattcacaattgcttcaaagagaataaaatacctaggaatccaacttacaagagatgtgaaggacctcttcaaggagaactacaaaccactgctcaacgaaataaaagaggacacaaacaaatggaagaacattccatgctcatgggtaggaagaatcaatattgtgaaaatggccatactgcccaaggtaatttatagattcaatgccatcctcatcaagttaccaatgactttcttcacagaattggaaaaaaactactttaaagttcataaggaaccaaaaaagagcctgcattgccaagtcaatcctaagcaaaaaggaagaaagctggaggcatcatgctacctgaattcaaactatagtacaaggctacagtaaccaaaacagtatggtactggtgccaaaacagatatatagaccaatggaacagaacagagccctcagaaataataccacacatctacaaccatctgatctttgacaaacctgacaaaaacaagaaatggggaaaggattccctatttaataaatggtgctgggaacactggctagccatatgtagaaagctgaaactagatcccttccttacaccttatacaaaaattaattcaagatggattaaagacttaaatgttagacctaaaaccataaaaactctagcaggacacctaggcaataccattcgggacataggcttgggcaaggacttcatgactaaaacaccaaaagcaatggcaacaaaagccaaaatagacaaatgggatctaattaaactaaagagcttctgcacagcaaaagaaacggccatcagagtgaataggcaacctacagaatgggagaaaatttttacaatctacccatctgacacagggctaatacccagaatctacaaagaacttaaacaaatttacaacaaaaaaataaacaaccccatcaacaagtgggcgatggatatgaacagacacttctcaaaagaagacatttatgcagccaacagacacatgaaaatattgtcatcatcagtggccatcagagaaatgcaaatcaaaaccacaatgagataccatctcacaccaattagaatgacaatcattaaaacgtcaggaaacaacagttgctggagaggatgtggagaaacaggaacactgttacactgttggtgggactgtaaacttgtttaa

SEQ ID NO: 118984 - DNA, 4189 bp, Homo sapiens
atgggagattttaacaccccactgtcaacattagacagatcaatgagacagaaagttaacaaggatagccaggaattgaactcagctctgcaccaagcggacctaacagacatctgcagaactctccaccccaaatcaacagaatatacattcttcgcagcaccacatcacacttattctaaaattgaccacatagttggaagtaaagcactcttcagcaaatgtaaaagaacagaaattataacaaactgtctctcagaccacagtgcaatcaaactagaactcaggattaagaaactcactcaaaaccgctcaactacatggaaactgaacaacctgctcctgaatgactactgggtacataatgaaatgaaggcagaaataaagatgttctttgaaaccaatgagaacaaagacacaacataccagaatctctgggacacatttaaagcagtgtatagagggaaatttatagcatttaaagcagtgtgtagagggaaatttatagcactaaatgcccaaaacagaaagcaggaaagatctaaaattgacaccctaacatcacaattaaaagaactagagaagcaagagcaaacacattcaaaagctagcagaaggcaagaaataactaagatcagagcagaactgaaggagatagagacacaaaaaacccttcaaaaaaatcagtgaatccaggagctggttttttgaaaagaccaacaaaattgatagaccgctagcaagactaataaagaagaaaagagagaagaatcaaatggacgcaataaaaaacgataaattgggatatcaccactgatcccacagaaatacaaactaccatcagagaatactataaacacctctatgcaaataaactagaaaatctagaagaaatggataaattcctggacacatacaccctcccaagactaaaccaggaagaagttgaatctctgaatagaccaataacaggctctgaaattgaggcaataactaatagcctaacaaaccaaaaaaagtccaggaccagacggattcacagccaaattctaccagaggtacaaggaggagctggtaccattccttctgaaactattccaatcaatagaaaaagaggggatcctccccaccgcattttatgaggccagcatcatcctgataccaaagcctggcagagacacaacaaaaagagagaattttaaaccaatatccctgatgaacatcgatgcaaaaatcctcaataaaatactggcaaaccaaatccagcagcacatccaaaagcttatacaccatgatcaagtgagcttcatccctgggatgcaaggctggttcaacatatgcaaatcaataaacataatccagcatataaaaagaacggatgacaaaaaccatatgatcatctcaatagatgcagaaaaggcctttgacaaaattcaacagcccttcatactaaaaactctcaataaattaggtattgatgggaagtatctcaaaataatgagagctatctatgacaaacccacagccaatatcatactgaatgagcaaaaactggaagcattccctttgaaaactgccacaagacagggatgccctctctcaccactcctattcaacatagtgttggaagttcttgccagggtaatcaggcaggagaaagaaataaagggtattcaattaggaaaagaggaagtcaaattgtccctgtttgtagatgacatgattgtatatctagaaaaccccatcgtctcagcccaaaaatctccttaagctgataagcaactttggtaaactctcaggatacaaaatcaatgtacaaaaatcacaagcagtcttatacaccaataacagacaaacagagagccaaatcatgagtgaactcccattcacaattgcttcaaagagaataaaatacctaggaatccaacttacaagggacgtgaaggacatcttcaaggagagctacaaaccactgctcaaacgaaattaaaagagtatacaaagaaatggaagaacattttcattccatgcttatgggtaggaagaaatcaatatcatgaaaatggccatactgcccaagggtatttaatagattcaatgccatcccccatcaagctacccaatgactttccttccacagaattgggaaaaaactactttaaagttcactactggaaccaaaaaagagcccgcatcgcccaagtcaatccctaagcccaaaagaacaaagttggaggcatcacgctacctgacttcaaacttatacttacaaggcttacagttaaccaaaacagcatggtatggtacttggttaccaaaacagagatatagatcaatggaacagaacagatccctcagaaataatgccacattatctacaactatctgatctttgacaaacctgagaaaaacaggcaatggggagaggattccctatttaataaatgggtgctgggaaaactgggctagccatatgtagaaagctgaaactggatcccttccttacactttatgcaaaaattaactgaagatggattaaagacttaaacgttagacctaaaaccataaaagccctagaagaaaacctaggcattaccattcaggacataggcatgggcaaggacttcatgtctaaaacatcaaaagcaatggcaacaaaagccaaaattgacaaatgggatctaattaaactaaagagcttctgcacagcaaaacaagctaccatcagagtgaacaggcaacctacaaaatgggagaaaattttcgcaacctactcatctgacaaagggctaatatccagaatctacaatgaactcaaacaaatttacaaaaaaaaaaaaaaaacaagcccaccaaaaagtgggtgaaggacgtgaacagacacttctcaaaagaagacatttatgcagccaaaaatcacatgaaaaaatgctcaccatcactggccatcggggaaatgcaaatcaaaaccacaatcaccaaaattgacagaccgctagcaagactaataaagaagaaactagagaagaatcaaatagacgcaataaataatgacaaaggggatattaccactgatcccacagaaatacaaactaccatcagagaatattataaacacctctacacaaataaaccagaaaatctagaagaaatggataaattcctcgacacatacaccctcccaagactaaaccaggaagaagttgaatctctgaatagaccaataaaaggctctgaaattgaggcaataattaatagcttactaaccaaaaaaagtccagggccagatggattcacagccaaattctaccagaggtacaaggaggagctggtaccattccttctgaaactattccaatcaatagaaaaagagggaatcctccctaactcattttatgaggccagcatcatcctgatactaaagcctggcagagacacaaccaaaaaagagaattttagaccaatatccttgatgaacattgatgcaaaaagcctcaataaatactggccaaccgaatctagcaactcatcaaaagcttatccacatgatcaagtgggcttcatccctgggatgcagacggtatacgagccgggaagcttcacgccgctcatccgggtcgagacagagaacggcgagcgggaaaaagcgcagcggcgcagcctggcagagacgctccagcaggaagggagtgagaacggccacggcgtggtgttcccggctgaactggtgcggctgctggacaggctggaggaagaaatccgggcagaccgcgtgagcagtgaaagccgggcgtggcttgcgcagtgcgggctgacggtggagcaactggccagacaggtggagccggaatacacaccggcgcgaaaagctcatctttatcactgcgaccaccggggactgccgctggcgcttatcagcgaagacggcaatacggcgtggagcgcggaatatgatgaatggggcaaccagcttaatgaggagaacccgcatcatgtgtatcagccgtaccgtctgccagggcagcagcatgatgaggaatcagggctgtactataaccgtcaccggtactacgatccgttgcagggtcggtatattactcaggacccgatggggttgaaagggggatggaatttatatcagtatcctttaaatccactacaacaaattgaccctatagggatcctgtag

SEQ ID NO: 118985 - DNA, 2077 bp, Homo sapiens
atgtcatccaggggcccttgcacactggagacactcatcaatcccagccctagtgtagctgatgacatcccccatttgagaccaaagcctgtgtacattactaccactcgagacaatgagaacatttacagtacaaagattccatatatggcagctcgtgttgtttttattaagtggattgtaaccttctttttggaaaaaaagtatctaactgcaacacaaaacactaaaaatggagttgatgtattgcctaaaatcatccagactgttggtggtggtgctgtgcaggagagagcgcctgagctggatggtggtgggcccacggagcaggacaaaagccattctaacagcagcaccttgtcggaccgaagactcagcaactccagcctctgtagcattgaagaagagcaccgaatggtgtatgaaatggtacagcggattctcttgtcaacacgaggttatgtcaacttcgtgaatgaagtatttcaccaggcatttttgttgccttcctgtgagatagctgtaacaagaaaagtagttcaagtgtacagaaagtggattctccaggacaaacctgtgttcatggaggagccagatagaaaagatgttgcccaagaagatgctgaaaaattaggattttccgagactgatagcaaggaggcctcatctgaaagttctggtcataaacgatcttccagttgggggacgcacatactccttcacaagtgcaatgagcagagggtgtgtgacagaggagggaaaatacaaatgttgaaagccggcgtccaggctttgttgcagcctgtcctttgtgtgttccctctcattccactgccacccttgtgcaatcaagctgcccgcccagctgtggtcagcatccccctaggtgatcttctgccttggttatcagtccttggaggccctgcagaccagtggcacctttcctacctgaaaccagaagggtcctctgcctatgcctgtattctggaggcccttgaatcagcaggaaaggggctttggaaagtgtctgcagttggtaggaaaccatggacacgaggcaggtctgatcggaaaggaactgtaggccaccaagtccaattcttgttcttcaaagatgagggaagggtggactcaagaatcttgacgctcatggtagcttggatccgaccaaaccctctgtgtgtacatttctcgagagctctgggatgactttcttggtgtgctgtccctccctcacggaatgggaggaacttataaacgagtgggccaacattatggactccttgacagcagtgcttgcaagaaccgtttatggagttgagatgacaaacctacctctggataaattaagtgaacaaaaggaaaagaagcaacgaggcaaaggctgtgttctagatcctcagaaaggaaccaccgtggggaggtccttttctctcagctggcggagccacccagatgtgaccgaaccgatgcgatttaggagtgccaccacgtctggagcaccgggagtggaaaaggcaagaaatattgttcgccaaaaagcaactgctaagcgaagccagtctatcagcaactgtgtccacctttctgaggctttgcctgccactaaaagcgtcccgctcctccttcacaccctttataaaaacaaagccttaaaagctgcattaggccagcctgttgggaaggcagaccagctggtggtggcaggctctccgtccgtctgctgtgttgaggaccagtggggacgctctaatttggaagcaatggtgctgtggctatattgcatcccaccagatggcgatgttctttatctttaggaagatgctgccagtgttggctcagctcttatttgctcctgctcatagcccagaaaccaacatctatctgtttttggcatcaggcttcagagactaactcttcccactatccataaaaaatggcatttgccaattatagtttagaaagttaggaagctcttgggctcccccttctgacactggattaaccagtagattcattaacaaatataaactgttcccagaaggtttcaacatcttgcataattagaataaacaat

SEQ ID NO: 118986 - DNA, 300 bp, Homo sapiens
  misc_feature (1)...(300): n = a,t,c or g
ggaacactaccacctggagacacaacaatgattccattaaactggaagttaagattgccacctggacattttgggcttctcctacctttaagtcaatggctaagaagggagttacagtgtcggctggggtgattgacccagactatcaaaatgaaatcagtttactactccacaatggagttactgangaacatgcatggaatacaggagatgcattagggcatttnttgctattaccatgccctgtgattaaggtcaatgggacccttcaggaatgaagntttgggtcactccaccagg

SEQ ID NO: 118987 - DNA, 327 bp, Homo sapiens
aagttaagattgccacctggacactttggactcctcttacttttaagtcaacaggctaagaagggagttacagtgttggctggggtgattgacccggactatcacaatgaaatcagtctactactccacaatggaggaaaaaaaaaaacacgacctgctgagatgcttgctgaaggcaaagggaatacagaatgggtaggagaagaagttagtcatcaataccagctatgaccacatgaccagctgcagaaacgaggactgtaattgtcatgagtatttcctccttctgttcttaaagacatgtttgtgcatgtgtacacttctact

SEQ ID NO: 118988 - DNA, 385 bp, Homo sapiens
ccactttatggctaaagaagtgtgacagtgggctcatgctcatggaatttactggtcttaccatgatccctatcatcctgaagcagcttttgaatggccttttgaagtcacgattacaatgccaactaggtgacaatactttgcaggcctggggcaaagttctccagaaggctgtgtatgctctgaatcagtgtccaatatatggtactgtttctcccatagacaggattcacgggtccaggaatcaaagggtggaagtggaagtggaagtggcaccactcaccatcacccatagtgttccactagcaaaatttttgcttcctgttcccatggcattatgttctgctggcttagaggtcttagttccagagggaggaacactgcc

SEQ ID NO: 118989 - DNA, 2349 bp, Homo sapiens
atgtatgctctgaatcagcatccaatatatggtactgtttcttccatagccaagattcatgggtccaggaatcaaggggtggaagttgaagtggcaccactcaccaacacccctagtgatctactggcaaaatttttgcttcctgttcctgcgacattacattctgctggcctagaggtcttagttccagagggaggaacgctgcctccaggagacacaacaaagatctcattaaactggaagttaagattgccacctggacactttgggctcctcctacatttaagtcaacaggctaagaagggagttacagtgttggctgggatgactgacccagactatcaagatgaaatcattctactacttcacaatggaggtaaggaagaatatgcatggaatagcagagattcattacggcttctcttagtattaccaagccctgtaagtaaggttaatgggaaactacgacagcccaatccaaacaggactacaaatggcccagatccttcaggaatgaagcctgcagacggcctattacgggaccttgtgatcatattggcccaagagagagaagcagcaaaagctaagaaagaagaatcaacaacaggtaacgccaacttgttagaaaagacaggaggagtggatttccatatgaaagctgtgccagggacagaagtgccagggcataagcttgtaaccctggtgtcagtcagtaaggggaacagtagcagcctgacttgggaattagaaggagggaatgaccctatgagtaagaaacggcgaggagagttctctgactttcatggccctcccaagaagataataaaagtgcagaaggatgagagttccactgggtctctggccatgagtacaaggcccaggagggtaatagagagaccacccttaacacagcaacaggctgcacaaaaaagaacttgtgattccattactccttctaaatcatctcctgtacctgtttctgatactcagaaacttaaaaatctaccttttaagacttctggcttggaaactgccaagaagagaaacagcatttctgatgatgatactgattctgaagatgaattgagaatgatgattgcgaaagaggaaaacttacagagaactacacaaccctcaataaatgaatctgaaagtgatccttttgaagttgtaagggatgatttcaaatcaggcgttcacaaactgcattctttaataggtttaggtatcaaaaatcgtgtctcttgccatgatagtgatgatgatattatgagaaatgatcgtgagtatgactcaggagatacagatgaaattattgcgatgaaaaaaaatgttgctaaggtcaaaaacagtacagaattttcacaaatggaaaaatctacgaagaaaacttctttcaaaaatagagaaaactgtgagctttctgatcactgtattaaactacaaaaaagaaaaagcaatgtagagttcaaggagaggcagtgtttgaagggtcccaatgaagatactaagagggagggcccagaacccccccccccatgcaagtttgacagaggctccaagagccccaagactcccactggcctccgcagaggccgacagtgtattcgtcctgcggagattgtggcttccctgttagaaggagaggagaacacctgtggcaaacagaaaccaaaggaaaacaatttaaagccaaaatttcaggctttcaagggagtaggctgtctatatgaaaaggagtcaatgaaaaaatccttgaaagacagtgttgcctctaacaataaagatcagaattccatgaaacatgaggatcccagtatcatatccatggaagatgggtccccatatgttaatggctcattaggtgaagtgactccatgccaacatgcaaagaaggcgaatggcccaaactatattcagcctcaaaaaagacagaccacttttgaaagccaggatcgcaaggcagtgtcccctagcagttctgaaaagagaagtaagaatcctatttctaggccattagaaggtaagaagtccttaagtcttagtgcaaagactcacaacataggctttgacaaagacagctgccatagtaccacaaagacagaagcttcacaggaagagcggtctgattcaagcggcctcacatctctcaagaaatcaccaaaggtctcatccaaggacactcgggaaatcaaaactgatttctcactttctattagtaattcgtcagatgtgagtgctaaagataagcatgctgaagacaatgagaagcgtttggcagccttggaagcgaggcaaaaagcaaaagaagtgcagaagaagctggtgcataatgctctggcaaatttg

SEQ ID NO: 118990 - DNA, 561 bp, Homo sapiens
ctaccctgtgtgaatgtgaggatgtagacatccatcagtgcaactcgagctccatcctcctccgatttctaaggttccagttttcttaatttgggtgggcacaatataatcagctgccagtgcagagtgagtccagtgggttaccggactcatgctgtggtcatttccccagtgccagaatgcagatttggcatagacatacttagcagctggcagaacccccacattggatccctggaaccaggaaagatgcacaatgcctagtgggtctatttggattttggagacaacacattcctcatttgggtgggttactgtggcccatttatcgagtgacccaaaaggctgccagttttgagtggggtccagaataggagaaggctctgcaacagatccagccttctgtgcaagctgctctgccacttggaccataagacctagcagatccaatggtgcttgaggtgtcaatggctgataggtgtgctggttggagcctttggcaggcccccataggtgaattacagcagaagcctctaggattttggagcaaggccctgccat

SEQ ID NO: 118991 - DNA, 1716 bp, Homo sapiens
atgagtacaacacaattagatacaatgggagcagaaagcttgtgcaacatggagacagtacaggtggaagatgaagggatccaaaagcttaaggagattcggatggtggagtggattactccctttagacctactcatcccagctgtgagggtccagaagatatacccttgactaatgccttgcaaaatacatttgtgagggcagcacctgcatctttgaagagccctgtggttgctcttctcttgagtccagtgggttaccggactcatgctgtggtcatttccccagtgccagaatgcagatttggcatagacatacttagcagctggcagaacccccacattggatccctggctggtagggctcaccagaagcaatttgtcggcagctggcaaggccagcaatatgcctttactgtcctacctcaggggcatatcaactctctggctttgtgtcataatcttatttggagggaccttgatcactttttgctttcgcaaggtatcacactggtccattacactgatgacattatgctgattggatccaacctagcagatccaatggtgcttgaggtgtcaatggctgataggtgtgctggttggagcctttggcaggcccccataggtgaattacagcagaagcctctaggattttggagcaaggccctgccatcttctgcagataactattctccttttgagagacagttctttgcctgttactgggctttggtggaaactgaatgtttgcctacgggtcatcaactcaccatgcaacctgaactgcctatcatgaactgggtgctttcagacccatctagccataaatgggtccatggacaaagtggccatggtggcagagatagcggttactcatggactcagcaacatggacttccactcaccaagggtgacctatctatgaccactgctgagtgccaaattttccagcagcagagaccaatactgagccctcgatatggcaccattccttggggtgatcagccagctacttggcggcagaaatggcagaggtttgtcctcactggaatagacacttattccagatatgagtttgcctatcccgcatgccatgcttctaccaagactaccatccatggactcatggaattcctcatccaccatcatggtattccacacagcattgcctctgaccaaggcactcaccttatggctaaagaagtgcggcagtgggctcatgctcatggaattcactggtcttaccatgttccccatcatcctgaagtagctggattgatagaacggtggaatgaatggccttttgaagtcacaattacaacaccaactagtcaacaggctaagaagggagttacagtgttggctggggtgattgacccggactatcacaatgaaatcagtctactactccacaatggagaatccaagttcttcagttttggactggctctccttgctcctcagcctgcagatggcctattgcgggaccttgtgatcaggtgtttaaatcatgtgtccagcagccctattaatgaggaagtaggagagaagaactctttggttaccactagcagtttttgtcataagacagcaacaagctataaagaaagcaaattgagatatttgttaaaaactggaaccttagaaatcggaggaggatggagctcgagttgcactgatggatgtctacatcctcacattcacacagggtag

SEQ ID NO: 118992 - DNA, 324 bp, Homo sapiens
attaattgcctaaggaattgcaaaacctatcaagccagaaacctttgtggttttataacacttccctcaagtttttccttaataagccgagcttgccgatgttgtcttcgaaattcaaggtacgacagtgccagcccacagggccatcctggtggccgttgtgaagtgatggcagccatgtttaatgctggcatattccaggccatgtgtctcctgatctgtgccgagtgtaccaagtgtccagactgcagcacatctgtgagctgttcatcattaccagctgcagagcatgccaagcagggaactggcatccatgaaccttga

SEQ ID NO: 118993 - DNA, 4163 bp, Homo sapiens
cagctgccagccgaggaggcgcggcggagaggggactgcggtcagctgcgtccacttggggctgtgcggcggtcccgcgcccggcgatgttcccgggcactccctgagtagcggcagcttatcccccgcccgctagcccgccctggtccccggctcgctcgctggctggcgcggccccggccccgctctgcgtcggccccgccgcggtggaggcgcgcgagggggacgcggccggggatgagcggattgcgggtgaactcgccgcccgggggccccgcgaagccgtgagccgctgcttttctccgagtcgccgccctgcccttggatttgagatcatgtccatccacatcgtggcgctggggaacgagggggacacattccaccaggacaaccggccgtcggggcttatccgcacttacctggggagaagccctctggtctccggggacgagagcagcttgttgctgaacgcggccagcacggtcgcgcgtccggtgttcaccgagtatcaggccagtgcgtttgggaatgtcaagctggtggtccacgactgtcccgtctgggacatatttgacagtgattggtacacttctcgaaatctaattgggggcgctgacatcattgtgatcaaatacaacgttaatgacaagttttcattccatgaagtaaaggataattatattccagtgataaaaagagcattaaattcagttccagtaattattgctgctgttggtaccagacaaaatgaagagttaccttgtacatgcccactatgtacctcagacagagggagctgtgttagtacaactgaagggatccaacttgcaaaagaactaggagcaacctatcttgaactccacagccttgatgacttctacataggaaagtattttggaggagtgttggagtattttatgattcaagccttaaatcagaagacaagtgaaaaaatgaagaaaagaaaaatgagcaactcctttcatggaattagaccacctcaacttgaacaaccagaaaaaatgcctgtcttaaaggctgaagcgtcacattataactctgacttaaataacttgctgttctgctgccagtgtgtggacgtggtattttataaccccgatttaaagaaagttgtagaggcccacaagatcgttctctgcgctgtaagccatgttttcatgctgcttttcaatgtgaagagtcccactgacattcaggattccagtatcatccgaactacccaggatctttttgctataaacagagatactgcatttccaggtgctagccatgaatcttcaggcaacccaccattacgagtcattgttaaagacgccctcttctgttcttgtttatcagacatccttcgcttcatttattcaggtgcttttcagtgggaagaattggaagaagatatcaggaagaagttgaaagattctggggatgtttcaaatgtaatcgagaaagttaaatgcattttaaaaacaccaggaaagattaattgcctaaggaattgcaaaacctatcaagccagaaaacctttgtggttttataacacttccctcaagtttttccttaataagccgatgcttgccgatgttgtcttcggaaattcaagggtacggacagtgcccagcccacagggccatcctgggtggccccttgtgaagtgatgggcagccatgtttaatggtaatttacatgggaaggcaaagagtgtcctgattcccgtttatggtgtttccaaagagactttcttgtcatttttagaatacctgtacacagactcctgctgcccagcttggcatattccaggccatgtgtctcctgatctgtgccgagatgtaccaagtgtccagactgcagcacatctgtgagctgttcatcattacccagctgcagagcatgccaagcaggggaactgggcatccatggaaccttgatattagttggacctgctttaaaaagggccaagttttcaccactcctggattgccttttcaacctgggcttactttcattttcattgctacttaacttacctcatctttcagttcaaaaggcctggaattttcagggatcttttcagtggggaaggaacggcagttttttgtttggaaaaaggcacaggtggggcccttcgaatatgttacttggaaggcagcttgcgggaattacagggaagtattatttcacttccccgggaaatgtcggttgcttaggtaatggtaaacctgggagccttttatacactacatttcttttttattattatgaagaatgggatacctccaggttccagtaaaattcttctgaccgaaaccaatgtgggtgttagaaaaattaccatatagcttaatatgtttattagttctctttggaaaaaaactaccactgtggtcttaaaagggaacaaaatataccataggctaaaactaaggctttcactctagaatgcaaagctgttttgcagctgttttcccttaaagatgtcctgttgctttagtgatatttagacccctctcagttaagaaatgcttagattaaaaaaaaaaaattacgtaggattaatacagaaatttaatcatgtctgattaattgctctattaaaataaggggcatttaaagacccagcataaccatttgtataatgagaaatctaggggaaaaccaatcagtccaacatgagattttaggaatagaaatttgccggccatttggaaagtgaaatgccacttagttctcaattgatgacagtgtttgaatcatcataaaaaaaatacctgcttttcatctggacaacccaattgagccactttatctccttttggcaatctgagtaggcggggaacctaggcagggctggctttcttagcgtgtaacttgtgtagcagcacagggcccacacttagaaggaccccacacttggttcaaggctctgctatagcggaaattcttaataatgtttgaagaagggccccatgatttcattttgtgctgagccctcaaaattatgtctgtttcgtggtgggaaatatcctatgttttcttgctcaaacacctttctctctgaaagcagaaaaaggcactgatataaagggaagagaaggaggctcaccggagggaagagaacatagtgaagattcccgcctttggggaggtctggaccacccagggcctccactgccaccttggctggcaagggagaaatgtgttgtgttgtcttagctttaaaacagtcacagttcttgctctatcatagatgaacaaatactttcttgatcattctgtaagaccaggaggttggtaagagtgactaaccagcctaactttaatacacatgtataaagatgttcacagagaaagatgctctgtagagaatttgctaccgaagttggctcaagaatttgtttttagtgttatttaccaagattaggacgtcagtggcttaaattctttgaattcttttcaaggactgcaagattatttgataaagagtagcatgaatcttgtgctctaatattacacagtaagttcaaagaaaggatgtaagtcaaagacttgttacatagagggaaaatggactgggatagaggacagactgatagtttctttctttcatatcacatgtatagagaaataattatatcagaaactcacaaacctagacatggaaaaacagattactgtctattgtcagcatcattttcatctgtaagtcactactggaatatatttttcttttaatttccagtgactttagaatacacacagtttttccgacttttcaaaaatttgattaaatggttttatagtataatattgggaccccataccgttagcccttgtatgtataccaacactgccaaagtaaaacattaggtcaggcatggtggctcaggcctgtaatcccagcattttgggaggctgaggcaagtggataacttgaggtcatgagttcgaaaccagcctggccaaaacagtgaaaccccgtctctactaaaaatacaaaattagccagatgtggtggcgcacacctgtaatcccagctactcaggaagctgaggcaggaaaatcgcttgaacctgggaggtggaagttgcagtgagccgagatcgcaccactgcactccagcctgggtgacaagagcgaaactccatctc

SEQ ID NO: 118994 - DNA, 3117 bp, Homo sapiens
atggagacgcgtatgacaccgcctggcctggataaagtacccgaagccgtagaacgccacacgggcagtctgaatgatgaatggctgatggcggcagatctgattgtcgccagtcccggtattgcactggcgcatccatccttaagcgctgccgctgatgccggaatcgaaatcgttggcgatatcgagctgttctgtcgcgaagcacaagcaccgattgtggcgattaccggttctaacggcaaaagcacggtcaccacgctagtgggtgaaatggcgaaagcgccgggggttaacgttggtgtgggtggcaatattggcctgcctgcgttgatgctactggatgatgagtgtgaactgtacgtgctggaactgtcgagcttccagctggaaaccacctccagcttacaggcggtagcagcgaccattctgaacgtgactgaagatcatatggatcgctatccgtttggtttacaacagtatcgtgcagcaaaactgcgcatttacgaaaacgcgaaagttacgtgtaagcgcctgcaatacacgggcggttgtacttttccccaccgcgacactgccagcaatactgataatgtaaggaatgcgttgcccgttggtaccaagaaactgttccagaactgcctgacggcgcagattcgagcttatatagaagttcagcaaacaccaaagccggaagataaagtcaaagcggtgaccgagctgaatcaacatgcgccgctggcgatggtcggtgacggtattaacgacgcgccagcgatgaaagctgccgccatcgggattgcaatgggtagcggcacagacgtggcgctggaaaccgccgacgcagcattaacccataaccacctgcgcggcctggtgcaaatgattgaactggcacgcgccactcacgccaatatccgccagaacatcactattgcgctggggctgaaagggatcttcctcgtcaccacgctgttagggatgaccgggttgtggctggcagtgctggcagatacgggggcgacggtgctgggaccgaagcacgtaccctgtcccaatcgtcgtgatgaagagaacatgccgggttcccgccgcgaagtgaaaaacgcgcgggaagaaggcgtagagttcaaattcaacgtccagccgctgggtattgaagtgaacggtaacggcaaagtcagcggcgtaaaaatggtgcgtaccgaaatgggcgaaccggacgccaaaggccgtcgccgcgcggagatcgttgcaggttccgaacatatcgttccggcagatgcggtgatcatggcgtttggtttccgtccacacaacatggaatggctggcaaaacacagcgtcgagctggattcacaaggccgcatcatcgccccggaaggcagcgacaacgccttccagaccagcaacccgaaaatctttgctggcggcgatatcgtccgtggttccgatctggtggtgaccgctattgccgaaggtcagctggagcaacaaggttttaccggcgatacggcgacaagttatgccgatcgtctgacaatgtcgaccgacaacagtatttaccaacttctccccgatgcggtggtatttccgcgttcaaccgcagatgtggcgctgatcgcccgtcttgccgcgcaggaacgctattcatcgctgatctttaccccccgcggcggcggcaccggcactaacggtcaggcgctcaaccaggggattattgttgatatgtcccgccatatgaaccgcatcatcgaaattaaccctgaagagggctgcatgacagctgcctgcgtgaagccatcagtttctcagtcaatggcccctcgccaagggctcttcgaggatctcccgtcatcacagtgccgtttattggcgcttaaacacgttctcctgaacctactaagggaccgttacgatgaccgccagtcagcattattcaccacgacaaatcccgcgctggccgcagatagacgaatctcgctggaaggagaaactcgcgaaatcacaagttacttcccgatgcagtttgttcgctacagcctgctgatccacgcggctgcgggtatctcgctgatccacgccatcctgatccataggtatatggcattttgggtgaaaggatcgattaaagggatgatcgaagggaagacacccacgccgttatccagtttcaggtcgttgccaaccatcgaaatctgctgcatggtttcgataccggaaccaatcaacgttgcgcctttcaccggcttcgttactttaccgttttcaatcagatatgcttctgaagtggagaaaacgaatttgccggagaacctgctgtacgatgtgtcacaggtggcgatcccgtttgataacgtcgacgacgagcaaattcaaaagccgcagcgttggaatccggcggatctggggcgctttatgatcttcttcggaccgatcagctcgatcttcgatattttgacgttttgcctgatgtggtgggtattccatgccaacacgccggaaacgcaaacgctgttccagtcgggatggtttgtggtgggcttactgtcgcaaacgctgattgtgcatatgatccgcacccgccgtgtgccgtttattcagagctgtgcatcgtggccgttaatgatcatgaccgtgatcgtgatgattgtcgggatcgcattgccgttttcaccgctggccagttatctgcaattacaggcgctgccgttaagctatttcccgtggctggttgcgattctggcaggcgttttcgtggtggccaccgatcatgcagcagaagccattaccggattcttcactaaatatggtgacgtcggtacggacattaatccgctgtatcgtctcaacaaacgtcagggtaaacagttactggcggcattagcttgcccggaacacctttataagaaagcgccaacggccgatctggaagatgatcgcccttctctgccagatgaagtggcactcggcgtgacctatgacaatatcgacgactatctggaagggaaaaacgtacctcaacaggtcgccagaacaatagagaactggtatctgaaaaccgaacataaacgccgtccgcccattaccgttttcgatgatttctggaaaaagtaa

SEQ ID NO: 118995 - DNA, 1860 bp, Homo sapiens
atgcgcgtatgcgcgcgcgcgtgtgtacgcacgcgtacgcgcatgtgtgtgtatgcgcacacatgcgtgtgcgtacgcacgtacgcgtatgtgcgcgtgcgtgtgcgcgtgcatgtacgcgcgcgcgtacgcgtgtgcgcgtacgcgcgtacacgcgtgcgcaactcgctgtcaatcctgccattcatccagctcacccttgccactcctattcatcatatacatcaggaagaatttaatatccgcggcattgttcccgtattacgccgtgtaaaacctgacctggcgattggtattgatatcactccatcgtgtgacacccctgatttacacgattattccgaggtcaggattaatcagggcgttgggatcacctgcctgaactaccatggtcggggaacgctggccggattaatcacgcctcctcgcctgatacggatgttggaacagacggctcttgaacacaacattccggtgcagcgagaagtggctcccggcgtgataacagaaaccggttatatccagcttttcttacccggctgggagattggtttttcaccgttggcgctgctgctggcgtttctctgctcgacgtcaccgggatttggggatcccgacggccttggggtcattgcgtaccaggataccgtgcgcccgaatgcggcaactgccatcagtgaactgaacgcgctggccgtcaaaggggtgatcctcaccggcgataatccacgcgcagcggcggcaattgccggggagctggggctggagtttaaagcgggcctgttgccggaagataaagtcaaagcggtgaccgagctgaatcaacatgcgccgctggcgatggtcggtgacggtattaacgacgcgccagcgatgaaagctgccgccatcgggattgcaatgggtagcggcacagacgtggcgctggaaaccgccgacgcagcattaacccataaccacctgcgcggcctggtgcaaatgattgaactggcacgcgccactcacgccaatatccgccagaacatcactattgcgctggggctgaaagggatcttcctcgtcaccacgctggatgaccgggttgtggctggcagtgctggcagatacgggggcgacggtgctggtgacagcgaatgcgttaagattgttgcgcaggagataaggcaaaccgatcgcaacattgagcgcgatcggtcccctcgcccctctggggagagggttagggtgaggggaaaaggcggcatcgaagccaatcagcccctatcaaccgcctttacgaatcaaataacgataaggcagtccatccgtctctttagcaaccagttcgtgttccataaaggaatatcgcgggtagtggccggatcgtcggcgataatcagcaacgtttcgccaggctgcatattgcgcacgccgaactgccgtcgcggttttcctatttcttgtactggcgaaggaaaagcggcttacggctggcagcgtgacggcggtcatgccgaatacttgctggcggaagaaaaagatctgatcctcctgccggatgcgctgagctacgaagatggtgcgtttatcagttgcggcgttggtacagcgtatgaaggaattttgcgcggcgaagtttccggcagtgataacgtgctggtggtcggtctggggccagtcggcatgatggcgatgatgctggcgaaaggtcgcggtgcaaaacggatcatcggcgttgatatgctgccggaacgtctggcgatggcaaaacagttaggggtgatggatcacggctatttagccaaccaccgaaggtctgccgcagattatcgccgaactcacccacggtggcgcggatgttgcgctcgattgttccggtaa

SEQ ID NO: 118996 - DNA, 3390 bp, Homo sapiens
atggataaattcctcaacacatacaccctcccaagactaaaccgggaagaagttgaatctctgaatagaccagtaacagcctcgggacttgaggtgataattaatagcttaccaatcaaaaaaagtccaggaccagatggattcacagctgcattctatcagaggtacaaggaggacgctggggaaagagaaggagaggggggaaatcagcaggtggctgttagaggcaaaagaaagaccacagagaggaaaaagaaactaggagaagacgtcaaagtaaaagagagcaaaaacagtggtgcatatgaagtcaaacagcatcgattcttccgttctttagactggaacagtttgctgagacagaaggcagaatttattccccaactggaatctgaggatgacacaagttattttgatactcggtctgagaagtatcatcatatggaaacggaggaagaagatgacacaaatgatgaagactttaatgtggaaataaggcagttttcttcatgttcacacaggttttcaaaagctgcagaggtatccactcgattgctttccactcgggttaccgaaatcgaagggtggttgatcgttcagagaaatcagaagctgctgcagagtaatctgaagcaacgtagcggcgaaccattgatactggatgatgattctcacgtgccaccggaattacgtgcggggtatcgcttgctgaagaatgccggttgcttaccgccagaacttgagcaacggagagaagcaattcagcttctggatattctcaaaggtatccgtcacgatgatccgcaatatcaagaggttagccgtcgattgtcattactggaattgaagctgcgacaagctggattgagtaccgattttttacgcggcgattatgctggcgcccagcagggtaatcggcacgcccagtttcaaattgcatgggattataacgctggcgaaggggtggtccaggactataagcaagcgatgtactggtatctgaaggctgccgctcaggggagcgtcggcgcttacgtcaacatcggttatatgtataaacacggacaaggcgttgagaaagattatcaggctgcctttgaatggtttacgaaagccgctgaatgcaatgacgccactgcctggtataacctggccattatgtatcattacggagaaggaagacctgtcgatctccgacaggctctcgacctgtatcgtaaagttcagtcatccggaaccagagatgtcagtcaggaaattcgtgagactgaatatttacggggttatgtggacaataaaggcatctcttttaaatcctgcttactgaacggttctgttgaagtcgccccgcgtgccggactggcggatgcgatttgcgatctggtttccaccggtgccacgctggaagctaacggcctgcgcgaagtcgaagttatctatcgctcgaaagcctgcctgattcaacgcgatggcgaaatggaagaatccaaacagcaactgatcgacaaactgctgacccgtattcagggtgtgatccaggcgcgcgaatcaaaatacatcatgatgcacgcaccgaccgaacgtctggatgaagtcatcgccctgctgccaggtgccgaacgcccaactattctgccgctggcgggtgaccaacagcgcgtagcgatgcacatgcgacgggaaaaagctgataatgatatggctccgctccagcaaaagctggtggtggtgagcaacaagcgggaaaaaccgattaacgatcgccgttcgcgccagcaggaagtgactccggcaggcaccagtatacgctatgaggcaagcttcaaaccgcaaagcggaggaatggagcagacgtttcgcctcgacgcccagcagtaccacgccctgacagtgggcgataaagcagttcaaacacgccgaaaaggaaaatccgtaccttttcggcggtggtcatctgcgggccatctttcggtaaagtggatttcaatagcgccagctgcataccatgcattggggcgcgtcgaacaggccgaacatccatggcgcaaccatctacgcgagcacagttgcgaactcccattcccccgccgattcacacgggctctggtcgggtctggcatgaagcccaggcttaacggtgagcgcgtattgatttgcgctgccgggaaacatcccgctgatgcatttactggtttaattaacgaactggaaagcgccgggcaaacggtagtgctggtagtacgtaacgatgacgtgcttggtgtcattgcgttacaggataccctgcgcgccgatgctgcaactgccatcagtgaactgaacgcgctgggcgtcaaaggggtgatcctcaccggcgataatccacgcgcagcggcggcaattgccggggagctggggctggagtttaaagcgggcctgttgccggaagataaagtcaaagcggtgaccgagctgaatcaacatgcgccgctggcgatggtcggtgacggtattaacgacgcgccagcgatgaaagctgccgccatcgggattgcaatgggtagcggcacagacgtggcgctggaaaccgccgacgcagcattaacccataaccacctgcgcggcctggtgcaaatgattgaactggcacgcgccactcacgccaatatccgccagaacatcactattgcgctggggctgaaagggatcttcctcgtcaccacgctgttagggatgaccgggttgtggctggcagtgctggcagatacgggggcgacggtgctgttcttcccacggctgttcgaagccaggaattcgcaggttggaaacggagaaaccaaccagacccgctttcggctttgcgccgcgcccggtggcaccttcatcgcggatttcaccgccggaaccggtcgccgcgcccggccacggagaaatcgccgtcgggtggttgtgagtttcgactttcatcagaatatgcgccggttcctgatggaaatcgtagcggcccgtttcgtggtcagcaaagtagcggcccacttcagaaccttccattacggcggcgttatctttataagcagagagaacgtgatctggcgtggtttcgaaagtatttttgatcatcttgaacagcgatttcggctgctgttcaccatcgataacccagtcggcgttaaaaattttgtggcggcagtgctcggagttcgcctgggcaaacatatacagttcgatgtcgttcgggttacgaccaagctttgtgaaagcatcctgcagatagtcaatttcatcttccgccagagccaagccaagacgcaggttagcgtcgatcagcgcctgacggccctgccccagcaaatcaacgctggtaaccggagtcggttgatggtgggcaaacaactgctctgcatcatctaa

SEQ ID NO: 118997 - DNA, 2104 bp, Homo sapiens
atgcgttatgatgatatcgatttgctgcgtctctccgcacgcgaacggcgcaaactggttggccataacgtgtcgatgattttccaggaaccgcagtcgtgtcttgacccttcagaacgtgtgggccgccagttgatgcaaaacatcccagcctggacctataaaggccgttggtggcagcgttttggctggcgcaaacgccgtgccattgaactgctgcaccgcgtggggattaaagatcacaaagatgcgatgcgcagttttccctatgagttgaccgaaggtgaatgtcagaaagtgatgatagccattgcactggcgaatcaaccgcgtctgctgattgctgacgaaccgaccaactcaatggagccaacaacccaggcgcaaatctttcgcctgctgacgcgtctcaaccaaaacagcaataccactattttgcttatcagccatgacttacaaatgcttagccatggaaatatcgccgaggcacgagttggtgacgatgccacatcatcctatacccaggccctgatcgcgcgttacaaaattcgaaacccgatgcgcataacatccctcaatagctcccgcgctatcccctgtgaacagtaccgatggtgtctctggggcacgtgcggaagttcaggagtggaatttacccttcattacggattggaacttgggcatttttttcaaacggggatgcacggcttttcaggtttaattcggctgaatagccagttgttgcacacctttacgtccaatgacaggattgtcccagatgttccggcggcgcagtgcatcctgaaggcgttccagcaaacatgtggaataacctgcacgctgtatccgtccctcggcatcgtatacgggcgtttccagggaccggtgataatatgttcagggcatcatcaaggatgcgctttttcgaaccattcagttctgccagataatgaatcgcagccagtacatgttacctgccggtgccgcacggaaatgcaggtcccgcaacaccgccggaagaaaacgtttaacccgaccgtactgctcaaccatttcgtcatggaaattattgttctgtggacgagcaagttcattaaccttgcttacagattctgccagtctgtttttggcgcttcattaaaatccggtcacgctgcaggtcgatctacaggcaaccccgttgaaaacaccttcggggaaaatcgaaatttattctgaacgactggcgaagattgcagatacctgggaattgaaaaaagatgaaattattcatccccttcctgcgtataccccaggttttgatggctgggacgatcccctgcggaaaacctatccactgcagttaacgggcttccattacaaagcgcgtacccactccagctgcggcaatattgatgtgttacagcaggcctgcccacaagaggtgtggatcaaccccattgatgctcaggcacgcggtatccgtcatggcgataccgtgcgggtatttaacaataatggagaaatgctgattgccgcaaaagtgactccgcgtattctgcctggcgttaccgccatcgggcaagattttaaagatcttggcccggaagtcagtttccgccgtatttatgaatacgctggcggcgactggcaggaagataatggcgtctggcaccagaacgtgttcgcttattatctctccatctcctgtaaccattgcgatgaccccgcatgtacaaaagtctgccccagcggcgcaatgcataagcgtgaagatggctttgtggtggttgatgaagatgtttgtatcgcgtgccgctactgccacatggcttgtccgtacggcgcgccacagtacaatgctgaaaaagggcacatgacgaagtgcgatggttgttattcgcgcgtcgccgaggggaaacaacccatatgtgtcgaatcctgcccgctgcgtgcacttgagttcggtccaattgaagagtgcgccagaagcacggcactcttgctgccggtcgccactgcgcgcgcgcatttcacaaaacccaatatcgttatcaaacctaacgccaacagccgcccgaccggcgataccactggttatctggctaatccggaggaagtgtaa

SEQ ID NO: 118998 - DNA, 1215 bp, Homo sapiens
atgcaggccaatagggcgcgtacccactacaggtccggcaatattaatgtgttacagcaggcctgcccacaagaggtgtggatcaaccccattgatgctcaggcacgcggtatccgtcatggcgataccgtgcgggtatttaacaataatggagaaatgctgattgccgcaaaagtgactccgcgtattctgcctggcgttaccgccatcgggcaagcgccacgtctgtgccgctacccattgcaatcccgatggcggcagtttcatcgctggcgcgtcgttaataccgtcaccgaccatcgccagcgcatgttgattcagctcggtcaccgctttgactttatcttccggcaacaggcccgctttaaactccagccccagctccccggcaattgcgcccgctgcgcgtggattatcgccggtgaggatcacccctttgacgcccagcgcgttcagttcactgatggcagttgcagcatcggcgcgcaggggtatcctgcgcaaatcaatacgcgctcaccgttaacctgcgcttcaatgccagacccgaccagcgcccgctgtggattcggcggtgggaatggcgagttcagcaacctgtgcttcgcgtacgatggcttgcggcagtggatgcgtcgcgccttgctcgaccgccgccgccagtgtcagcagttcagattcactaatacccgttgccggatgaatcgcggtaacgcgcggtttaccgacggtcagcgtaccggttttatcaaacgccacctgagtaacacgacccagctgttccagcgccgctccgcctttaatcaacgccccacgacgcgctgccgccgccagcccggagctggcggcaaacagcagcggtggcaccagcgtcaccagcagagcgacggccataatcgcgggcgtatagatacggctgaaacggtcgataaaccgctcaatgggagcgcgacgctcttcggcttcttcgatcagtttcagaatccgcacttccaacgtcaccagacggtctacgctggtggcaccagcagggactttatcgcccgttgcgcgctccaccggaatggattcgccggccagggcgctttcatcaaagagcgaccagcaggattcacacagttgcccccccccccctgcgctaagtgccgtggagcaaatagctttattgaggacgacataatgttccggccagttaaatgcactcccccactctaa

SEQ ID NO: 118999 - DNA, 268 bp, Homo sapiens
actacgaattcaatcgtccgtacccggagatccagcgcagtggtataagcatagctgctggagccattgttgtttgccgctaccagcgacagccagttaagcaaaacggaaatcagtagcatcaagataaatagtgaaactgttcctgtttatcagttgcgctataacggcaataacgccctgatgttcgcgacttatcaggacaagatgctggtgttttccagcacggatatgttgtttaaagatgatcagcaggataccgaagcca

SEQ ID NO: 119000 - DNA, 1725 bp, Homo sapiens
atggctaattcaatatgttgtatgtcaggaataggaggcctgagagaggaacaggtatgggaaacagctggcggtattcgcgaaatcgaattgatctgtgcagagtgtttccatgcttcattcgcgggtgtacgcgaacctgtcgcgtgcaaatcgcgcatctgtacgttgcaactgctcacgctgccattgccagaggctgcagtcgtgcatttgctgagaaatcgaatgtctgaatcaagtgtgcgagctggtcctaatctgattcctgacggtgcgctctgcgagctaggcgttagggcgagtggacgcgtttggctgagcgtgggccgtcgaactgagccgtgggctggctgcaccgtcagcactactgagccaactgatgcgaccgggttggtattcactgaagtcgactgtggccgatcgaatggaaagttgaacagcgtcaagcaagtaagatccgctgtgatccggaaccagagtgaccgcttgacgcgctggtggacacggaagtgccgtcagcacggaaaccgggaacgcgcattgggcagccattcgaggacatcgggccacagaccgtacgaacggaagaccgctgaggcagacgaatcgcccccaaggggaaaccggtcccgagacagggaacccgacacacggtgcccacacccaggcggacccgaaaaccgaaaatgtatgcagattgtttgtagaggcactgatagactcattgtttatctcctcgttttcgcttatttcgccaacaccgactgctgccgctttcgcgaactgggcatctgggctccgggtaaacaaaacgcccacggcacaataattgccatccacaacaacgcccttagtttcacgacgccccagcgcggcggtacgcgctttctcctggggagatataagccgcaatcggcgcgcaatcgtccatgcgacttaacgccagcagatgaccgccgtcatcggcaacagcatggaaacagaccaggtgtggtgaaagagtatcagggggttatcgatccccagcgcctggcgcagtatggcatcagtctcgccgaagtaaaaagcgcgctggatgcttcaaaccaggaagcgggcggttcgtcgatcgaactggcggaagcggaatatatggtgcgcgccagcggctatctgcaaacgctcgacgactttaatcacatcgttttaaaagccagtgaaaatggcgtgcccgtttatctgcgcgatgttgcgaaggtccagattggcccggagatgcgccggggcattgccgaactaaacggcgaaggcgaagtggcgggcggggtggtgatcctgcgatccggcaaaaacgcccgagaagtgatcgccgccgtgaaggacaaactggaaacgctgaaaagtagtctgccggaaggcgtggagatagttacaacatacgatcgcagccagctcattgaccgcgccatcgacaacctcagcggcaagttgctggaagagtttattgtggtggcggtagtctgtgcgctgtttctctggcatgtgcgctcggcgctggtggcgactatatcgttgccgctggggatgggtattgctttaattgtcatgcacttccagggactgaatggcaatattatgtcgatgggtggcattgacaatggcgaccgggcgatggtcgatgctgctatcgccatgatcgagaatgccataaagggtgggagaatggcagacccggcatactga

SEQ ID NO: 119001 - DNA, 1440 bp, Homo sapiens
atggcgaatatcccgtggtatcgccatctcaccggtgcacaatggcgcgcattttccgctgcctggttgggatatctgcttgacggttttgatttcgttttaatcgccctggtactcaccgaagtacaaggtgaattcgggctgacgacggtgcaggcggcaagtctgatctctgcagcctttatctctcgctggttcggcggcctgatgctcggcgctatgggtgaccgctacgggcgtcgtctggcaatggtcaccagcatcgttctcttctcggccgggacgctggcctgcggctttgcgccaggctacatcaccatgtttatcgctcgtctggtcatcggcatggggatggcgggtgaatacggttccagcgccacctatgtcattgaaagctggccaaaacatctgcgtaacaaagccagtggttttttgatttcaggcttctctgtgggggccgtcgttgccgctcaggtctatagcctggtggttccggtctggggctggcgtgcgctgttctttatcggcattttgccaatcatctttgctctctggctgcgtaaaaacatcccggaagcggaagactggaaagagaaacacgcaggtaaagcaccagtacgcacaatggtggatattctctaccgtggtgaacatcgcatagccaatcagcttggcccaatggggggaaaaccccttttttttttaaaaatcccaaaaaatggcctagtgggggaagtctgggaccacggtcccactcgtatcgtcggtctgattattagtctgggaccacggtcccactcgtatcgtcggtctgataatcagactgggaccacggtcccactcgtatcgtcggtacagggtaagctgcctgcgggagtcagcgccgagctggggccagatgccacgggtgttggctggatctatgaatatgcactggtggatcgcagcggtaagcacgatctggccgatttacgctcattacaggactggtttctcaaatatgagctgaaaaccatccctgacgttgcccaagtggcgtcggtgggcggtgtggtgaaagagtatcaggtggttatcgatccccagcgcctggcgcagtatggcatcagtctcgccgaagtaaaaagcgcgctggatgcttcaaaccaggaagcgggcggttcgtcgatcgaactggcggaagcggaatatatggtgcgcgccagcggctatctgcaaacgctcgacgactttaatcacatcgttttaaaagccagtgaaaatggcgtgcccgtttatctgcgcgatgttgcgaaggtccagattggcccggagatgcgccggggcattgccgaactaaacggcgaaggcgaagtggcgggcggggtggtgatcctgcgatccggcaaaaacgcccgagaagtgatcgccgccgtgaaggacaaactggaacaatattaa

SEQ ID NO: 119002 - DNA, 1198 bp, Homo sapiens
tcaatgtccgtacccgtacatcgctgcgactggcaggatcttagttgttacccaccttatttgtcttgcaccacaaatcgttgaaaatcaggtgacttatccgctaaccaccaccatgttgtcggtgcctggcgcgaagactgtgcgcggtttctcacagtttggcgactcttatgtgtatgtcattttcgaagatggcaccgatccgtactgggcgcgttcgcgggtgctggagtacctcaaccaggtacagggtatgctgcctgcgggagtcagcgccgagctggggccagatgccacgggtgttggctggatctatgaatatgcactggtggatcgcagcggtaagcacgatctggccgatttacgctcattacaggactggattctcaaatatgagcttgaaaccattccttgcgtttcggaagtggcgtcggtgggcggtgtggtgaaagagtatcaggtggttatcgatccccagcgcctggcgcagtatggcatcagtctcgccgaagtaaaaagcgcgctggatgcttcaaaccaggaagcgggcggttctgtcgatctgaactggcggaagcggaatatatgggcgggacttgctccgcacacggaagagccctatcccggggggtcctttggtgccgattctccgcgattgttcgggggcctccaaggggcatgttttgcggcgcaggtgctgcgccgaatcttatacgagcgccaccgtcattataaacacacctttgcgagaggggcgccgcccacttgggctgccgccggcacactagggactagttgtcctaaccggtggaacttcgaagagtccggcaatatcccctggggcagaaccagcgtaccgcgactggtagcctctctcaacatagctggatcccgtcaccagatgccttccccggctgcgaactgggaaaggcattcccggtcatcgttttacaagctctcaccggccgggaaaccccgagccagctctattgactgggtatactcccgaccaagcctaccagctggccccgtggccttactcaaggccatgacagtctcaacagcttatctgcaagcacccggaatctgcgcccgcattccgacccaagtgcggtcgcacaaagcgaaagcagctcgctcgaacacccatgtactcgacatggtgtgcgattcgataaaactggccgtcgcctaa

SEQ ID NO: 119003 - DNA, 681 bp, Homo sapiens
ttaatggtaatcaacgattttacgatactcttcaaagccttctgtacgtgaagcgacgaacgctttgtcgtacagattttcttcaataatgacatggcccatcgcattcaacagcgcgatgttcgagccgtttttcagtgcaatgtgcatgtcagcaatgcgcgcggtttcaattttgcgcggatcgcagacgataattttcgccccgttacgtttagcgttaattacgtgattcgccacgattgggtgggaatccgccgggttgtacccgaaaacgaacactaaatcggtattatcaatttcgttaatagcattgctcattgcgccattaccgaccgattggtgcagaccacgcgaggagccggtcgtctggatggcatccggaccgtacttctctttgatggcgctcaggcgctcggcaacgtaattcagtgcctcatcccaggaaacaggttcgagtttgccgccacgctggcgacggatcatgggggttttcaggcgcggggtcaggatctgggtatcgttaatgaagtcccagccataataacccttcagacacagggtaccctggttggttttcccctgcgctgcctccgcccggacgattttgccgttatcgacgaccaggttgattttgcaacctgatgcgcaataggggcaaaccgtgacgacttttttcat

SEQ ID NO: 119004 - DNA, 609 bp, Homo sapiens
tgatatcttcaaccgactccggcgtgtagccttcaacgattttacgatactcttcaaagccttctgtacgtgaagcgacgaacgctttgtcgtacagattttcttcaataataacatggcccatcgcattcaacagcgcgatgttcgagccgtttttcagtgcaatgtgcatgtcagcaatgcgcgcggtttcaattttgcgcggatcgcagacgataattttcgccccgttacgtttagcgttaattacgtgattcgccacgattgggtgggaatccgccgggttgtacccgaaaacgaacactaaatcggtattatcaatttcgttaatagcattgctcattgcgccattaccgaccgattggtgcagacctgcaaccgatgggccgtgtcagacacgagcgcagcagtcaacgttattggtaccaataacggcgcgcgcaaatttttgcattacatagttggtttcgttacccgtaccacgcgaggagccggtcgtctggatggcatccggaccgtacttctctttgatggcgctcaggcgctcggcaacgtaattcagtgcctcatcccaggaaacaggttcgagtttgccgccacgctggcgac

SEQ ID NO: 119005 - DNA, 528 bp, Homo sapiens
ttaggcgtggaagccacggccaattggtgatttcggcaagagcggcagaaaagctgcccgtgccctgtggagctggcgcaggcctgtgcgcatgccgtcatgaagagcgggatcgatcttgccgtttcttactgtatgcaggtgaaccacgggttcgcccagccgctggagttcctgctcggtgggctggataaggtgccagttctgcttgtgttcatcaacggtgtcgccacgccgctgcccggtttccagcgtacccgcatgttgggtgaagccattggacgtttcaccagcactcctcagtatgccggcgacacggttaatgatgaagatatcagtaataccattcgcgctctgtttgctaccggcaactttgaggatgttcgcgtccttcgtgatggtgagctgagaaagttcccaacctgtgaatcagacgataattttcgccccgttacgtttagcgttaattacgtgattcgccacgattgggtgggaatccgccgggttgtacccgaaaacgaacactaa

SEQ ID NO: 119006 - DNA, 2772 bp, Homo sapiens
atggcaccgctttctgcctactcgtctaccgaatggacctatggttcaccgcgactggaacgctacaacggcatcccgtcaatggagattttaggtgaagcggcggccgggaaaagtaccggtgacgccatgaaatttatggcagacctggtcgctaaacttccggcaggcgtcggctactcatggaccggactatcgtatcaggaagcgttatccgcaaatcaggctcctgcgctgtatgcgatttcactggtcgtggtgttcctttccctcgccgcactctatgagagctgcgtcgttggcgcattactggccaccgatctgcgcggcttaagtaatgacgtctacttccaggttggtttgctgaccaccatcgggctttccgccaaaaacgccatcctgattgtcgaatttgccgttgagatgatgcagaaagaagggaaaacgccgatagaggcaatcatcgaagcggcgcggatgcgtttacgcccaatcctgatgacctctctggcctttattctcggcgtgctgccgctggttatcagtcatggtgccggttctggcgcgcaaaacgcgcaattcgtcatcattttgtaccaacacatactgacccctgaaacggacaaaatccatacgccacgcatcgttccgcaaaaactggagcgcacgcatctgacaccagtcgctctcgcggttgccactgtttttatgctggctggctgtgaaaagagtgatgaaacagtgtctctctatcaaaatgctgacgactgttcagctgcaaacccaggcaaaagcgccgaatgtaccaccgcgtacaacaatgcgctgaaagaagccgaacgtactgcgccgaaatacgccacccgtgaagactgtgttgctgaatttggtgaaggtcagtgccagcaggcaccagcccaggctggcatggcaccagaaaaccaggcgcaggcccagcaatccagcgggagtttctggatgccgctgatggccggttacatgatggggcgtctgatgggcggcggcgcgggatttgcacagcagccgctgttctcctcgaaaaacccagccagtccggcttacggtaaatataccgacgcgacgggcgttcacttccaccattttgtggatcagtgtacgacgggtaatttcggttggttccggctggtttttcagtttacgcagggtgcgggcgatcacttccgggttgctggcagcttcgcctttcggcgaaatgctgtggtattgctcggcggtgttggccaggttcaggaactgactaaacgcacgcgcaacgggcacgcagctcgtcgttcgacaaattttgtaaggtgtttatcagcaaaatgtgatctctggtacaatccgggtggttatacggttcaagactccagtgttccctttattccgccaacaattgggaagttaaagcgttgcaagtcctttagcgagcagatgcagggccgcaaccaggtggatatcaatgagatccagaccgcagttgaaaatcagctgatgtcaggtccatacaaacaactggctcgtgcttacatcgagtaccgtcacgatcgcgacattgaacgtgaaaaacgcggtcgcctgaaccaggagatccgtggtctggtcgagcagaccaacgcctcgttactcaacgaaaacgccaacaaagacagcaaggtgattccaacccagcgcgacctgctggccgggatcgtggctaaacactatgcacgtcagcacctgctgccgcgtgacgtggtgcaggcacatgagcgtggcgatattcactatcacgatctcgattactcaccgttcttcccgatgttcaactgcatgttgatcgacctgaaaggcatgctgacccagggctttaaaatggggaacgccgagattgaaccgccgaagtcgatctctacggcaaccgcggtaactgcgcagattattgctcaggttgccagccatatttatggcggcaccaccattaaccgtatcgatgaagtgctggcaccgtttgtcactgccagctacaacaaacatcgcaagaccgcagaagagtggaacatcccggacgccgaacggaaaatccaggtttctccaaccaagcctctggcaacacagcgcgatctggcgctggcctactcaccaggcgttgccgcaccttgtcttgaaatcgaaaaagacccgttaaaagcctacaaatataccgcccgaggtaacctggtggcggtgatctctaacggtacggcggtgctggggttaggcaacattggcgcgctggcaggcaaaccggtgatggaaggcaagggcgttctgtttaagaaattcgccgggattgatgtatttgacattgaagttgacgaactcgacccggacaaatttattgaagttgtcgccgcgctcgaaccaaccttcggcggcatcaacctcgaagacattaaagcgccagaatgtttctatattgaacagaaactgcgcgagcggatgaatattccggtattccacgacgatcagcacggcacggcaattatcagcactgccgccatcctcaacggcttgcgcgtggtggagaaaaacatctccgacgtgcggatggtggttccggcgcgggtgcgcagcaatcgcctgtatgaactgctggtagcgctgggtctgcaaaacataacatcgtggttttcgattcaaaaggcgttatctatcagggcggtgagccaacatggcggaaacaaagctgcatatcggtggtggatacggcaacgtacgtcgatgatgtga

SEQ ID NO: 119007 - DNA, 684 bp, Homo sapiens
atgacaccgcatgtgatgaaacgagacggctgcaaagtgccgtttaaatcagagcgcatcaaagaagcgattctgcgtgcagctaaagcagcggaagtcgatgatgccgattattgcgccactgttgccgcggttgtcagcgagcagatgcagggccgcaaccaggagatccgtggtctggtcgagcagaccaacgcctcgttactcaacgaaaacgccaacaaagacagcaaggtgattccaacccagcgcgacctgctggccgggatcgtggctaaacactatgcacgtcagcacctgctgccgcgtgacgtggtgcaggcacatgagcgtggcgatattcactatcacgatctcgattactcaccgttcttcccgatgttcaactgcatgttgatcgacctgaaaggcatgctgacccagggctttaaaatggggaacgccgagattgaaccgccggaagtcgaatctcgtacgggcaaaccgcggcgcctgggtgaggcccggagctttggtatccggcgcaacaatctggctggcgtgggcgtgatcagcggtgactatgaccagcgtgttaccctcctttttagcgaattccagcgcccgttgtacggcttcatcgagatcgaccgtctcgccaatttgcccacaaggattcgcagcatgatcctgtctatcgattga

SEQ ID NO: 119008 - DNA, 1233 bp, Homo sapiens
tctccggcacccgcggtacctgcgcagattattgctcaggctgccacccatatttatggcggcaccaccattacccgtatcgatgaagtgctggcaccgtttgtcactgccagttacaacaaacatcgcaagaccgcagaagagtggaacatcccggacgccgaaggttacgctaactctcgaaccatcaaagagtgctacgatgccttccagtcactggagtacgaagtaaacaccttgcacaccgccaacggtcagacgccgtttgtaacctttggttttggcctgggcaccagctgggaatcgcgcctgattcaggaatcgatcctgcgtaaccgtatcgcaggcctcggtaaaaaccgtaaaactgcggtgttcccgaaactggtgtttgcgattcgcgatggcctgaaccataaaaaaggcgatccgaactacgacatcaaacagctggcgctggagtgcgcaagcaagcgcatgtatccggatatcctgaactacgatcaggtagtgaaagtcaccggttcgtttaaaactccgatgggctgccgcagcttcctcggcgtgtgggaaaatgaaaacggcgagcagatccacgatggtcgtaacaacctcggcgtgatcagcctgaacctgccgcgtattgctctggaagcaaaaggcgatgaagccaccttctggaagctgctggatgaacgtctggtgctggcacgtaaggcgctgatgacccgtatcgctcgtctcgaaggcgtgaaagcgcgcgtggccccgatcctctatatggaaggtgcttgtggcgtgcgtctcaatgctgacgatgatgtttctgaaatcttcaaaaacggtcgtgcgtctatttcgctgggttacatcggcatccacgaaaccattaacgcgctgttcggcggcgagcatgtttacgacaacgagcagcttcgcgcgaaaggtatcgccattgttgaacgtctgcgtcaggcagtggatcagtggaaagaagaaacggcccaacaggtttccacccctcgatgtggagaagaaggtgaacccgtacgacagcagcggggcgaccggcagcatacggaagcccagtatgccgcaccagggggaatggcaaacccgaacacgtacgaaagtgcggtgcagccacaaaccaggggggacccggcggttaaaaaaaattggaaaacgaagggggcaaaaaagactgtcacgttgcgccctcctctgtcatga

SEQ ID NO: 119009 - DNA, 777 bp, Homo sapiens
atgctacggaccagtgatcgtcctccatatcaatatccgaagcgctgcattcctctatcagtgttagaggtcttgcgatgcgcacgtcgatggtcgttacgtccatacaaacaactggctcgtgcttacatcagagataccgtcacgatcgcagacattgaacgtgaaaaacgcggtcgcctgaaccaggagatccgtggtctggtcgagcagaccaacgcctcgttactcaacgaaaacgccaacaaagacagcaaggcacatgagcgtggcgatattcactatcacgatctcgattactcaccgttcttcccgatgttcaactgcatgttgatcgacctgaaaggcatgctgacccagggctttaaaatggggaacgccgagattgaaccgccgaagtcgatctctacggcaaccgcggtaactgcgcagattattggctcagtccatatttatggcggcaccaccattaaccgtatcgatgaagtgctggcaccgtttgtcactgccagctacaacaaacatcgcaagaccgcagaagagtggaacatcccggacgccgcaggctacgctaactctcgaaccatcaaagagtgctacgatgccttccagtcactggagtacgaagtaaacaccctgcacaccgccaacgtcgagggcttgacaggcgatgatggaatagccgtcgaagcgctaaagaagaactcccagaaaccacgcatgagtgcaagtcacaattgtgaacttgtcagtcttcgtggtcgacaatatacgtag

SEQ ID NO: 119010 - DNA, 1281 bp, Homo sapiens
atgggcgatatcgtcgggcgactgttccgcgaatttgctattaccctggcggtagcgattttgatctcagcggtggtgtcgctgaccctgacaccgatgatgtgcgcgcggatgctcagccaggagtcgttgcgtaaacagaaccgcttctcccgtgcctcggaaaaaatgttcgacaggataatcgccgcctatggtcgtggactggcgaaagtgctgaatcatccgtggctgaccttaagcgtggcactcagcacgctgctgcttagcgtgctgctgtgggtgttcattccgaaaggtttcttcccggtacaggacaatggcattattcagggcactttgcaggcaccgcaatccagctcctttgccaatatggcccagcgacaacgccaggtcgcggacgtgattttgcaggatccggcagtgcaaagcctgacctcatttgttggcgttgatggcactaacccgtcgctgaacagtgcacgtttacaaatcaacctcaaaccgttggatgaacgtgatgatcgggtgcaaaaagtcatcgcccgtctgcaaacggcggttgataaagtgccgggcgtcgatctctttctgcaaccaacgcaggatctgactattgatactcaggtcagccgcacccagtaccaatttaccttgcagggcccgtcactggatgcgctcaatacctgggtgccacagttgatggaaaaacttcagcaacttggccagctttttgaagttttccacgactgggcaggacaaaaggctgcgccagcccgttgggggatcagcatggcggatgtcgataacgccccttgtgcaacgcgtttgggcctcgcggcgctggataccattcgcctgaccagcagcgacggcggcgtggtgccgctaagctcaattgccaaaattgagcagcgttttgcgccgctctccatcaaccatctggatcagttcccggtaacgaccatctcctttaacgtgccggataactattcgctgggcgatgcggtgcaggcgattatggacaccgaaaagacgctgaatctgccggtggatatcaccacgcagttccagggcagcaccctcgccttccagtcggcgctgggcagcactgtctggctgattgtcgcggcggtggtggcgatgtatatcgtgctcggcattctgtacgagagctttattcacccgatcaccattctctcgacgctacccaccgcaggggttggcgcactgctggcgttgctgattgctggtataatatacagtgtagccatcatctaa

SEQ ID NO: 119011 - DNA, 1002 bp, Homo sapiens
ctacgatttcacccacgaactgttaaccacactggaagttgacgatccggcgatggtagcaaagcagatggaactggtgctggaaggctgtttaagccgaatgctggtgaatcgtagccaggcggtcgtttcccggaaggctatccggtcgcggttgtctcttccgtaaaactcgatacccagcgcgcttatactgtgattcaggcgcgtccgactgcagggctgcaacgtttgcgttatctgctgctgctgtggggggcagatcgtaacggcgctaacccgatgacgccggaagaggtgcatcgtgttgctaatgaacgtctgatgcagatgatgccgcagacgcgatggggccaaagttacctgaaccggcaacggggatcgctcagccgactccgcagcatccggcgacaggaaatgcagctactgcgcctgctgcgccgacacagcctgctgctaatcgctctccacaaagggctacgccgccgcaaagtggtgctcaaccgcctgcgcaggatccccctgctgcttatcgtgctgctgtgggtgttcattccgaaaggtttcttcccgggacaggacaatggcattattcagggcactttgcaggcaccgcaatccatctcctttgccaatatggcccagctacaacgccaggtcgcggacgtgattttgcaggatccggcagtgcaaagcctgacctcatttgttggcgttgatggcactaacccgtcgctgaacagtgcacgtttacaaatcaacctcaaaccgttggatgaacgtgatgatcgggtgcaaaaagtcatcgcccgtctgcatacggcggtagataaagtgccgggcgtcgatctctttctgcaaccaacgcaggatctgactattgatactcagggcagccgcacccagtaccaatttaccttgcatgccacgtcactggatgctctcaacacctgggtgccacagttgatggaaaaaattccagcaactgccaaaactttctga

SEQ ID NO: 119012 - DNA, 291 bp, Homo sapiens
atgaacccggttgatcgtccactattagatattggcttaacgcgattagaattcttgcgtatatcaggaaaaggccttgcatggtctaacaattgcccctgcgttactgtcacttttgggttgcaaacaggaagatattgatagcggcacagtagggttgataaatacccccaaaggggtgctggtgacccagcgagcgcgatgcacgggttgccaccgctgtgaaatctcttgtaccaacttcaacgatggctcagtagggacattcttctcccgcatcaaaccccatct

SEQ ID NO: 119013 - DNA, 306 bp, Homo sapiens
atgaaaaattttgaagttctgcagccactacagaactccctttccggtctaccgctatgggtatctgaacgtatattgcagcagataaatcagttaacccactacgagccagtgatcggcatcatgggtaaaactggggcgggaaagagtagcctttgcaatgccctgtttgccggtgaagtatcgccggtcagcgatgtagcgggctgtacacgtgatcctttacgctttcgcctgcagattggagaacactttatgaccatcgtggatctggccgggcgtgggcgaaagtggggttcgggataa

SEQ ID NO: 119014 - DNA, 2775 bp, Homo sapiens
ctatatacagacactaaggacataatccccgcctcggcagaggcgcgatatctgtcgggaggagttcattaggatagaggctctgccaattacacggcccgcacagaaaaaggcatactccgcaaagaccatcactaccagccagatccccatatccgggattagccccaaaaccgcgagcgccagcgtcatcatggcaaagctgccaatcaccaatggacgccgtccggcagtgtttaaccacagcatcggcggaatacagccgagcataaagaacaggctaatcaccacattccctagtgccgcgtttttgccaacccccaatcccaacaaaccaacgatttgcgggccaaaggtgtaaatggcgaacattgggatcacctggcaggtccagatggcggcaacaaacagaacaaaaggaaaatggcggcgattaaacagatcgcgaaaacgggtttgctgcggctgctcttcatcgaaagccaccggttcgccaaacagtttgatcatcatctcttcgcactcttttactcgccctttgcgtaataaccagcggggagattcaggcagttcgaatcgaccaatcaaaatcaacaaacaggggatcgccgcgctacccagcatccagcgccagccgccttccacatcataaagccagtagccgaccagatcggcacaggtcgcgccgacataccacatcgcggcaatagaccatcgctgcagtggatttggatccagacattcgctaactgtaaaatcgcgtcctacgatcgatacgcgccaacgaaatcgttctgttgtcgcatcatcttgttgcataattagaccgtagcctaagccctgctcgtcctgtgagtatccaatagtcaccgcggccaatttatagcgaacctgtccctggcgagtcaggaagggcctcgatgctgccgaaacctggaaattgttcacccgaccatcttcttccgtcactttgacatccagcgtgccctgaacagactgattgaggtcatcaataataaacgggcctggcgggacttttttctggtaaatgacgcggcctgattgactgatcgtcaccgtggcattggtctgtgcaataccgctaatttgtggggcgtagccacgcagctcccacggtaacattcgatcgtcactcgccagtgccgcgccggtataagaaaaaccatcgaaaatattggaactgaaatcggtttcgccgagggttaacttagagccacgcgaggagccggtcgtctggatggcatccggaccgtacttctctttgatggcgctcaggcgctcggcaacgtaattcagtgcctcatcccaggaaacaggttcgagtttgccgccacgctggcgacggatcatgggggttttcaggcgcggggtcaggatctgggtatcgttaatgaagtcccagccataataacccttcagacacagggtaccctggttggttttcccctgcgctgcctccgcccggacgattttgccgttatcgacgaccaggttgattttgcaaccgcttaacacatcgacgctaacatcagtcaacagcaagggttcttcttcagtccacggataacgcccttgcaaatcagccgtaatatttttcgctgtcaccagattaatcacttcggcaattcgcaacgtaacggggccgcgagtccccagatgccaggctccatcggcaaaacggaaaggcaggacaaaatcgacaccgttaacctgattatctggcatccaggcactaccgcctttcaacacgccgtgtcctcccgcgcggaatccttgttcaggcgcagcagaaaatgcaacctgagcatacagttcaccatcgcgtaagttcatcttccagtcgggtggcaccagcggctggaatacggtcagtgattgtttaggccaccaggcgttaccgcgcagacgaataccgtcccagcgaccatttacccgaaccgggccaatctcaccagcatgtaaatcgcctttaaagaggaaataggtaggatcgcgcccatcgacgctaaattttaaggttgatggcggtaacacactgccgccagtgaacagcgtttgcccggcgtccagtgacagcgcgccgctaaaggagggatgctgtgcgtcacgtacccagacgatgggctttcgagctttagcgctcgagtgcgcttgatagcaggccaatcttgtacttaactgtttcgcaacttgataggagacttcggtcatgttgccgtagttgccagagaatttgatgctgtcgaacgggaccatcatcgctgcggtcgctttgttcagttcttcgactttagtgccatccgggagcgtgacggtgtaacgcccgctttttgatgactgggtttcaaagaagcgaccgacttcagaacttggtgatgcggtagtcgcaacacccgggatctcaactttcttcgcggcttcgccaccggcagccagagctgcacgtcctgcttcggaatctgccgggatcacatccgggctctggacgatacgtttcttagcatcttttttatagatgaatgcagtaatacgctggttgccgccctggttggcatcgatttgacgaacgatgtagaaagagtaggcacctttcgcttttgccgctttggtgatggcatcattgacttctggctggctacgatagaagcctgtcgtgctcgagagccgtggcgcgcatagccgcttcgacttcccggatcgtgatgatgaaaactggctgtgccactccctgtatctgccagagtcggaatccat

SEQ ID NO: 119015 - DNA, 308 bp, Homo sapiens
tcacttgaggtgatctggacggttccagacacagggctttcctttgtcacctccctgtggagttgaagacagcgctgatgttcccggtgacgttgacacgagcactgatggaaacggcgtatgaacggctgtttctgccaattccgtaccgaaagccgtggcgcgcatagcgcttcgacttcccggatcggatgatgaaaactggctgtgcactccctgtatctgccagagtcggaatccatgacgcgccgaagcgtcaacatgaacccgaaactgcgcccggcattcccgccgaagattcgtactta

SEQ ID NO: 119016 - DNA, 1132 bp, Homo sapiens
atggcgagcactactacgcaccatcacagcgactcgctccttgcagtcagcaacaaccgtcgagtgtatagtctcatctcgtgccgtgacacagtgtacgtcacacgcaggctgtcagagacatacaggacagattatggtggctccttcacagcgaagacagctgcgagacgtacgttgcacaatgtagagtacgggcggcaaaacacgtggcccggaaaacggcttatttgggcggggaaaaatgaacctttgcctttaaccccggaggatttggattaccgcttcccttggcaaatcgccgaaaattctggggtgctgacttgcttgattgaggcccagaagcagtgcagcaaaaaagttccgatagtcagcaaactggaaaatgataccgctgcccgtcatgaactctttattgctgagtggcgcaagcaatgcagcgaaaagaaagcgcaggcgaagggctggcggcaatggctgacggaagaaatgcagtggtcagtgccagaaggtaacttctgggatgatgaaaaattacagcgtcgccttgcctctcgcctcgatcgctgggtaagtctgatgcggatgcacggtggtgcacaagcagaaatgattgccagtgcacccgaagagattcgcgatctgttcagtaaacgtatcaagttgatggccccgttattaaaagcctggaaaggtgcgctgaaggcagaaaacgctgtcgatttttcgggccttaatcatcaggcgattgtgattctggagaaaggtcgctttatcagcccgtggaagcatattctggttgatgaatttcaggatatctcgccgcagcgggcagcgttgttagcggcattacgcaagcaaaacagtcagacgacgttgttcgctgttggtgatgactggcaggcgatttaccgattcagcggtgcgcaaatgtcgctcaccaccgctttccatgaaaactttggtgaaggcgaacgctgtgatttagacacgacttaccgttttaacagtcgtatcggtgaggtggcaaaccggtttattcagcagaacccaggccagctgaaaaagccgctaaacagcttaaccaatggagacaaaaaagccgtcacgttattggatgagagtcaacttg

SEQ ID NO: 119017 - DNA, 1602 bp, Homo sapiens
aaaattggggggttaaggtgggtttaacccccccggggggaccccaaaaaagggccccgggtttctttgaaaaaaatttagagggtgggcccgattttccccccggggaaaaagggaatccattgcggtgggtctccggcgggttctgtggttgtttcgggtaatctccgtcaaaaagatggcagatacagcttttactgtgcggttatcgttaagaaagttgacgcgaaaactcgcgccaaagtcggcattaacgaactggtgcgtaccatcgactaaaagtatgcacacgggcagcacgacgctgcccgatttttttgcagggatgagcgatgatttcacgccgccgatttttgcaggctactgccgcgacgatagccacgagctcaggtttcggttatatgcattactgtgagccaggctggtttgaattaatccgtccccgcctcgccttttttaaagacaacgcagcaccattcaaaattctttttctggccgatctccattactctcgttttgttcctttaagcctgatttctgacgcgattgctcttggcatagaacaaaagcccgatttgatattactgggcggcgattacgtattatttgatatgtcgctgaatttttcggcgtttagtgacgtactctccccccttgccgaatgtgcgccgacgtttgcctggttcggcagccacgatacagccgtggttggtacagaaaaaatatccattaattggcgagtcgttgaactcaccgggcctaacggggttgtttacccagggtacggtgatcgcctacgccaacaggccattcgaactggtaggcactggtgacttatggagcggacaatgcaaatcggcttccgccagcgaaaccaatctgtcaagactggtgctggcgcataactcctgcagcaaagaagtcatgcgtgatgaaccctgcgatctgatgctgggcagtcatactcaccgctggcaactgagcgtaccgatggctggagaacctttttgccatgtcgcagatgaacgttacgttctcggattaaatgccttttgcgaaagacacatatacacaatccccagggggggcaagaggatcccccaaacttttgctgccgatctgccgggcaaaggcattactgttaatccagttcagagcaccatcactgaagaaaccttccagacgctgctggtcagtcgtgcgctggagaaattaggttataccgtcaacaaacccagcgaagtagattacaacgttggctacacctcgcttgcttccggcgatgcaaccttcaccgccgtgaactggacgccactgcatgacaacatgtacgaagctgccggtggcgataagaaattttatcgtgaaggggtatttgttaacggggcggcacaaggttacctgatcgataagaaaaccgccgaccagtacaaaatcaccaacattcgacaacttgaagatcccgagatcgccaaacttgtcgataccaacggcgacggaaaagcggatttaaccggttgtaaccctggcttgggcttcgaaggtgcgatcaaccaccaacttggcgcgtatgaactgaccaacaccgtgacgcataattag

SEQ ID NO: 119018 - DNA, 312 bp, Homo sapiens
atgcgtaaattaactgcactgtttgttgcctctaccctggctcttggcgcggctaacctggcccatgccgcagacaccactaccgcagcaccggctgacgcgaagccgatgatgcaccacaaaggcaagttcggtccgcatcaggacatgatgttcaaagacctgaacctgaccgacgcgcagaaacagcagatccgcgaaatcatgaaaggccacgcgtgaccagatgaaacgtccgccgctggaagaacgccgcgcaatgcatgacatcattgccagcgataccttcgataaagtaaaagctgaagcgca

SEQ ID NO: 119019 - DNA, 726 bp, Homo sapiens
ataaagaccatataaagggggttttagaggcacaaaattccctttccacccaggtttccttgtttttttgatcgttttttggctaaaattccaatatgcgaaacttgattcaaatatatcgttcacttttacaaaggcaatctgattgatgaatttcaaaagacataaaaatcaattggttataaattatctgtcgagatcgtgaactacggcacactttgcgctaccatcaggacgcgacaaaatggggaaagaagtgatgggaaaaaaagagaacgagatggcgcaggaaaaagagcgtccagccggaagccagagtctgtttcgcgggttgatgctgattgagattttgagcaactatccaaacggttgtccgttggcgcatctttcggagctggctggtttaaataagagtaccgtccatcgcttattgcagggattacagtcctgcggctatgtgaccaccgcgcctgccgcagggagttatcgcctgaccaccaaatttattgccgtcgggcagaaggcgctgtcttcgctgaatatcattcatatcgccgctccgcatcttgaggcactgaacatcgccactggtgaaaccattaacttctccagccgcgaagacgatcacgctattttgatttataagctggaacccacaaccgggatgctgcgaacccgtgcctatattggccagcatatgccgctctactgttccgcaatgggcaa

SEQ ID NO: 119020 - DNA, 915 bp, Homo sapiens
atgacgggcgtggccaccgcgcgggccagggggttgcggcggcccctttctgtgggacaagttcccccctttgcccggctgtggaagggtgtccaaacagtagagcggcatatgctggccaatataggcacgggttcgcagcatcccggttgtgggttccagcttataaatcaaaatagcgtgatcgtcttcgcggctggagaagttaatggtttcaccagtggcgatgttcagtgcctcaagatgcggagcggcgatatgaatgatattcagcgaagacagcgccttctgcccgacggcaataaatttggtgaaatacaaactaccatcagagaatactataaacacctctatgcaaataaactagaagatctagaagaaatggataaattcctggacacatacaccctcccaagactaaaccaggaagaagtcgaatccctgaatagaccaataacaggctctgaaattgaggcagtagttaatagcctaccaaccaaaaaaagcccaggaccagagagactgacagccgaattctaccagaggtacaaagaggagctggtaccattccttctgaaactattccaaacaacagaaaaagagggactcctccctaactcattttatgaggccagcgtcctcctgataccaaaacctggcaaagacacaacaaaaaaagaaaatttcaggccaatatccctgatgaacatcgatgtgaaaatcctcaataaaatattggcaaaccgaatccagcagcacatcaaaaagcttatccaccacaatcaagttggcttcatcattggggtgcaaggctggttcaacatatgcaaatcaacaaacgtaatctatcacgtaaacagaaccaatgacaaaaaccacgattatctcaatagatacagaaaaggccttcgatga

SEQ ID NO: 119021 - DNA, 1341 bp, Homo sapiens
atgaaaagaaatgaacaaagcctccaggaaatatggaactatgtgaaaagaccaaacctacgtttgattggtgtatctgaaagtgagggggaaattggaaccaagttggaaaacactcctcaggatattatccaggagaacttccccaacctagcaagacaggtcaacattaaaattcaggaaatacagagaacaccacaaagatactcctcaagaatagcaaccccaagacacataatcatcagattcaccaaagttgaaatgaaggaaaaaatgttaagtgcagccagagagaaagaaatacaaactaccttcagagaatactataaacacctctatgaaaataaactagaaaatctagaagaaatggataaattcctggacacatacaccctcccaagactaaaccaggaagaagttgaatctctgaatagaccaatgacaagttctgaaattgaggcagtaattaatagcctgccaaccaaaaaaagcccaggaccagatggattcacagccgaattctaccagaggtacgaagaggagctggtaccattccttctgagactattccaaacaatagaaaaggagggaatcctccctaactcattttatgaggccagcatcatcctgataccaaaacctggcagagacacaacaaaaaatgaaaatttcaggccaatatccctgatgaacattgatgcgaaaaccctcaataaaataatggcaaaccgaatccagcagcacagcaaaaagcttatccaccacaatcaggttggctttatttctgggatgcaaggctggttcaatatatgcaaatcaataaacataatccatcacataaacagaaccaatgacaaaaaccacatgattatctcaatagatgcagaaaaggcctttgacaaaattcaacaccccttcatgctaaaagctctcaataaactaggtattgatggaacacatctcaaaataataagagctatttttgacaaacccacagccaatatcatactcaatgggcaaaagctggaagcattccttttgaaaaccgacacaagacaaggatgccctctctcaccactcctattcaacgtagtattggaagttctggccagggcaatcaggcaagaaaaagaaataacgggtattcagataggaaaagaggaagcaccacagaagcagcagaggcttttctgtaggtactaccatggcaagagggctccacagcttctcatcactcacttggaagaggatgatgagtgggacatcatcaggtattataatgtcatgtctgaggaggaaatcaaaaggatgaaggagattgtgaagcccaaaattatataa

SEQ ID NO: 119022 - DNA, 3312 bp, Homo sapiens
cctccgctggtgatacacaggcaaacagggtctggagaggacctccagcaaactccaacagacctgcagctgagggtcctgactattagaaggaaaactaacaaacagaaaggacatccacaccaaaaccccatctctagcagaagacatgaaataactaagatcagagcagaactgaaggagacagagacacaaaaaacccttcaaaaaaaatcaatgaatcccaggagctggtttttttgaaaggatcaacaaaattgatagactgctagcaagactaataaagaaaaagagagagaagaatcaaatagacggcaataaaaaacgataaattgggatatcacccaccggatccccacagaaatagaaactatcatccagagaatacttataaacacctctacacaaataaacttagaaaatcctagaagaaatggataaattccttgacacatacaccctccccaagactaaacccaggaagaagttgaatcccttcagtagactaataacaggctctgaaattgaggcaataactaatagcctaacaaaccaaaaaaagtccaggaccagatggattcgacgagccgaattctaccagaggtacaaagaggagctggtaccattccttctgaaactattccagtcaatagaaaaagagggaatcctccctaattcattttaatgaggccagcatcatcctgatatcaaagcctggcagagacacaacaaaaaaagagaattttagaccaatatccctgatgaacatcgatgcaaaaatcctcaataaaatactggcaaaccaaatccagcagcacatcaaaaagcttatccaccaccatcaagttggcttcatccctgggatgcaaggctggttcaacatactcaaatcaataaacgtaatccatcatataaacagaaccaaagacaaaaaccacatgattatctcaatagaagcagaaaaggcctttgacaaaattcaacagccctttatgctaaaaactctcaataaactaggtattgatgggacatatctgacatatctcaaaataataagagctgtttatgaaaaacccacagccaatatcatactgaatgggcaaaaactggaagcattccctttgaaaactggcacaagacaaggatgccctctctcaccactcctattcaacgtagtgttgggaagttctggtcggggcaatcaggcaagagaaagaaataaagggtattcaattaggaaaagaggatgtcaaattgtccctgtttgcagatgacatgattgtatatttagaaaaccccatcgtctcagcccaaaatctccttaagctgataagcaacttcagcgaagtctcaggatacaaaatcaatgtgcaaaaatcacaagcattcctatacaccaataacagacagacagagagccaaatcatgagtgaactcccattcacaattgcttcaaagagaataaaatacctaggaatacaacttacaagggatgtgaaggacctcttcaaggagaactacaaaccactgctcaatgaaataaaagaggacacaaacaaatggaagaacattccatgctcatggataggaagaatcaatattgtgaaaatggccatactgcccaagactctcaatcagaaattctcatactggttcagagtcaacaaacactacattcaccagaggacttttcccctcaaagagacagaattcaacaccatagcaacgctttataatggtgcttctccagcacagcaccaaaaagcactggaaccaatggccatcaagcatcaggattgccacggttctgaagaattgccttttgcagtgctcttgtcaagtctaaacgaaaactctatcagggttatttgcctggtcagacagataggagggaagagggagtttcttggtgtccaggtggtccttaagacaaagccagaactggcatttccagtggagggaggactacaaggtcaaaggtggataagcaattacctctatgaaggaaacgggcagggagatgaaaaggagaaaagcaacacggaggataggaaaagcctttccatggagatgatgttccagccaagacaggaaggggtagaacgagccagcgaggccaagggcaggatgggggtgggcaaggatactgagaaacagctcctggaggaggagtcggccagggcacaggcctggaggcggaaatgtgctgggtgcatggtcacagaatccaggatgttattttggctttctggagacaagggcccacagttcgtcaccatgggtccagcagaaggcccagctagatctaagaatcaacacaaaaagattgaaagctttaaacacctgagtttggataattctagccaggaagagaccccaggaccaggccagtgtcattaccacctccagcaactcccctcagctccccacaaggaggcgaaagcaacccaacacaaacgtgtgtgcccaagcatctcctctcagtccttgaccccttcatctttactctctaaagatattactacagcaccttgcaaattgaatttaacaaaggacctatgtttgatgaatgaacagccatacagaaatgtgattggacacaaaggatctggcctaacggtgaaggacggagtggggaaacccagcaaaaccacagaattttttactgagtacttcagttacaagaaaagctatccaaaaaaaccctacaaatgcatccaaagacagcttctgctcatccagagccaagaagaactagcaggcaatcatgtgcagaggcctttagctttagagtttggggcgcttttttctcctggaggtgccagctggggttttggggacttgaaaagttacctggggctacagaacacagtgtccacgcacttggacaagctgcctcttctgggtgaaaggcacatgtcccaccagacacccatgagccatccttggcccctctctggaaccttacccctcacatcccataaatccccaaggactgtgcatccacctgctgaacatcaccaaagtccacttccaattccactcccagtgactgcaaagggggcctttgcctcggtgccaccattactattccctgctccacaaggattatcgaatgagggcagaagatgtcatgggtatattttgataaatatttcaggcattacaaacaatactgaaatatatgccagtcttgtaaccatcacactgcaacattttctgctgccttctgaagactgtggaaaagcccccttgcaagggagggtggaaggaagagagggagtttctcagaaagagaagagaaaaacctaa

SEQ ID NO: 119023 - DNA, 237 bp, Homo sapiens
tcaaccggttgaagatacttggttatcgacaccagctgccccgatggtggattcattaattgcgcgcgtaagagtaatggctcgcggtaatgccattactttgcctgtatgtggacgggatgtaaagttactcttgaagtgctccggggggatagtgttgagaagacctctcgggtatgggtcaggtattgaaacgtaccaggagcttgttactgaggacgccctggatgatctcat

SEQ ID NO: 119024 - DNA, 1755 bp, Homo sapiens
atgaaactcatggaaacacttaaccagtgcataaacgctggtcatgaaatgacgaaggctatcgccattgcacagtttaatgatgacagcccggaagcgaggaaaataacccggcgctggagaataggtgaagcagcggatttagttggggtttcttctcaggctatcagagatgccgagaaagcagggcgactaccgcacccggatatggaaattcgaggacgggttgagcaacgtgttggttatacaattgaacaaattaatcatatgcgtgatgtgtttggtacgcgattgcgacgtgctgaagacgtatttccaccggtgatcggggttgctgcccataaaggtggcgtttacaaaacctcagtttctgttcatcttgctcaggatctggctctgaaggggctacgtgttttgctcgtggaaggtaacgacccccagggaacagcctcaatgtatcacggatgggtaccagatcttcatattcatgcagaagacactctcctgcctttctatcttggggaaaaggacgatgtcacttatgcaataaagcccacttgctggccggggcttgacattattccttcctgtctggctctgcaccgtattgaaactgagttaatgggcaaatttgatgaaggtaaactgcccaccgatccacacctgatgctccgactggccattgaaactgttgctcatgactatgatgtcatagttattgacagcgcgcctaacctgggtatcggcacgattaatgtcgtatgtgctgctgatgtgctgattgttcccacgcctgctgagttgtttgactacacctccgcactgcagtttttcgatatgcttcgtgatctgctcaagaacgttgatcttaaaggtagccaatttgatcaagtggaagaaagggtatcagtgattgaagatcaaatgagtgagatgaagcgaaaagagaactttagagaaaaaagagtaaaaagaaatgaacaaagcctccaagaattatggcactatgtgagaagaccaaatctacgtcggattggtgtgcctgagagtgacggggagaatggaaccaagttggaaaacactcttcaggatattgtccaggagaacctccccaacctacctggcagagacacaacaaaaaaagagaattttagaccaatatccctgatgaacattgatgcaaaaatcctcaataaaatactggcaaaccaaatccagcagcacatcaaaacgtttatccaccgcgatcaagttggcttcatccctgggatgcaaggctggttcaacatacacaaatcagtaaacgtaatccatcatataaacagaaccaaagacaaaaaccacatgattatctcaatagatgcagaaaaggccttcgacaaaattcaacaacacttcatgctaaaaactctcaataaactaggtattgatggaatgtatctcaaaatagtaagagctatttatgacaaacttacagccaatatcatactgaatgggcaaaaactggacgcattccctttgaaaactggcacaagacagggatgccctctctcaccactcctattcaacacagtgttggaagttctggccagggcaatcaggcaggagaaagaaataaagggtattcaattaggaaaagaggaagtcaaattgtccctctttgcagatgacatgactgtatatttagaaaatcccatcgtctcagcccaaaatctccttaagctgataagcaacttcagcaaagtctcaggataa

SEQ ID NO: 119025 - DNA, 1449 bp, Homo sapiens
  misc_feature (1)...(1449): n = a,t,c or g
atgaaactcatggaaacacttaaccagtgcataaacgctggtcatgaaatgacgaaggctatcgccattgcacagtttaatgatgacagcccggaagcgaggaaaataacccggcgctggagaataggtgaagcagcggatttagttggggtttcttctcaggctatcagagatgccgagaaagcagggcgactaccgcacccggatatggaaattcgaggacggcgacgtgctgaagacgtatttccaccggtgatcggggttgctgcccataaaggtggcgtttacaaaacctcagtttctgttcatcttgctcaggatctggctctgaaggggctacgtgttttgctcgtggaagaagacagatggatcttgagaatgacagtggactattgtaagcttaaccaagtggtgattccaattgcagctgctgtatcagatgtggtttcattgcttgagcaaattaacacatctcctggtacctggtatgcagccattgacttggcaaatgcctttttctccattcctgtccataaggcccagcagaagcaatttgccttcagctggcaaggccagcaatatacctttactgtcctacctcagtggtatatcaactctccagctttgtgtcataatcttattcggagagaccttgattgcttttcgcttccactagatatcacactggtccattacattgatgacattatgctgattggatccanagctccggtgccttctctggtgtctttttctgcggggctcacccagaagcctttccccagtgatgggggcgttgtcctctttaacaaagtgctggtgaacgacggggatgtttacaaccccagcaccggtgagtgtttgaacggaactggtactgtgtcctcctcctaccccaacgcagcgtcccgtgggctcagggaggacgccaccctggagcagatgcccgagtgggcctgcactcctctgcccgactctgtgggctttcacgtagaacgtgtcccagctcgagggctgcaggctgcatgggctatcagagatgccgagaaagcagggcgactaccgcacccggatatggaaattcgaggacgggttgagcaacgtgttggttatacaattgaacaaattaatcatatgcgtgatgtgtttggtacgcgattgcgacgtgctgaagacgtatttccaccggtgatcggggttgctgcccataaaggtggcgtttacaaaacctcagtttctgttcatatagatcaggatctggctctccaggggctacgtgttttgctagtggaaggggagaccaactgtttcttcgaaaaagcccctttatctaagctcaccccgggcccatttagcaccacaagcgacagtttctttgaattttctgatgagtccagcatttctcatgcttcagtccgtgatggtatggggttatttcccaggaactag

SEQ ID NO: 119026 - DNA, 1704 bp, Homo sapiens
atgaaactcatggaaacacttaaccagtgcataaacgctggtcatgaaatgacgaaggctatcgccattgcacagtttaatgatgacagcccggaagcgaggaaaataacccggcgctggagaataggtgaagcagcggatttagttggggtttcttctcaggctatcagagatgccgagaaagcagggcgactaccgcacccggatatggaaattcgaggacgggttgagcaacgtgttggttatacaattgaacaaattaatcatatgcgtgatgtgtttggtacgcgattgcgacgtgctgaagacgtatttccaccggtgatcggggttgctgcccataaaggtggcgtttacaaaacctcagtttctgttcatcttgctcaggatctggctctgaaggggctacgtgttttgctcgtggaagccctgtggctgcaggagcgccaggcccagtttcggcactcgctgcccctgcagagcttcctgctgaaacctgtccagcgcattctcaagtcccatttgctgctgcagaccaagacttgggccaccacttgtccaataaagtacatcccagacgccacacctgctgtgtcccgagagtctccagatgggggcatcagggctttgcagaactttcagcggtataccggcatacagcatgtgcatcgcataggaatggcggaacgtatgtggtgtgaccggaacagagaacgtcacaccgtcagcagcagcggcggcaaccgcctccccaatccagaccgttcagctggatattacggcctttttaaagaccgtaaaggggggtatcctctagagaaggacgtggggttcatgccccaagatgtggttcggcacctttcatctgacgaaaaatccgtttattctacactgactattccgaacgttcagcagtttatcgatgaaggcaattatacatccggcgacaaccatacgctgagagaccctcactacgttgaagacaaaggccataaataccttgtattcgaagccaacacgggaacagaaaacggataccaaggcgaagaatctttatttaacaaagcgtactacggcggcggcacgaacttcttccgtaaagaaagccagaagcttcagcagagcgctaaaaaacgcgatgctgagttagcgaacggcgccctcggtatcatagagttaaataatgattacacattgaaaaaagtaatgaagccgctgatcacttcaaacacggtaactgatgaaatcgagcgcgcgaatgttttcaaaatgaacggcacatggtacttgttcactgattcacgcggttcaaaaatgacgatcgatggtattaactcaaacgatatttacatgcttggttatgtatcaaactctttaaccggcccttacaagccgctgaacaaaacagggcttgtgcttcaaatgggtcttcccccaaacgatgtgacattcacttactctcacttcgcagtgccgcaagccgaggtaatggtaagtggccaacactgctacagctttgcccatcgactcctgccagggtctgtgaagatggtgcaagtgtggagaggtatccccctgacctcaatcgagctcctggaggacttggagaacagcagcagcgccgggggtattgccgagtgcttcgtgcagaggagcgaggattttgacatctacacattgtactgcatgaactacccgaggtga

SEQ ID NO: 119027 - DNA, 2232 bp, Homo sapiens
  misc_feature (1)...(2232): n = a,t,c or g
atgaaactcatggaaacacttaaccagtgcataaacgctggtcatgaaatgacgaaggctatcgccattgcacagtttaatgatgacagcccggaagcgaggaaaataacccggcgctggagaataggtgaagcagcggatttagttggggtttcttctcaggctatcagagatgccgagaaagcagggcgactaccgcacccggatatggaaattcgaggacgggttgagcaacgtgttggttatacaattgaacaaattaatcatatgcgtgatgtgtttggtacgcgattgcgacgtgctgaagacgtatttccaccggtgatcggggttgctgcccataaaggtggcgtttacaaaacctcagtttctgttcatcttgctcaggatctggctctgaaggggctacgtgttttgctcgtggaaggtaacgacccccagggaacagcctcaatgtatcacggatgggtaccagatcttcatattcatgcagaagacactctcctgcctttctatcttggggaaaaggacgatgtcacttatgcaataaagcccacttgctggccggggcttgacattattccttcctgtctggctctgcaccgtattgaaactgagtttatgggcaaatttgatgaagataacaacgcaggaatggtccgggttctgcaaccctttacatctgacgagaaaaaatccgttatttctacactgacctttcccggtaaacatttacggcgagacaaaagcctgacaacagcgcagggctgtgacaaaattaacaataaaactagcccagaaccaaccagcccggatctggctctgaaggggctacgtgttttgctcgtggaaggtaacgacccccagggaacagcctcaatgtatcacggatgggtaccagatcttcatattcatgcagaagacactctcctgcctttctatcttggggaaaaggacgatgtcacttatgcaataaagcccacttgctggccggggcttgacattattccttcctgtctggctctgcaccgtattgaaactgagttaatgggcaaatttgatgaaggtaaactgcccaccgatccacacctgatgctccgactggccattgaaactgttgctcatgactatgatgtcatagttattgacagcgcgcctaacctgggtatcggcacgattaatgtcgtatgtgctgctgatgtgctgattgttcccacgcctgctgagttgtttgactacacctccgcactgcaatttttcgatatgcttcgtgatctgctcaagaacgttgatcttaaagggttcgagcctgatgtacgtattttgcttaccaaatacagcaatagtaatggctctcagtccccgtggatggaggagcaaattcgggatgcctggggaagcatggttctaaaaaatgttgaacctgaaaacggtgaagttggtaaagnaggatccccgcagttgataaatcaagaaaaaaaaatgtttagaatcaggaacagatcatatattgaccgagattctgagtatctcttgcaagaaaatgaaccagatggaactttagaccaaaaattattggaagatttacaaaagaaaaaaaatgaccttcggtatattgaaatgcagccttttcccttagtctcctcttcccggtgggtggtaaaaagaggtgaattgacagcctatgttgaagacactgtgcttttctcaagaaggacatccaaacagcaagtctacttctttctctttaacgatgtgctcattatcaccaaaaagaagaggaggagcgactcaagccttcgcgaaggagataaccaaaaagcatacaaagaaacgtacggcgtctctcatattacacgccatgatatgctgcagatccctaaacagcagcaaaacgaaaaataccaagtgcctcaattcgatcaatcaacgattaaaaatattgagtctgcaaaaggacttgatgtatcagacgcaggaatggtcccggttctgcaacctttacatctgacggaaaaatccggttattctacactgactattccggtaaacttacggcaaacaagcctgacacagcgcaaggtaatgtgtcaaaatctggtgacacacttaaaatcaacggagtgggaaaaacacaaaacgattgttgacggagaacggaaaacatatcagaaacgttcagcagtttttcggatgaagggaattttacattcggcgacaaccatacgctga

SEQ ID NO: 119028 - DNA, 1545 bp, Homo sapiens
atgaaactcatggaaacacttaaccagtgcataaacgctggtcatgaaatgacgaaggctatcgccattgcacagtttaatgatgacagcccggaagcgaggaaaataacccggcgctggagaataggtgaagcagcggatttagttggggtttcttctcaggctatcagagatgccgagaaagcagggcgactaccgcacccggatatggaaattcgaggacgggttgagcaacgtgttggttatacaattgaacaaattaatcatatgcgtgatgtgtttggtacgcgattgcgacgtgctgaagacgtatttccaccggtgatcggggttgctgcccataaaggatctggctctgaaggggctacgtgttttgctcgtggaagtcaggcaccgtgtatgaaatctaacaatgcgctcatcgtcatcctcggcaccgtcaccctggatgctgtaggcataggcttggttatgccggtactgccgggcctcttgcgggatatcgtccattccgacagcatcgccagtcactatggcgtgctgctagcgctatatgcgttgatgcaatttctatgcgcacccgttctcggagcactgtccgaccgctttggccgccgcccagtcctgctcgcttcgctacttggagccactatcgactacgcgatcatggcgaccacacccgtcctgtggatctacccactagggaaagataaagccgacctacagatttcggacctcctggcccacgccttcttccgcgaggagcgcggtgtgcacgtggaactagcggaggaggacgacggcgagaagccgggcctcaagctctggctgcgcatggaggacgcgcggcgcggggggcgcccacgggacaaccaggccatcgagttcctgttccagctgggccgggacgcggccgaggaggtggcacaggagatgaaccagggcctccccctgcggcgacaccactcagatctctactcgcactactttgggggtcttgcggaaacggtgctggtcgtcagatctatgtccaccttgctcaactatgactatgtgtgggatacggtcttccaccccagtggggccatagaaatactattctatgccacgggctacatcagctcggcattcctctttggtgctactgggaagtacgggaaccaagtgttagagcacaccctgggcacggtccacacccacagcgcccacttcaaggtggatctggatgtagcaggtgatgctcttcaaaaagcctttacagataaagaggaattacttaagcagcaggcatctaaccttcatgagcagaaaaaagctggggtgatatttgaagctgaagaagttatcactcttttaacttctgtgcttaaaacgtcatctgcatcaagaactagtttaagctcacgacatcagtttgctcctggagcgacagtattgtataagggcgataaaatggtgcttaacctggacaggtctcgtgttccaactgagtgtatagagaaaattgaggccattcttaaggaacttgaaaagccagcaccctga

SEQ ID NO: 119029 - DNA, 1377 bp, Homo sapiens
atgaaactcatggaaacacttaaccagtgcataaacgctggtcatgaaatgacgaaggctatcgccattgcacagtttaatgatgacagcccggaagcgaggaaaataacccggcgctggagaataggtgaagcagcggatttagttggggtttcttctcaggctatcagagatgccgagaaagcagggcgactaccgttcccggatatggaaattcgaggacgggttgagcaacgtgttggttatacaattgaacaaattaatcatatgcgtgatgtgtttggtacgcgattgcgacgtgctgaagacgtatttccaccggtgatcggggttgctgcccataaagtttctgttcatcttgctcaggatctggctctgaatgggctacgtgttttgctcgtggaaggtaacgacccccagggaacagcctcaatgtatcacggatgggtaccagatcttcatattcatgcagaagacactctcctgcctttctatcttggggaaaaggacgatgtcacttatgcaataaagcccacttgctggccggggcttgacattattccttcctgtctggctctgcaccgtattgaaactgagttaatgggcaaatttgatgaaggtaaactgcccaccgatccacacctgatgctccgactggccattgaaactgttgctcatgactatgatgtcatagttattgacagcgcgcctaacctgggtatcggcacgattaatgtcgtatgtgctgctgatgtgctgattgttcccacgcctgctgagttgtttgactacacctccgcactgcagtttttcgatatgcttcgtgatctgctcaagaacgttgatcttaaaggctggcagcctgataggcagattccatttcatgatgtcagattcccacctcctgtaggttataataaagatataaatgaaagtgatgaagttgagatgtgtccggagttttttccttctggtgggttcgttgtctcactgacttcaggagtgaagccgcagaccctcgcagtgagtgttacagctcttaaaggcagcgcgtccggagttgttcatttctcccggtgggtttgtggtctcgctggcttcaggagtaaagctgcagaccttcagagaagctcagccagcctcacctctcactggcattcaccacgggactttgaggcacctagcctgagggagctcatccagacagcagcccagcagccgagagggctccagagggctccagcagcccagagggagctcatcccagacaatcaagaggaaaagaggggaagtgagaaagagacggagacctgctatcgtggccaacggtcccacgaggagggaacagtggtccacatgcaggatccagctctctga

SEQ ID NO: 119030 - DNA, 2262 bp, Homo sapiens
atgaaactcatggaaacacttaaccagtgcataaacgctggtcatgaaatgacgaaggctatcgccattgcacagtttaatgatgacagcccggaagcgaggaaaataacccggcgctggagaataggtgaagcagcggatttagttggggtttcttctcaggctatcagagatgccgagaaagcagggcgactaccgcacccggatatggaaattcgaggacgggttgagcaacgtgttggttatacaattgaacaaattaatcatatgcgtgatgtgtttggtacgcgattgcgacgtgctgaagacgtatttccaccggtgatcggggttgctgcccataaaggtggcgtttacaaaacctcagtttctgttcatcttgctcaggatctggctctgaagggctacgtgttttgctcgtggaagtgcataaacgctggtcatgaaatgacgaaggctatcgccattgcacagtttaatgatgacagcccggaagcgaggaaaataacccggcgctggagaataggtgaagcagcggatttagttggggtttcttctcaggctatcagagatgccgagaaagcagggcgactaccgcacccggatatggaaattcgaggacgggttgagcaacgtgttggttatacaattgaacaaattaatcatatgcgtgatgtgtttggtacgcgattgcgacgtgctgaagacgtatttccaccggtgatcggggttgctgcccataaaggtggcgtttacaaaacctcagtttctgttcatcttgctcaggatctggctctgaaggggctacgtgttttgctcgtggaagaaccccccagcgcgcctaacctgggtatcggcacgattaatgtcgtatgtgctgctgatgtgctgattgttcccacgcctgctgagttgtttgactacacctccgcactgcagtttttcgatatgcttcgtgatctgctcaagaacgttgatcttaaagggttcgagcctgatgtacgtattttgcttaccaaatacagcaatagtaatggctctcagtccccgtggatggaggagcaaattcgggatgcctggggaagcatggttctaaaaaatgttgtacgtgaaacggatgaagttggtaaagctgccccgatggtggattcgttaattgcgcgcgtaggagtaatggctcgcggtaatgccattactttgcctgtatgtggtcgggatgtgaagtttactcttgaagtgctccggggtgatagtgttgagaagacctctcggtgtgacaatctaaaaacttgtcacacttcacatggatctgtcatggcggaaacagcggttatcaatcacaagaaacgtaaaaatagcccgcgaatcgtccagtcaaacgacctcactgaggcggcatatagtctctcccgggatcaaaaacgtatgctgtatctgttcgttgaccagatcagaaaatctgatggcaccctacaggaacatgacggtatctgcgagatccatgttgctaaatatgctgaaatattcggattgacctctgcggaagccagtaaggatatacggcaggcattgaagagtttcgcggggaaggaagtggttttttatcgccctgaagaggatgccggcgatgaaaaaggctatgaatcttttccttggtttatcaaacgtgcgcacagtccatccagagggctttacagtgtacatatcaacccatatctcattcccttctttatcgggttacagaaccggtttacgcagtttcggcttagtgaaacaaaagaaatcaccaatccgtatgccatgcgtttatacgaatccctgtgtcagtatcacccccttaccattgaaaaagtaatgaagccgctgatcacttcaaacacggtaactgatgaaatcgagcgcgcgaatgttttcaaaatgaacggcaaatggtacttgttcactgattcacgcggttcaaaaatgacgatcgatggtattaactcaaacgatatttacatgcttggttatgtatcaaactctttaaccggcccttacaagccgctgaacaaaacagggcttgtgctgcaaatgggtcttgatccaaacgatgtgacattcacttactctcacttcgcagtgccgcaagccaaaggcaacaatgtggttatcacaagctacatgacaaacagaggcttcttcgaggataaaaaggcaacatttgcgccaagcttcttaatgaacatcaaaggcaataaaacatccgataaactaccgcattaa

SEQ ID NO: 119031 - DNA, 1753 bp, Homo sapiens
atgaaactcatggaaacacttaaccagtgcataaacgctggtcatgaaatgacgaaggctatcgccattgcacagtttaatgatgacagcccggaagcgaggaaaataacccggcgctggagaataggtgaagcagcggatttagttggggtttcttctcaggctatcagagatgccgagaaagcagggcgactaccgcacccggatatggaaattcgaggacgggttgagcaacgtgttggttatacaattgaacaaattaatcatatgcgtgatgtgtttggtacgcgattgcgacgtgctgaagacgtatttccaccggtgatcggggttgctgcccataaaggtggcgtttacaaaacctcagtttctgttcatcttgctcaggatctggctctgaaggggctacgtgttttgctcgtggaaggtaacgacccccagggaacagcctcaatgtatcacggatgggtaccagatcttcatattcatgcagaagacactctcctgcctttctatcttggggaaaaggacgatgtcacttatgcaataaagcccacttgctggccggggcttgacattattccttcctgtctggctctgcaccgtattgaaactgagttaatgggcaaatttgatgaaggtaaactgcccaccgatccacacctgatgctccgactggccattgaaactgttgctcatgactatgatgtcatagttattgacagcgcgcctaacctgggtatcggcacgattaatgtcgtatgtgctgctgatgtgctgattgttcccacgcctgctgagttgtttgactacacctccgcactgcagtttttcgatatgcttcgtgatctgctcaagaacgttgatcttaaagggttcgagcctgatggtatcggcacgattaatgtcgtatgtgctgctgatgtgctgattgttcccacgcctgctgagttgtttgactacacctccgcactgcagtttttcgatatgcttcgtgatctgctcaagaacgttgatcttaaagggttcgagcctgatgtacgcgcattgttttcggcgggcagcggcttaggtgatccgatcgaggcgcaggcgctgatcgccacctacggccgtgatcgtgatcctggccggccgttgtggttggggtcggtcaagtcgaacatcggtcatacgcaagcggcggcgggtgtggctggtgtgatcaagatggtgatggcgatgcggcacgggcagctgccacgcacgttgcacgtggaatcgccgtcgccggaggtggattggtcggcggggacggttcaactccttacggagaacacgccctggcccaggagtggtcgtgttcgtcgggtgggggtgtcgtcgttcgggatcagtggtactaacgcgcacgtcatcctcgaacagcccccgggagtgccgagtcagtctgcggggccgggttcgggttctgtcgtggatgttccggtggtgccgtggatggtgtcgggcaaaacacccgaagcgctatccgcgcaggcaacggcgttgatgacctatctggacgagcgacctgatgtctcctcgctggatgttgggtactcgctggcgttgacacggtcggcgctggatgagcgagcggtggtgctggggtcggacgtgaaacttgttgtgcggtgtgaagcgctgtctgccggtcatgaggcttctgggttggtgaccggatctgtgggggctcggggccgcatcgggtttgtgttttccggtcaaggtg

SEQ ID NO: 119032 - DNA, 2370 bp, Homo sapiens
atgaaactcatggaaacacttaaccagtgcataaacgctggtcatgaaatgacgaaggctatcgccattgcacagtttaatgatgacagcccggaagcgaggaaaataacccggcgctggagaataggtgaagcagcggatttagttggggtttcttctcaggctatcagagatgccgagaaagcagggcgactaccgcacccggatatggaaattcgaggacgggttgagcaacgtgttggttatacaattgaacaaattaatcatatgcgtgatgtgtttggtacgcgattgcgacgtgctgaagacgtatttccaccggtgatcggggttgctgcccataaaggtggcgtttacaaaacctcagtttctgttcatcttgctcaggatctggctctgaaggggctacgtgttttgctcgtggaaggtaacgacccccagggaacagcctcaatgtatcacggatgggtaccagatcttcatattcatgcagaagacactctcctgcctttctatcttggggaaaaggacgatgtcacttatgcaataaagcccacttgctggccggggcttgacattattccttcctgtctggctctgcaccgtattgaaactgagttaatgggcaaatttgatgaaggtaaactgcccaccgatccacacctgatgctccgactggccattgaaactgttgctcatgactatgatgtcatagttattgacagcgcgcctaacctgggtatcggcacgattaatgtcgtatgtgctgctgatgtgctgattgttcccacgcctgctgagttgtttgactacacctccgcactgcagtttttcgatatgcttcgtgatctgctcaagaacgttgatcttaaagggttcgagcctgattcaattcgggaggatcgaaacggcagatcgcaaaaaacagtacatacagaaggagacatgaacatgaacatcaaaaaaattgtaaaacaagccacagttctgacttttacgactgcacttctggcaggaggagcgactcaagccttcgcgaaagaaaataaccaaaaagcatacaaagaaacgtacggcgtctctcatattacacgccatgatatgctgcagatccctaaacagcagcaaaacgaaaaataccaagtgcctcaattcgatcaatcaacgattaaaaatattgagtctgcaaaaggacttgatgtgtgggacagctggccgctgcaaaacgctgacggaacagtagctgaatacaacggctatcacgttgtgtttgctcttgcgggaagcccgaaagacgctgatgacacatcaatctacatgttttatcaaaaggtcggcgacaactcaatcgacagctggaaaaacgcgggccgtgtctttaaagacagcgataagttcgacgccaacgatccgatcctgaaagatcagacgcaagaatggtccggttctgcaacctttacatctgacggaaaaatccgtttattctacactgactattccggtaaacattacggcaaacaaagcctgacaacagcgcaggtaaatgtgtcaaaatctgatgacacactcaaaatcaacggagtggaagatcacaaaacgatttttgacggagacggaaaaacatatcagaacgttcagcagtttatcgatgaaggcaattatacatccggcgacaaccatacgctgagagaccctcactacgttgaagacaaaggccataaataccttgtattcgaagccaacacgggaacagaaaacggataccaaggcgaagaatctttatttaacaaagcgtactacggcggcggcacgaacttcttccgtaaagaaagccagaagcttcagcagagcgctaaaaaacgcgatgctgagttagcgaacggcgccctcggtatcatagagttaaataatgattacacattgaaaaaagtaatgaagccgctgatcacttcaaacacggtaactgatgaaatcgagcgcgcgaatgttttcaaaatgaacggcaaatggtacttgttcactgattcacgcggttcaaaaatgacgatcgatggtattaactcaaacgatatttacatgcttggttatgtatcaaactctttaaccggcccttacaagccgctgaacaaaacagggcttgtgctgcaaatgggtcttgatccaaacgatgtgacattcacttactctcacttcgcagtgccgcaagccaaaggcaacaatgtggttatcacaagctacatgacaaacagaggcttcttcgaggataaaaaggcaacatttgcgccaagcttcttaatgaacatcaaaggcaataaaacatccgttgtcaaaaacagcatcctggagcaaggacagctgacagtcaactaa

SEQ ID NO: 119033 - DNA, 1218 bp, Homo sapiens
atgaaactcatggaaacacttaaccagtgcataaacgctggtcatgaaatgacgaaggctatcgccattgcacagtttaatgatgacagcccggaagcgaggaaaataacccggcgctggagaataggtgaagcagcggatttagttggggtttcttctcaggctatcagagatgccgagaaagcagggcgactaccgcacccggatatggaaattcgaggacgggttgagcaacgtgttggttatacaattgaacaaattaatcatatgcgtgatgtgtttggtacgcgattgcgacgtgctgaagacgtatttccaccggtgatcggggttgctgcccataaagaaaggaaccagaatataagtagatacatttcaaacagattggctaggagagaatgccatgattcaccagaagaggggacaggaaacacgagaagtaaggagaggcttcaaggcagattgcccagccgaggactgactgagagccaggaacacctcctggacacaagaaaacagttctggtttgaagattttaaagatgggctgggccccatcctcaagtgtgacaatctaaaaacttgtcacacttcacatggatctgtcatggcggaaacagcggttatcaatcacaagaaacgtaaaaatagcccgcgaatcgtccagtcaaacgacctcactgaggcggcatatagtctctcccgggatcaaaaacgtatgctgtatctgttcgttgaccagatcagaaaatctgatggcaccctacaggaacatgacggtatctgcgagatccatgttgctaaatatgctgaaatattcggattgacctctgcggaagccagtaaggatatacggcaggcattgaagagtttcgcggggaaggaagtggttttttatcgccctgaagaggatgccggcgatgaaaaaggctatgaatcttttccttggtttatcaaacgtgcgcacagtccatccagagggctttacagtgtacatatcaacccatatctcattcccttctttatcgggttacagaaccggtttacgcagtttcggcttagtgaaacaaaagaaatcaccaatccgtatgccatgcgtttatacgaatccctgtctgcctcaaattaccagcgtatgcctgacttccgccggcgctttctgcaagtctggtgttatggagatcaacaagcagacttcaatgcgcctctcatacattga

SEQ ID NO: 119034 - DNA, 1212 bp, Homo sapiens
atgaaactcatggaaacacttaaccagtgcataaacgctggtcatgaaatgacgaaggctatcgccattgcacagtttaatgatgacagcccggaagcgaggaaaataacccggcgctggagaataggtgaagcagcggatttagttggggtttcttctcaggctatcagagatgccgagaaagcagggcgactaccgcacccggatatggaaattcgaggacgggttgagcaacgtgttggttatacaattgaacaaattaatcatatgcgtgatgtgtttggtacgcgattgcgacgtgctgaagacgtatttccaccggtgatcggggttgctgcccataaaggtggcgtttacaaaacctcagtttctgttcatcttgctcaggatctggctctgaaggggctacgtgttttgctcgtggaaggtaacgacccccagggaacagcctcaatgtatcacggatgggtaccagatcttcatattcatgcagaagacactctcctgcctttctatcttggggaaaaggacgatgtcacttatgcaataaagcccacttgctggccggggcttgacattattccttcctgtctggctctgcaccgtattgaaactgagttaatgggcaaatttgatgaaggtaaactgcccaccgatccacacctgatgctccgactggccattgaaactgttgctcatgactatgatgtcatagttattgacagcgcgcctaacctgggtatcggcacgattaatgtcgtatgtgctgctgatgtgctgattgttcccacgcctgctgagttgtttgactacacctccgcactgcagtttttcgatatgcttcgtgatctgctcaagaacgttgatcttaaaggtcaggcaccgtgtatgaaatctaacaatgcgctcatcgtcatcctcggcaccgtcaccctggatgctgtaggcataggcttggttatgccggtactgccgggcctcttgcgggatatcgtccattccgacagcatcgccagtcactatggcgtgctgctagcgctatatgcgttgatgcaatttctatgcgcacccgttctcggagcactgtccgaccgctttggccgccgcccagtcctgctcgcttcgctacttggagccactatcgactacgcgatcatggcgaccacacccgtcctgtggatctacccactagtcaattcaccatcttgttga

SEQ ID NO: 119035 - DNA, 1572 bp, Homo sapiens
tgtgacaatctaaaaacttgtcacacttcacatggatctgtcatggcggaaacagcggttatcaatcacaagaaacgtaaaaatagcccgcgaatcgtccagtcaaacgacctcactgaggcggcatatagtctctcccgggatcaaaaacgtatgctgtatctgttcgttgaccagatcagaaaatctgatggcaccctacaggaacatgacggtatctgcgagatccatgttgctaaatatgctgaaatattcggattgacctctgcggaagccagtaaggatatacggcaggcattgaagagtttcgcggggaaggaagtggttttttatcgccctgaagaggatgccggcgatgaaaaaggctatgaatcttttccttggtttatcaaacgtgcgcacagtccatccagagggctttacagtgtacatatcaacccatatctcattcccttctttatcgggttacagaaccggtttacgcagtttcggcttagtgaaacaaaagaaatcaccaatccgtatgccatgcgtttatacgaatccctgtgtcagtatcgaaagccggatggcttaagcatcgtctctctggaaaatcgactggatcatagagcggtaccagctgcctcaaagttaccagcgtatgccctgacttccgccgccgcttcctgcaggatgttcagaatgaaactcatggaaacacttaaccagtgcataaacgctggtcatgaaatgacgaaggctatcgccattgcacagtttaatgatgacagcccggaagcgaggaaaataacccggcgctggagaataggtgaagcagcggatttagttggggtttcttctcaggctatcagagatgccgagaaagcagggcgactaccgcacccggatatggaaattcgaggacgggttgagcaacgtgttggttatacaattgaacaaattaatcatatgcgtgatgtgtttggtacgcgattgcgacgtgctgaagacgtatttccaccggtgatcggggttgctgcccataaaggtggcgtttacaaaacctcagtttctgttcatcttgctcaggatctggctctgaaggggctacgtgttttgctcgtggaaggtaacgacccccagggaacagcctcaatgtatcacggatgggtaccagatcttcatattcatgcagaagacactctcctgcctttctatcttggggaaaaggacgatgtcacttatgcaataaagcccacttgctggccggggcttgacattattccttcctgtctggctctgcaccgtattgaaactgagttaatgggcaaatttgatgaaggtaaactgcccaccgatccacacctgatgctccgactggccattgaaactgttgctcatgactatgatgtcatagttattgacagcgcgcctaacctgggtatcggcacgattaatgtcgtatgtgctgctgatgtgctgattgttcccacgcctgctgagttgtttgactacacctccgcactgcagtttttcgatatgcttcgtgatctgctcaagaacgttgatcttaaagggttcgagcctgat

SEQ ID NO: 119036 - DNA, 1620 bp, Homo sapiens
atgaaactcatggaaacacttaaccagtgcataaacgctggtcatgaaatgacgaaggctatcgccattgcacagtttaatgatgacagcccggaagcgaggaaaataacccggcgctggagaataggtgaagcagcggatttagttggggtttcttctcaggctatcagagatgccgagaaagcagggcgactaccgcacccggatatggaaattcgaggacgggttgagcaacgtgttggttatacaattgaacaaattaatcatatgcgtgatgtgtttggtacgcgattgcgacgtgctgaagacgtatttccaccggtgatcggggttgctgcccataaaggtggcgtttacaaaacctcagtttctgttcatcttgctcaggatctggctctgaaggggctacgtgttttgctcgtggaaggtaacgacccccagggaacagcctcaatgtatcacggatgggtaccagatcttcatattcatgcagaagacactctcctgcctttctatcttggggaaaaggacgatgtcacttatgcaataaagcccacttgctggccggggcttgacattattccttcctgtctggctctgcaccgtattgaaactgagttaatgggcaaatttgatgaaggtaaactgcccaccgatccacacctgatgctccgactggccattgaaactgttgctcatgactatgatgtcatagttattgacagcgcgcctaacctgggtatcggcacgattaatgtcgtatgtgctgctgatgtgctgattgttcccacgcctgctgagttgtttgactacacctccgcactgcagtttttcgatatgcttcgtgatctgctcaagaacgttgatcttaaagggttcgagcctgatgcgcaggcgctgatcgccacctacggccgtgatcgtgatcctggccggccgttgtggttggggtcggtcaagtcgaacatcggtcatacgcaagcggcggcgggtgtggctggtgtgatcaagatggtgatggcgatgcggcacgggcagctgccacgcacgttgcacgtggaatcgccgtcgccggaggtggattggtcggcggggacggttcaactccttacggagaacacgccctggcccaggagtggtcgtgttcgtcgggtgggggtgtcgtcgttcgggatcagtggtactaacgcgcacgtcatcctcgaacagcccccgggagtgccgagtcagtctgcggggccgggttcgggttctgtcgtggatgttccggtggtgccgtggatggtgtcgggcaaaacacccgaagcgctatccgcgcaggcaacggcgttgatgacctatctggacgagcgacctgatgtctcctcgctggatgttgggtactcgctggcgttgacacggtcggcgctggatgagcgagcggtggttcttgggtcggacgtgaacgttgttgtgcggtgtgacacgctgtctgccggtcatgaggcttctgcagttggtgaccggatctgtgggggctgggggcccatcgggtttgtgttttccggtcacggtggtcagtggctggggatgggccgggggctttaccgggcttttccggtgttcgctgctgccctttga

SEQ ID NO: 119037 - DNA, 1942 bp, Homo sapiens
atgaaactcatggaaacacttaaccagtgcataaacgctggtcatgaaatgacgaaggctatcgccattgcacagtttagtgatgacagcccggaagcgaggaaaataacccggcgctggagaataggtgaagcagcggatttagttggggtttcttctcaggctatcagagatgccgagaaagcagggcgactaccgcacccggatatggaaattcgaggacgggttgagcaacgtgttggttatacaattgaacaaattaatcatatgcgtgatgtgtttggtacgcgattgcgacgtgctgaagacgtatttccaccggtgatcggggttgctgcccataaaggtggcgtttacaaaacctcaatttctgttcatcttgctcaggatctggctctgagggggctacgtggtttgctcgtggaagacgccaagtcaacagccgatttggataccatcaagacacctgaaaccttatcatgggccgggtgccaaggaagagattccaggaggaccccgaggaccccccagttgcagccatgtcaagactgacactgaggaggaccccaactgtcacaagcaacacccattgaacacggccacccacctggggacagatcaagaagctgtcacagatggcagaagaaaacctgaagaaagtgggacaaccagtcacaacgaggattttgccgatttcggaaccaccatcaaacaggattttcgcctgctggggcaaaccagcgtggaccgcttgctgcaactctctcagggccaggcggtgaagggcaatcagctgttgcccgtctcactggtgaaaagaaaaaccaccctggcgcccaatacgcaaaccgcctctccccgcgcgttggccgattcattaatgcagctggcacgacaggtttcccgactggaaagcgggcaggattttgccgatttcggaaccacccaccaaacaggattttcgcctgttggggcaaaccagcgtggaccgcttgctgcaactctctcagggccaggcggtgaagggcaatcagctgttgcccgtctcactggtgaaaagaaaaaccaccctggcgcccaatacgcaaaccgcctctccccgcgcgttggccgattcattaatgcagctggcacgacaggtttcccgactggaaagcgggcagtgagcgcaacgcaattaattcaggcaccgtgtatgaaatctaacaatgcgctcatcgtcatcctcggcaccgtcaccctggatgctgtaggcataggcttggttatgccggtactgccgggcctcttgcgggatatcgtccattccgacagcatcgccagtcactatggcgtgctgctagcgctatatgcgttgatgcaatttctatgcgcacccgttctcggagcactgtccgaccgctttggccgccgcccagtcctgctcgcttcgctacttggagccactatcgactacgcgatcatggcgaccacacccgtcctgtggatctacccactagtcaattcacctcttatccctaaacagcagcaaaacgaaaaataccaagtgcctcaattcgatcaatcaacgattaaaaatattgagtctgcaaaaggacttgatgtgtgggacagctggccgctgcaaaacgctgacggaacagtagctgaatacaacggctatcacgttgtgtttgctcttgcgggaagcccgaaagacgctgatgacacatcaatctacatgttttatcaaaaggtcggcgacaactcaatcgacagctggaaaaacgcgggccgtgtctttaaagacagcgataagttcgacgccaacgatccgatcctgaaagatcagacgcaagaatggtccggttctgcaacctttacatctgacggaaaaatccgtttattctacactgactattccggtaaacattacggcaaacaaagcctgacaacagcgcag

SEQ ID NO: 119038 - DNA, 3820 bp, Homo sapiens
atgaaactcatggaaacacttaaccagtgcataaacgctggtcatgaaatgacgaaggctatcgccattgcacagtttaatgatgacagcccggaagcgaggaaaataacccggcgctggagaataggtgaagcagcggatttagttggggtttcttctcaggctatcagagatgccgagaaagcagggcgactaccgcacccggatatggaaattcgaggacgggttgagcaacgtgttggttatacaattgaacaaattaatcatatgcgtgatgtgtttggtacgcgattgcgacgtgctgaagacgtatttccaccgacaccggcgttcggtcgaagagtatctggtgtcatagaaattgccgatgggagtcgccgtcgtaaagctgctgcacttaccgaaagtgattatcgtgttctggttggcgagctggatgatgagcagatggctgcattatccagattgggtaacgattatcgcccaacaagtgcttatgaacgtggtcagcgttatgcaagccgattgcagaatgaatttgctggaaatatttctgcgctggctgatgcggaaaatatttcacgtaagattattacccgctgtatcaacaccgccaaattgcctaaatcagttgttgctcttttttctcaccccggtgaactatctgcccggtcaggtgatgcacttcaaaaagcctttacagataaagaggaattacttaagcagcaggcatctaaccttcatgagcagaaaaaagctggggctatcagagatgccgagaaagcagggcgactaccgcacccggatatggaaattcgaggacgggttgagcaacgtgttggttatacaattgaacaaattaatcatatgcgtgatgtgtttggtacgcgattgcgacgtgctgaagacgtatttccaccggtgatcggggttgctgcccataaaggtggcgtttacaaaacctcagtttctgttcatcttgctcaggatctggctctgaaggggctacgtgttttgctcgtggaaggtaacgacccccagggaacagcctcaatgtatcacggatgggtaccagatcttcatattcatgcagaagacactctcctgcctttctatcttggggaaaaggacgatgtcacttatgcaataaagcccacttgctggccggggcttgacattattccttcctgtctggctctgcaccgtattgaaactgagttaatgggcaaatttgatgaaggtaaactgcccaccgatccacacctgatgctccgactggccattgaaactgttgctcatgactatgatgtcatagttattgacagcgcgcctaacctgggtatcggcacgattaatgtcgtatgtgctgctgatgtgctgattgttcccacgcctgccagcgcagaaatatttccagcaaattcattctgcaatcggcttgcataacgctgaccacgttcataagcacttgttgggcgataatcgttacccaatctggataatgcagccatctgctcatcatccagctcgccaaccagaacacgataatcactttcggatgttcagaatgaaactcatggaaacacttaaccagtgcataaacgctggtcatgaaatgacgaaggctatcgccattgcacagtttaatgatgacagcccggaagcgaggaaaataacccggcgctggagaataggtgaagcagcggatttagttggggtttcttctcaggctatcagagatgccgagaaagcagggcgactaccgcacccggatatggaaattcgaggacgggttgagcaacgtgttggttatacaattgaacaaattaatcatatgcgtgatgtgtttggtacgcgattgcgacgtgctgaagacgtatttccaccggtgatcggggttgctgcccataaaggtggcgtttacaaaacctcagtttctgttcatcttgctcaggatctggctctgaaggggctacgtgttttgctcgtggaagtttctgttcatcttgctcaggatctggctctgaaggggctacgtgttttgctcgtggaaggtaacgacccccagggaacagcctcaatgtatcacggatgggtaccagatcttcatattcatgcagaagacactctcctgcctttctatcttggggaaaaggacgatgtcacttatgcaataaagcccacttgctggccggggcttgacattattccttcctgtctggctctgcaccgtattgaaactgagttaatgggcaaatttgatgaaggtaaactgcccaccgatccacacctgatgctccgactggccattgaaactgttgctcatgactatgatgtcatagttattgacagcgcgcctaacctgggtatcggcacgattaatgtcgtatgtgctgctgatgtgctgattgttcccacgcctgctgagttgtttgactacacctccgcactgcagtttttcgatatgcttcgtgatctgctcaagaacgttgatcttaaagggttcgagcctgatgtacgtattttgcttaccaaatacagcaatattgatggcctgctggcctgccggggctgccgggattttgccgatttcggaaccaccatcaaacaggattttcgcctgctggggcaaaccagcgtggaccgcttgctgcaactctctcagggccaggcggtgaagggcaatcagctgttgcccgtctcactggtgaaaagaaaaaccaccctggcgcccaatacgcaaaccgcctctccccgcgcgttggccgattcattaatgcagctggcacgacaggtttcccgactggaaagcgggcaagtaaaactgggggcatgcaacaagatcacttttaggactgcacttctggcaggaggagcgactcaagccttcgcgaaagaaaataaccaaaaagcatacaaagaaacgtacggcgtctctcatattacacgccatgatatgctgcagatccctaaacagcagcaaaacgaaaaataccaagtgcctcaattcgatcaatcaacgattaaaaatattgagtctgcaaaaggacttgatgtgtgggacagctggccgctgcaaaacgctgacggaacagtagctgaatacaacggctatcacgttgtgtttgctcttgcgggaagcccgaaagacgctgatgacacatcaatctacatgttttatcaaaaggtcggcgacaactcaatcgacagctggaaaaacgcgggccgtgtctttaaagacagcgataagttcgacgccaacgatccgatcctgaaagatcagacgcaagaatggtccggttctgcaacctttacatctgacggaaaaatccgtttattctacactgactattccggtaaacattacggcaaacaaagcctgacaacagcgcaggtaaatgtgtcaaaatctgatgacacactcaaaatcaacggagtggaagatcacaaaacgatttttgacggagacggaaaaacatatcagaacgttcagcagtttatcgatgaaggcaattatacatccggcgacaaccatacgctgagagaccctcactacgttgaagacaaaggccataaataccttgtattcgaagccaacacgggaacagaaaacggataccaaggcgaagaatctttatttaacaaagcgtactacggcggcggcacgaacttcttccgtaaagaaagccagaagcttcagcagagcgctaaaaaacgcgatgctgagttagcgaacggcgccctcggtatcatagagttaaataatgattacacattgaaaaaagtaatgaagccgctgatcacttcaaacacggaataa

SEQ ID NO: 119039 - DNA, 3780 bp, Homo sapiens
  misc_feature (1)...(3780): n = a,t,c or g
atgaaactcatggaaacacttaaccagtgcataaacgctggtcatgaaatgacgaaggctatcgccattgcacagtttaatgatgacagcccggaagcgaggaaaataacccggcgctggagaataggtgaagcagcggatttagttggggtttcttctcaggctatcagagatgccgagaaagcagggcgactaccgcacccggatatggaaattcgaggacgggttgagcaacgtgttggttatacaattgaacaaattaatcatatgcgtgatgtgtttggtacgcgattgcgacgtgctgaagacgtatttccaccggtgatcggggttgctgcccataaaggtggcgtttacaaaacctcagtttctgttcatcttgctcaggatctggctctgaaggggctacgtgttttgctcgtggaagggagcagagctctgttcccactgaaaagctgggattggaaaaatcaaccccaggctctgaagggattctggggctggattgcagaatgggcagcctgtgccatgaccaccagcagcaaagaaggtggtgctgatgacaacacaccacacggtggctgtgtcctggtgcccccagctntggcatttggtgctgatgccccagcctgtttccaagcactctgtgtgattcttatgatgtctgaggctggagacaccaggccaacaaaggttcccgaagtcgagcaagaactggagtcccccgtgggcttgctagaactcacgctgcagggcccacccagggttgacaactccgggtgtgagattcactctgtcctggcctttgctgacactcagggaaaggaactagaaaactggactgccagggaacatgacggtatctgcgagatccatgttgctaaatatgctgaaatattcggattgacctctgcggaagccagtaaggatatacggcaggcattgaagagtttcgcggggaaggaagtggttttttatcgccctgaagaggatgccggcgatgaaaaaggctatgaatcttttccttggtttatcaaacgtgcgcacagtccatccagagggctttacagtgtacatatcaacccatatctcattcccttctttatcgggttacagaaccggtttacgcagtttcggcttagtgaaacaaaagaaatcaccaatccgtatgccatgcgtttatacgaatccctgtgtcagtatcgtaagccggatggctcaggcatcgtctctctgaaaatcgactggatcatagagcgttaccagctgcctcaaagttaccagcgtatgcctgacttccgccgccgcttcctgcaggtctgtgttaatgagatcaacagcagaactccaatgcgcctctcatacattgagaaaaagaaaggccgccagacgactcatatcatgctgctgacttttggcatcgtagcagaaggcatgagtccccaagaggatcccccaatgaaactcatggaaacacttaaccagtgcataaacgctggtcatgaaatgacgaaggctatcgccattgcacagtttaatgatgacagcccggaagcgaggaaaataacccggcgctggagaataggtgaagcagcggatttagttggggtttcttctcaggctatcagagatgccgagaaagcagggcgactaccgcacccggatatggaaattcgaggacgggttgagcaacgtgttggttataccattgaacaaattaatcatatgcgtgatgtgtttggtacgcgattgcgacgtgctgaagacgtatttccaccggtgatcggggttgctgcccataaaggtggcgtttacaaaacctcagtttctgttcatcttgctcaggatctggctctgaaggggctacgtgttttgctcgtggaagggctacgtgttttgctcgtggaaggtaacgacccccagggaacagcctcaatgtatcacggatgggtaccagatcttcatattcatgcagaagacactctcctgcctttctatcttggggaaaaggacgatgtcacttatgcaataaagcccacttgctggccggggcttgacattattccttcctgtctggctctgcaccgtattgaaactgagttaatgggcaaatttgatgaaggtaaactgcccaccgatccacacctgatgctccgactggccattgaaactgttgctcatgactatgatgtcatagttattgacagcgcgcctaacctgggtatcggcacgattaatgtcgtatgtgctgctgatgtgctgattgttcccacgcctgctgagttgtttgactacacctccgcactgcagtttttcgatatgcttcgtgatctgctcaagaacgttgatcttaaagggttcgagcctgatgtacgtattttgcttaccaaatacagcaatagtaatggctctcagtccccgtggatggaggagcaaattcgggatgcctggggaagcatggttctaaaaaatgttgtacgtgaaacggatgaagttggtaaaggtcagatccggatgagaactgtttttgaacaggccattgatcaacgctcttcaactgatacttcgttatcgacaccagctgccccgatggtggattcgttaattgcgcgcgtaggagtaatggctcgcggtaatgccattactttgcctgtatgtggtcgggatgtgaagtttactcttgaagtgctccggggtgatagtgttgagaagacctctcgggtatggtcaggtaatgaacgtgaccaggagctgcttactgaggacgcactggatgatctcatcccttcttttctactgactggtcaacagacaccggcgttcggtcgaagagtatctggtgtcatagaaattgccgatgggagtcgccgtcgtaaagctgctgcacttaccgaaagtgattatcgtttgcccgatgtggattcgttaatgcgcggtgattatcgtgttctggttggcgagctggatgatgagcagatggctgcattatccagattgggtaacgattatcgcccaacaagtgcttatgaacgtggtcagcgttatgcaagccgattgcagaatgaatttgctggaaatatttctgcgctggctgatgcggaaaatatttcacgtaagattattacccgctgtatcaacaccgccaaattgcctaaatcagttgttgctcttttttctcaccccggtgaactatctgcccggtcaggtgatgcacttcaaaaagcctttacagataaagaggaattacttaagcagcaggcatctaaccttcatgagcagaaaaaagctggggtgatatttgaagctgaagaagttatcactcttttaacttctgtgcttaaaacgtcatctgcatcaagaactagtttaagctcacgacatcagtttgctcctggagcgacagtattgtataagggcgataaaatggtgcttaacctggacagtcaggcaccgtgtatgaaatctaacaatgcgctcatcgtcatcctcggcaccgtcaccctggatgctgtaggcataggcttggttatgccggtactgccgggcctcttgcgggatatcgtccattccgacagcatcgccagtcactatggcgtgctgctagcgctatatgcgttgatgcaatttctatgcgcacccgttctcggagcactgtccgaccgctttggccgccgcccagtcctgctcgcttcgctacttggagccactatcgactacgcgatcatggcgaccacacccgtcctgtggatctacccactagtcaattcaccatcttgttga

SEQ ID NO: 119040 - DNA, 3092 bp, Homo sapiens
gtccggccgacgtcacccccagaagacaagcagtggagctgtggcctcgggtttccggtaccgggtcccgtaccccgtggtcttgcggctccggagaactccaggagctggacttccaggcctggttccccaccgcagacccccggcagcaggagtgggcatcccttctggcccctgtggagtcgcaggctgattctggggtggccactgctcacccctggattctcccgtctctgtcgtccagcaggccccggtgacccctggattctcccgtttctgtcatataccaggcaccggtaacccctgcattctcctgtctttgtcatctaccaggccccggtgactgacttgcttatgaacagcctgacttccaggctgcctcttttctgatccagctacaatctctgagggcccagagtgtccacgtagttggggggcacagacgaccaaatcccagcatctcccaagacccacacccacagtgccaaggggcctggagcccacacagttaattccgtgacctccacagctccatcaccccccagacctgcaacggacaccaggcccatgtgcaacatgtggtccggcaggccccgggaggacctaggccaggtctccaggccctgcagacgacctgccatggaaacgtcggacaccagtttgagtgtgagctagatgccagcgagtcccgggaaggccagttcctgacttgctcaggtgcctgccacgtgccaccacccccgccccatccccagcacctggcctcgtggttcggcgcctcgcggccccagttcccgccgcggccccagttcccgccgcggccccagttcccgccgcggccccagttcccgccgcggccccagttcccgccgcggccccagttcccgccgcggccccagttccggtcgcggccccagttccggtcgcggccccagttcccgccgcggccccagttcccgccgcggccccagttcccgccgcggccccagttcccgccgcggccccagttcccgccgcggccccagttcccgtcgcggccccagttcccgccgcggccccagttcctaggtttcagtccccaaaccagacagcttccacatcagacagtccccatatcggacagcttccacaccagacagtccccatatcagacagcttccacaccggacagtccccacaccggacagattccacaccggacagtccccacaccggacagcttccacacaggacagtacccacaccggacagcttccacaccggacagtccccacaccggacagcttccacaccagacagtccccacaccagacagcttccacaccagacagtccccatatcggacagcttccacaccagacagtccccatatcggacagcttccacaccagacagtccccacaccagacagcttccacacaggacagtccccacaccggacagattccacaccggacagtccccacaccagacagcttccacaccagacagtccccatatcggacagcttccacaccagacagtccccatatcggacagcttgcacaccggacagtccccacaccagacagcttccacacaggacagtccccacaccggacagattccacaccggacagtccccacaccagacagcttccacaccagacagtccccatatcggacagcttccacacaggacagtccccatatcggacagcttccacaccagacagtccccacaccagacagcttccacaccagacagcttccacaccggacagtccccacaccagacagtccccacaccggacagtccccacaccggacagttccccacaccagacagtttccacaccagacagtccccacaccagacagcttccacaccagacagtccccacaccagacagcttccacacaagacagtccccacaccagacagtacccacaccagacagtccccacaccagacagcttccacaccagacagcttccacaccggacagtccccacaccagacagtccccacaccggacagtccccacaccagtttccacaccagacagtacccacagcggacagtccccacaccagacagcttccacaccagacagtccccacagcagacagtcccacaccagacagcttccacaccagacactccccacaccagacagcttccacaccagacagtccccatatcggacagcttccacaccggacagtccccacaccagacagtttccacaccagacagtccccacaccagacagcttccacaccagacactccccacaccagacagcttccacagcagacagtccccacagcagacagtcccacaccagacagcttccacaccagacagtccccacaccagacagtccctacaccagacagtccccacaccagacagtccccacaccggacagtacccacaccagacagcttccacaccagacagtacccacagcggacagtccccacaccagacagcttccacaccaggcagtccccacacaaaacagtccccacatcagacagtccccacaccagactgtccccacaccggacagtccccataccagacagtttccacaccagacagtccccacaccagacactccccacaccagacagcttccacaccagacagtccccatatcggacagcttccacaccagacagcttccacgctggacagtccccacatcggacggcatccacgccagatggcccccacgccagagagtccccacgccagacagcttccatgccagatggcccccacaccagacagccccacactggatggtccccacatcaaacaccttccactccagacaccttccacgctggacagtccccacaccagacagcttccatgccagacagcaaccacactggacggcatccacgccagacagcttccaagctggatgtcccccacatcagacagcccccatgccagatggcccccacgctgcacagtccccacggtggacggcctccacgccagatggcatcaatgcttccgacaatcggatcccatggacagagaggaccacactggctctgagaccctgacaaaacccaaaatgaccctttag

SEQ ID NO: 119041 - DNA, 891 bp, Homo sapiens
atggagacttccaggctttacaataagtctttgcatgcagcagttgatgacaaaggggagaacaataacggcaagtctaaagtggcccatgttatgatttgctgtcaggaactgaaatacgatgttggtggaggagaacggtatgattctttgacagatcttgtggaacattacaagaagaatcctatgatggaaacatggggtacagtactacaactcacggttgtcctacacgatggtgatcccaacgagcctgtttcagatgacatcaatgcaaatatcatcatgcccaaatttgaaaccaagtgtaacaattcaaagcccaagaagagttacattgccacacaaggctgcctgcaaaacatggtgaacgacttttggcggatggttgggcaagggaatatggagagaatggtctggcaataccacttttggacctggccggaccacggagtgcccattgaccccaggggtgtgctggacttcctggaggaggtgcaccataagcaggaacgcatcatgcatgcaaggccagtcgtggtgcacggcagtgctggaattggccggacagggacatacgttgtgattgatattctgactgacatcaacagagagaaaggtgttgactgcaacattgacgttctcaaaactatccagatggtgcagtctcagaagtcagggatggtccagacagaaacacagtaccgatttatctatatggcggtccagcattatactgaaacactacagcgcaggattgaagaagagcagaaaagcaagaggaaaggtcatgaatatacaaatattaagtattctctagcggaccagacgagtggagatcagagcccccccccccgccttgtactccaactccacgctgtgcagaaatga

SEQ ID NO: 119042 - DNA, 2350 bp, Homo sapiens
ggaggagcgagccgggccggggggcagctgcacagtctccgggatccccaggcctggaggggggtctgtgcgcggccggctggctctgccccgcgtccggtcccgagcgggcctccctcgggccagcccgatgtgaccgagcccagcggagcctgagcaaggagcgggtccgtcgcggagccggagggcgggaggaacatgacatcgcggagatggtttcacccaaatatcactggtgtggaggcagaaaacctactgttgacaagaggagttgatggcagttttttggcaaggcctagtaaaagtaaccctggagacttcacactttccgttagaagaaatggagctgtcacccacatcaagattcagaacactggtgattactatgacctgtatggaggggagaaatttgccactttggctgagttggtccagtattacatggaacatcacgggcaattaaaagagaagaatggagatgtcattgagcttaaatatcctctgaactgtgcagatcctacctctgaaaggtggtttcatggacatctctctgggaaagaagcagagaaattattaactgaaaaaggaaaacatggtagttttcttgtacgagagagccagagccaccctggagattttgttctttctgtgcgcactggtgatgacaaaggggagagcaatgacggcaagtctaaagtgacccatgttatgattcgctgtcaggaactgaaatacgacgttggtggaggagaacggtttgattctttgacagatcttgtggaacattataagaagaatcctatggtggaaacattgggtacagtactacaactcaagcagccccttaacacgactcgtataaatgctgctgaaatagaaagcagagttcgagaactaagcaaattagctgagaccacagataaagtcaaacaaggcttttgggaagaatttgagacactacaacaacaggagtgcaaacttctctacagccgaaaagagggtcaaaggcaagaaaacaaaaacaaaaatagatataaaaacatcctgccctttgatcataccagggttgtcctacacgatggtgatcccaatgagcctgtttcagattacatcaatgcaaatatcatcatgcctgaatttgaaaccaagtgcaacaattcaaagcccaaaaagagttacattgccacacaaggctgcctgcaaaacacggtgaatgacttttggcggatggtgttccaagaaaactcccgagtgattgtcatgacaacgaaagaagtggagagaggaaagagtaaatgtgtcaaatactggcctgatgagtatgctctaaaagaatatggcgtcatgcgtgttaggaacgtcaaagaaagcgccgctcatgactatacgctaagagaacttaaactttcaaaggttggacaagctctactccaggggaatacggagagaacggtctggcaataccactttcggacctggccggaccacggcgtgcccagcgaccctgggggcgtgctggacttcctggaggaggtgcaccataagcaggagagcatcatggatgcagggccggtcgtggtgcactgcagtgctggaattggccggacagggacgttcattgtgattgatattcttattgacatcatcagagagaaaggtgttgactgcgatattgacgttcccaaaaccatccagatggtgcggtctcagaggtcagggatggtccagacagaggcacagtaccgatttatctatatggcggtccagcattatattgaaacactacagcgcaggattgaagaagagcagaaaagcaagaggaaagggcacgaatatacaaatattaagtattctctagcggaccagacgagtggagatcagagccctctcccgccttgtactccaacgccaccctgtgcagaaatgagagaagacagtgctagagtctatgaaaacgtgggcctgatgcaacagcagaaaagtttcagatgagaaaacctgccaaaacttcagcacagaaatagatgtggactttcaccctctccctaaaaagatcaagaacagacgcaagaaagtttatgtgaagacagaatttggatttgggaaggcttgcaatgtggttgactaccttttgataagcaaaatttgaaaccatttaaagaccactgtattttaactcaacaatacctgcttcccaattactcatttcctcagataagaagaaatcatctctacaatgtagacaacattatattttatagaatttgtttgaaattgaggaagcagttaaattgtgcgctgtattttgcagaggattatggggattcaaattctagtaataggccttttt

SEQ ID NO: 119043 - DNA, 2157 bp, Homo sapiens
atgatcatcatcatcatcatcactatcatcagcatcaccatcatcatcctcatcaccactatcatccccatccccatcatcctcaccattctcaccatcatcaccatcatcatcatcaccatcaccatcatcctcaccatcaccatcatcaccatcatcctcaccatcaccatcatcatcactgtcatcctcacccccatcatcctcactattaccatcatcaccatcattctcaccatcacatcatcctcatcatcaccatcgccaccaccaccatcatcctcatcatcaccaccatcatcaccatcattctcaccaccaccatcatcctcatcatcatcaccatcatcaccatcattctcaccaccaccatcatcatcatcaccaccatcatcaccatcattctcaccaccattatcatcctcatcatcatcattatctatttcttcttcacctcctcctcctctctatcttctcatcatgtcacacactgtcattactggttactatgtactgatcaccaatgactattctagagactcattgcctctgctcctcactcccatatggcctgctggaagtgcctgcgagggctgggtcccgggatactgcctgatgggagatggcaaacttgtgccccgcagggagggccaaggcggggaggagaagaaagaacattcagaggaaagaggcgagagaggcaagacagccgtgttagacagcctcgctgagaagaccatccgctacaccagctctgggggactgggggaaagtgaccctgcagaggtgagttttaaactaagactggaagacaagaagcaggagctgctgctgcctgccccacgttcgaatcctggttcagcaggagccattgcttcccgcactacactcgccctggtactgcgtctgcaacctgaatgcacccagagcccaaccactcccgagttcctcaactccctgggcccagaggccgcaacacctttcgtcttcatgcgttctgtcctgaggcacttcttccacacgtaccctggcttgcaacgagcccagggaccacttgaggtgaaagctgcaggtcttcctaggccttttctgaacacgcacattgacctggtgtatgcacagctttgtgcgttcccccatgtacatgggttctttttggaaaaacggtggttcaaaggcttccggagtgagacatctgtgtcgtcttcatcatcagggccagctgcacctgccaccctgggacgctcgctcccctgcgaggtggagtccaggaacatccaaccatctgtgtccttacgaaggcccatcctcacagcctgcagccgacagctaaggaatgactcctgcggcgatggaatctccaaggacgtgcatgttttactgaatctaccaaaagcacggcagaaggaggcgagttacagccagacgttttggaaagtacctaagcgctgtgaacagcaggaaagaatcgactccagcggcgccgtcaggcgccgacgtccaggaagctgcagcttagatgtcaaggaggtgaacctcaaagctggactctgggttctcaccaaaaactggccccctcgcctccaactccgatttgtgctgggtgctgaccccacacacgacagggacatgtggacgggcaggactgtggccgaggtacctactgagccgtcccccacgctcagcgactgccactcttctgcagggtacgctgcctctcagcactctccggggccagaggagcacactcagctccctcctgtgtgtccccatgaaaccgtatttataccccagtacagaacgtgtcacactgtgatccagggcttcctggtgtctccactgagggacggcgacagtgccagggtctcagcccacctgcgccacgaaagggagtcagaaacccgggggccgcatttcatccaccccaactccaccctgcaaagcacccttctgaaaatcaacactcgggaaaggtttacaggcatcaggcgaacagcagggagccctggtggcagcgagccaccttcacgtgtgggctccgagaccccgggaaaggctgcaacctttctttccaatacggtgcaaggtatccgcagcctgatacttgttttgcatgaaaatcaatcagctttaggacctcagcacatctgtttctga

SEQ ID NO: 119044 - DNA, 378 bp, Homo sapiens
atgagcataaaagggacatatcttaaagtaataaaagccatctatgacaaacccacagccagcagtatactgaatggggaaaatttgaaagcatttctgctgagaactggaacaagacaaggatgcccactttacaaaatcaatgtatacaaatcagtagcactgctatacaccaccaacgaccaaggtgagaatcaaatcaataactcaaccccttataccacagctccaagaaaaataaaatacataggaatataccttaccaaggaggtgaaagatctctacaaggaaaactacaaaacactgctgaaagaagtcatagatgacacaaatggaaacacatcccatgctcatggatgggtagaatcaatattgtga

SEQ ID NO: 119045 - DNA, 419 bp, Homo sapiens; identical to SEQ ID NO: 110210

SEQ ID NO: 119046 - DNA, 1571 bp, Homo sapiens
ttgagacggatttcgcttttgttggccaagctggagtacaatggtgcgatctcagctcaccacaacctctgcctccctgggttcaagcaattctcctgcctcagcctcccaggcaggggtgctggtctggcatccccaaatggtctggcatctctgaggatgtgcaagtttggaaaaactgcaaattggatttagctgctgctacaggaaagaactgccttggacagggtgaagaagctttgctgacgcagatgagaacaggaaaccaacgggaagtcagtgactggtgggaggaatttgtgtacctgcgctcccgaaatccgctgatggtgaacagcaactattacatgatggacttcctgtatgtcacacccacgcctctgcaggcagctcgcgctgggaatgccgtccatgccctcctcctgtaccgccaccgcctgaaccgccaggagatacccccggtgagagggccccagtgggttagggatggaggtgtggtcctgtggcctttgggccacgtgggtcctggaaggcagctcacagcccacggtttcctgcagactttgctgatgggaatgcgccccttatgctctgcccagtacgagaagatcttcaacaccacgcggattccaggggtccaaaaagactacatccgccacctccatgacagccaacacgtggctgtcttccaccggggccgattcttccgcatggggacccactcccgaaacagcctgctttccccgagagccctggagcagcagtttcagagaatcctggatgatccctcaccggcctgcccccacgaggaacatctggcagctctgacagctgctcccaggggcacgtgggcccaggtgcggacatccctgaagacccaggcagcggaggccctggaggcggtggaaggggccgctttctttgtgtcactggatgctgagcccgcggtgtctcaccttggaggacccggcagcgtcgttggatgcctacgcccatgctctgctggccggccggggccatgatcgctggttttgacaaaatccttcaccctaatcgtcttctctaacgggaagctgggcctcagcgtggagcactcctgggccgactgccccatctcaggacacatgtgggagttcactctggctacagaatgctttcagctgggctactcaacagacggccactgcaaggggcacccggaccccacactaccccagccccagcggctgcaatgggcccttccagaccatattcactcctccatctctctagccctgaggggagccaagatcttgtctgaaaatgtcgactgccatgtcgttccattctccctatttggcaagagcttcatccgacgctgccacctctctttagacagcttcatccagatcgccttgcaactggcccacttccgggacaggggtcaattctgcctgacttatgagtcggccatgactcgcttattcctggaaggccggacggagacggtgcggtcttgcacgagggaggcctgcaactttgtcagggccatggaggacaaaaagaagacggtgggtgcagccctcgcttga

SEQ ID NO: 119047 - DNA, 1028 bp, Homo sapiens
atgccagccaaaagtcctgggcaagatgtgcttggtacggataacataaagattgatgtcttcaaacaaaccaaccagaaaagtcacacaggggagaaaccctatgaatgtcctgagtgcgggaaagccttcagtgagaagtcacgcctaagaaaacatcagagaactcacacgggagagaaaccatacaaatgtgatggatgtgataaagctttcagtgcaaagtcaggcctaagaatacaccagagaacccacacaggggagaaaccattcgaatgtcatgaatgtgggaaatcttttaactataagtcaatcctcatagtgcatcagagaactcacacaggggagaaaccttttgaatgtaatgaatgcgggaaatctttcagccatatgtcaggcctaaggaatcaccgaagaactcacacaggggaaagaccatataaatgtgatgaatgtgggaaagctttcaaactgaagtcaggcctgaggaaacatcatagaacacacacaggggagaagccctacaaatgtaatcagtgtggaaaagctttcggtcagaaatcactaactcagaggacatcatagaattcactcaggggaaaaacccctataaatgtaatcattgtggggaagctttcagtcagaaatcaaacctcagagtacatcacagaactcatactggggagaaaccctatcaatgtgaggagtgtggaaaaacattcaggcagaaatcaaatctcagaggggcatcagagaactcactctggggagaagccctatgaatgtaatgaatgtggaaaagctttcagtgagaagtcagtcctaagaaaacatcagcgaactcacacccggggagaaacccatataattgtaatcagtgtggggaagctttcagtcagaaatccaatctcagagtacatcagagaactcacacaggggagaaaccctataaatgtgataaatgtgggagaactttcagtcaaaaatcaagccttagagaacatcagaaagcccacccaggggattaa

SEQ ID NO: 119048 - DNA, 606 bp, Homo sapiens
tcaaatcatgctaccaatgtaggaagaatgtacttcccatgtcctgttgccatgaggtggaggttgagagacaccaggattgtgggctaggaggtcggtaaagagcagagggctctttcctgggctgcctagtcctagcagggcatctgttagatccctgctgctgctacctgcatgggcagccttcttggagggaatagtagataccagacccacagcatggagagcatttccctggaccctctttctgagtgtcttctgccaatttttggattttccagaaacgtctttggattcccaaaagttgagtttagatactcccagtttttgaatttcatttctctttagaattattgccattttatataagaaacttgaacatctgcagattttagtatccacaggggttgggggtgtcctggaatcaatccctgcagacacgaaggggacattgtactcatcagtattagccagctctaagtcagcacacaaaacatttgctttatgcagttttatccacgtcattaacaaagatgaagaataagaagaagataagtacattgaatttccaaacatcaaaatgaaactaagggtaactgaaatcat

SEQ ID NO: 119049 - DNA, 1455 bp, Homo sapiens
ttacaatgacagtttagttttcagagtctttgcagtgctagtgctattctggtcagcttgattcatctggtgcccttgtggtccatctctgccccaaatcatgctgccgatgcaggaagaatgtacttcccatgtcctgttgccatgaggtggagggtgagagacaccaggattgtggggtaggaggtcggcagagagcagagggctctttcctgggctgcctagtcctggcagggcacctgttagatccccgctgctgctacctgcatgggcagcctcccactcaggtcttggtttccaaataccattctcctctaaaaggaaccagggctccttggaaaaaatggctgattccaaggctgcagtgctatggacttgagtatttgtgtccacctcaaattcatagactgaatctttaatccccagtctgatggtgtttggagggtgggcctctgccagctgagaggcagttgggagaccaacaagctgagcaggcatttcagcagattcagcagtcagagtgcaccaagaagggtgctttagtttggagtttcgaaaggccatactgagaatcaaagttaaaatatacatctgaagtacaagaaatggataggaaaaactttcacggagaggtggtgtccacatcacacgagtgaccagaaccgaaaccagcggcagtcgcaccgccacctgagtcgccccttcctgctggagacagcgaggggtgcctgcagccgggacaccttcttctccgcgtctcctcgtctcccgcgcccgcgtcaggccgccagccttgcccaccgccccgagaagagcgcgccgggcgccgactgcccctcggggcgccgggcggcggccctggacgtgcgggggcctctctgggccggccgcagcgcctcggccctgccctctagctcccgcgttcgctcctgccttcttggctctcggggcacagcgcgcggcccggtccggagcagggcggacatgagcgccaagcagagcggcctggccgccgctcacggcgcacgcgcgcgtactcggctcggatctaccttccagtagcagcggagtggccaatgggaccgggaccagagccgggggccggaggccgccgccgcggggaggttcccggcccaggtgcccagcgctcaccagcccggcggcgccgcggcggccccgcagctgtttcctcgggggggcgtggcgtcgggggccttcgcggcgcagtcctctttcagcatcccgaacagcagcagcggcccgtaggactcgcaggactcggtgcacagcagcccgcgcatgtttggaggtacggacccctctccacgcgcccgcgctcggtcctcccgcggctgcacgtgggccgtggccgccggctatttttacccttctccttttctccttcggccggggcgccgggggctgcttcccggcccagcccgcgccggtctccat

SEQ ID NO: 119050 - DNA, 415 bp, Homo sapiens
atgatgaacgtccccggcggaggagcggccgcggtgatgatgacgggctacaataatggtcgctgtccccggaattctctctacagtgactgcattattgaggagaagacggtggtcctgcagaaaaaagacaatgagggctttggattcgtgcttcgaggggccaaagctgacacacccattgaagaattcacaccaacaccggctttcccagccctacagtacctggagtccgtggatgaagggaacattccctgtgggtcagagagtttgctgaccaggtctctgctacatctccagcatgcagcacagttcagagagattaagaagcctgcccagggccctccagggaggtctgaatctaagctgactccaaagcttgtttcttttgcactgtgtctgtctgatgctccag

SEQ ID NO: 119051 - DNA, 481 bp, Homo sapiens
  misc_feature (1)...(481): n = a,t,c or g
ggtgatgatgacgggctacaataatggtcgctgtccccggaattctctctacagtgactgcattattgaggagaagacggtggtcctgcagaaaaaagacaatgagggctttggattcgtgcttcgaggggccaaagctgacacacccattgaagaattcacaccaacaccggctttcccagccctacagtacctgggagtccgtggatgaaggtggggtggcgtggcaagccggactaaggaccggggacttcttgattgagggtaacaatgagaatgttgtcaaagtctggcccaggcaggcggtgaacatgatccggcagggagggaatcaccctgttccttaatgtggtcacggtgaccaggaatctggaacccgacgacaccgccaggaagaaagcttccccgccttcaaagcgggcacctaccacagccctnaccctncgcttcaagtccatnaccttggagcttgagganttgt

SEQ ID NO: 119052 - DNA, 565 bp, Homo sapiens
atggacccaaaccacgaagaaatccctgatttacctgaaaaagaatttaggagagttaaaagcaaaaatcacatgaccatctcaatagatgcagaaaaagcattcgacaacatccagcatcgctttatgattaaaactctcagcaaaattggcatacaagggacacactttaatgataataaaagccatctatgacaaacccacagccagtataatactgaacggagaaaacttgaaagcattccctctgagaactggaacaagcatagtactggaagtcctagccagagcaatcagacgagagaaagaaataaagggcatccaaattggtaaagaggaagtcaaactgttgctctttgctgatgatatgattgtttacctagaaaaccctaaagactcctacagaaagctgttagaacagataaaggaattcagcaaagtttccagatacaaaattaatgtacagaaatcaatagctcttctgtacgccaacagtgaccaagctgagaatcaaatcaataacccaacctcttttacaatagctgcaaaaaataaaataaaataa

SEQ ID NO: 119053 - DNA, 1221 bp, Homo sapiens; identical to SEQ ID NO: 117724

SEQ ID NO: 119054 - DNA, 1169 bp, Homo sapiens
ctatcgatgaggtgcaatgtcggtgtcagtcgctgacaatccgctgacgtcgcgcatgtgaacgcactgcaccattacgccgcgtgcacgagtgacctccagacaggtattcactgatgaaggatgaccggacacttcaaagctgacatcgaaatagcctttttccgctttccagtgatccatgtcgtcgttttgtgggtttacgagcacatccgcccccatctctttgcccagcgaaagggaacggggactcacatcagcacagacaatttccgcggcccccagtgttttcactgcattgtccaatgggatgtaggaattcagaatggatcctgccattgctttggtgctggcattatcactaactgttcccaagctgactgtgccagattctccacttagactgtaccgttctttctgtacatctgcttgtacttccaacctggtggtacactttgcatagaaggagaaatggccagatgtgtgattatacactgattcatgggctgtggccaatggtttggctggatggtcagggacttggaagaagcatgattggaaaattgatgacaatgaaatttggggaagaggtatgtggatagacctctctgagtggtcaaaaactgtgaagatatttgtatcacatgagagtgctcaccatatcacataaaagagctcagcagaggaggattttaataatcaagtggataggatgattcattctgtggacaccactcggcctctttccccagccacccctgtcatcacccaatgggcccatgaacaaagtggccatggtgacagggatggaggttatgcatgggctcagcaacatggacttccactcaccaaggctgacctggctatggtcactgctgagtgcccaatttgccagcagcagagaccaacactgagcccttgatatggcaccattcctcggggtgatcagccagctacctggtggcaggtcgattatattggacctctttcatcatggaaagggcagaggtttgtcctcactggaatagacaatctggatatgagtttgcctatcctgcacgcagttctgccaatagtaccatccgtggacttatggaatgccttatccaccatcatggtattccacacagcattgcctctaaccaactttacagctaaagaagtttagc

SEQ ID NO: 119055 - DNA, 15359 bp, Homo sapiens
tctacctcgcgggtgcctctggtgtctccagaggtctccgaccccagcccgcccccagccctcccgcccagcccgcagccccctccctctgttccccgacctcagaccctgggcttccgacctcgacatcatgggtgacgcagaaggcgaagacgaggtccagttcctgcggacggacgatgaggtggtcctgcagtgcagcgctaccgtgctcaaggagcagctcaagctctgcctggccgccgagggcttcggcaaccgcctgtgcttcctggagcccactagcaacgcgcagaatgtgccccccgatctggccatctgttgcttcgtcctggagcagtccctgtctgtgcgagccctgcaggagatgctggctaacacggtggaggctggcgtggagtcatcccagggcgggggacacaggacgctcctgtatggccatgccatcctgctccggcatgcacacagccgcatgtatctgagctgcctcaccacctcccgctccatgactgacaagctggccttcgatgtgggactgcaggaggacgcaacaggagaggcttgctggtggaccatgcacccagcctccaagcagaggtctgaaggagaaaaggtccgcgttggggatgacatcatccttgtcagtgtctcctccgagcgctacctgcacctgtcgaccgccagtggggagctccaggttgacgcttccttcatgcagacactgtggaacatgaaccccatctgctcccgctgcgaagagggcttcgtgacgggaggtcacgtcctccgcctctttcatggacatatggatgagtgtctgaccatttcccctgctgacagtgatgaccagcgcagacttgtctactatgaggggggagctgtgtgcactcatgcccgctccctctggaggctggagccactgagaatcagctggagtgggagccacctgcgctggggccagccactccgagtccggcatgtcactaccgggcagtacctagcgctcaccgaggaccagggcctggtggtggttgacgccagcaaggctcacaccaaggctacctccttctgcttccgcatctccaaggagaagctggatgtggcccccaagcgggatgtggagggcatgggcccccctgagatcaagtacggggagtcactgtgcttcgtgcagcatgtggcctcaggactgtggctcacctatgccgctccagaccccaaggccctgcggctcggcgtgctcaagaagaaggccatgctgcaccaggagggccacatggacgacgcactgtcgctgacccgctgccagcaggaggagtcccaggccgcccgcatgatccacagcaccaatggcctatacaaccagttcatcaagagcctggacagcttcagcgggaagccacggggctcggggccacccgctggcacggcgctgcccatcgagggcgttatcctgagcctgcaggacctcatcatctacttcgagcctccctccgaggacttgcagcacgaggagaagcagagcaagctgcgaagcctgcgcaaccgccagagcctcttccaggaggaggggatgctctccatggtcctgaattgcatagaccgcctaaatgtctacaccactgctgcccactttgctgagtttgcaggggaggaggcagccgagtcctggaaagagattgtgaatcttctctatgaactcctagcttctctaatccgtggcaatcgtagcaactgtgccctcttctccacaaacttggactggctggtcagcaagctggatcggctggaggcctcgtctggcatcctggaggtcctgtactgtgtcctcattgagagtccagaggttctgaacatcatccaggagaatcacatcaagtccatcatctccctcctggacaagcatgggaggaaccacaaggtcctggacgtgctatgctccctgtgtgtgtgtaatggtgtggctgtacgctccaaccaagatcttattactgagaacttgctgcctggccgtgagcttctgctgcagacaaacctcatcaactatgtcaccagcatccgccccaacatctttgtgggccgagcggaaggcaccacgcagtacagcaaatggtactttgaggtgatggtggacgaggtgactccatttctgacagctcaggccacccacttgcgggtgggctgggccctcaccgagggctacaccccctaccctggggccggcgagggctggggcggcaacggggtcggcgatgacctctattcctacggctttgatggactgcatctctggacaggacacgtggcacgcccagtgacttccccagggcagcacctcctggcccctgaagacgtgatcagctgctgcctggacctcagcgtgccgtccatctccttccgcatcaacggctgccctgtgcagggtgtctttgagtccttcaacctggacgggctcttcttccctgttgtcagcttctcggctggtgtcaaggtgcggttcctccttggtggccgccatggtgaattcaagttcctgcccccacctggctatgctccatgccatgaggctgtgctccctcgagagcgactccatcttgaacccatcaaggagtatcgacgggaggggccccgggggcctcacctggtgggccccagtcgctgcctctcacacaccgacttcgtgccctgccctgtggacactgtccagattgtcctgccgccccatctggagcgcattcgggagaagctggcggagaacatccacgagctctgggcgctaacccgcatcgagcagggctggacctacggcccggttcgggatgacaacaagaggctgcacccgtgtcttgtggacttccacagccttccagagcctgagaggaactacaacctgcagatgtctggggagacgctcaagactctgctggctctgggctgccacgtgggcatggcggatgagaaggcggaggacaacctgaagaagacaaaactccccaagacgtatatgatgagcaatgggtacaagccggctccgctggacctgagccacgtgcggctgacgccggcgcagacaacactggtggaccgtctggcagaaaatgggcacaacgtgtgggcccgagaccgcgtgggccagggctggagctacagcgcagtgcaggacatcccagcgcgccgaaaccctcggctggtgccctaccgcctgctggatgaagccaccaagcgcagcaaccgggacagcctctgccaggccgtgcgcaccctcctgggctacggctacaacatcgagcctcctgaccaggagcccagtcaggtggagaaccagtctcgttgtgaccgggtgcgcatcttccgggcagagaaatcctatacagtgcagagcggccgctggtacttcgagtttgaagcagtcaccacaggcgagatgcgcgtgggctgggcgaggcccgagctgaggcctgatgtagagctgggagctgacgagctggcctatgtcttcaatgggcaccgcggccagcgctggcacttgggcagtgaaccatttgggcgcccctggcagccgggcgatgtcgttggctgtatgatcgacctcacagagaacaccattatcttcaccctcaatggcgaggtcctcatgtctgactcaggctccgaaacagccttccgggagattgagattggggacggcttcctgcccgtctgcagcttgggacctggccaggtgggtcatctgaacctgggccaggacgtgagctctctgaggttctttgccatctgtggcctccaggaaggcttcgagccatttgccatcaacatgcagcgcccagtcaccacctggttcagcaaaggcctgccccagtttgagccagtgccccttgaacaccctcactatgaggtatcccgagtggacggcactgtggacacgcccccctgcctgcgcctgacccaccgcacctggggctcccagaacagcctggtggagatgcttttcctgcggctgagcctcccagtccagttccaccagcacttccgctgcactgcaggggccaccccgctggcacctcctggcctgcagccccccgccgaggacgaggcccgggcggcggaacccgaccctgactacgaaaacctgcgccgctcagctgggggctggagcgaggcagagaacggcaaagaagggactgcgaaggagggcgcccccgggggcaccccgcaggcggggggagaggcgcagcccgccagggcggagaatgagaaggatgccaccaccgagaagaacaagaagagaggcttcttattcaaggccaagaaggtcgccatgatgacccagccaccggccacccccacgctgccccgactccctcacgacgtggtgcctgcagacaaccgcgatgaccccgagatcatcctcaacaccaccacgtactattactccgtgagggtctttgctggacaggagcccagctgcgtgtgggcgggctgggtcacccctgactaccatcagcacgacatgagcttcgacctcagcaaggtccgggtcgtgacggtgaccatgggggatgaacaaggcaacgtccacagcagcctcaagtgtagcaactgctacatggtgtggggcggagactttgtgagtcccgggcagcagggccggatcagccacacggaccttgtcattgggtgcctggtggacttggccactggcttaatgacctttacagccaatggcaaagagagcaacacctttttccaggtggaacccaacactaagctatttcctgccgtcttcgtcctgcccacccaccagaacgtcatccagtttgagctggggaagcagaagaacatcatgccgttgtcagccgccatgttccaaagcgagcgcaagaacccggccccgcagtgcccaccgcggctggagatgcagatgctgatgccagtgtcctggagccgcatgcccaaccacttcctgcaggtggagacgaggcgtgccggcgagcggctgggctgggccgtgcagtgccaggagccgctgaccatgatggcgctgcacatccccgaggagaaccggtgcatggacatcctggagctgtcggagcgcctggacctgcagcgcttccactcgcacaccctgcgcctctaccgcgctgtgtgcgccctgggcaacaatcgcgtggcgcacgctctgtgcagccacgtagaccaagctcagctgctgcacgccctggaggacgcgcacctgccaggcccactgcgcgcaggctactatgacctcctcatcagcatccacctcgaaagtgcctgccgcagccgccgctccatgctctctgaatacatcgtgcccctcacgcctgagacccgcgccatcacgctcttccctcctggaaggagcacagaaaatggtcacccccggcatggcctgccgggagttggagtcaccacttcgctgaggcccccgcatcatttctcgcccccctgtttcgtggccgctctgccagctgctggggcagcagaggccccggcccgcctcagccctgccatcccgctggaggccctgcgggacaaggcactgaggatgctgggggaggcggtgcgcgacggtgggcagcacgctcgcgaccccgtcggggcctccgtggagttccagtttgtgcctgtgctcaagctcgtgtccaccctgctggtgatgggcatctttggcgatgaggatgtgaaacagatcttgaagatgattgagcctgaggtcttcactgaggaagaggaggaggaggacgaggaggaagagggtgaagaggaagatgaggaggagaaggaggaggatgaggaggaaacagcacaggaaaaggaagatgaggaaaaagaggaagaggaggcagcagaaggggagaaagaagaaggcttggaggaagggctgctccagatgaagttgccagagtctgtgaagttacagatgtgccacctgctggagtatttctgtgaccaagagctgcagcaccgtgtggagtccctggcagcctttgcggagcgctatgtggacaagctccaggccaaccagcggagccgctatggcctcctcataaaagccttcagcatgaccgcagcagagactgcaagacgtacccgtgagttccgctccccaccccaggaacagatcaatatgctattgcaattcaaagatggtacagatgaggaagactgtcctctccctgaagagattcgacaggatttgcttgactttcatcaagacctgctggcacactgtggaattcagctagatggagaggaggaggaaccagaggaagagaccaccctgggcagccgcctcatgagcctgttggagaaagtgcggctggtgaagaagaaggaagagaaacctgaggaggagcggtcagcagaggagagcaaaccccggtccctgcaggagctggtgtcccacatggtggtgcgctgggcccaagaggacttcgtgcagagccccgagctggtgcgggccatgttcagcctcctgcaccggcagtacgacgggctgggtgagctgctgcgtgccctgccgcgggcgtacaccatctcaccgtcctccgtggaagacaccatgagcctgctcgagtgcctcggccagatccgctcgctgctcatcgtgcagatgggcccccaggaggagaacctcatgatccagagcatcgggaacatcatgaacaacaaagtcttctaccaacacccgaacctgatgagggcgctgggcatgcacgagacggtcatggaggtcatggtcaacgtcctcgggggcggcgagtccaaggagatccgcttccccaagatggtgacaagctgctgccgcttcctctgctatttctgccgaatcagccggcagaaccagcgctccatgtttgaccacctgagctacctgctggagaacagtggcatcggcctgggcatgcagggctccacgcccctggacgtggctgctgcctccgtcattgacaacaatgagctggccttggcattgcaggagcaggacctggaaaaggttgtgtcctacctggcaggctgtggcctccagagctgccccatgcttgtggccaaagggtacccagacattggctggaacccctgtggtggagagcgctacctggacttcctgcgctttgctgtcttcgtcaacggcgagagcgtggaggagaacgccaatgtggtggtgcggctgctcatccggaagcctgagtgcttcggacccgccctgcggggtgagggtggctcagggctgctggctgccatcgaagaggccatccgcatctccgaggaccctgcgagggatggcccaggcatccgcagggaccggcggcgcgagcactttggtgaggaaccgcctgaagaaaaccgggtgcacctgggacacgccatcatgtccttctatgccgccttgatcgacctgctcggacgctgtgcaccagagatgcatctaatccaagccggcaagggtgaggccctgcggatccgcgccatcctccgctcccttgtgcccttggaggaccttgtgggcatcatcagcctcccactgcagattcccaccctgggcaaagatggggctctggtgcagccaaagatgtcagcatccttcgtgccggaccacaaggcgtccatggtgctcttcctggaccgtgtgtatggcatcgagaaccaggacttcttgctgcacgtgctggacgtggggttcctgcccgacatgagggcagccgcctcgctggacacggccactttcagcaccaccgagatggcgctggccgtgaaccgctacctgtgcctggccgtgctgccgctcatcaccaagtgtgcgccgctctttgcgggcacagaacaccgcgccatcatggtggactctatgctgcataccgtgtaccgcctgtctcggggtcgttcgctcaccaaggcgcagcgtgacgtcatcgaggactgcctcatgtcgctctgcaggtacatccgcccgtcgatgctgcagcacctgttgcgccgcctggtgttcgacgtgcccatcctcaacgagttcgccaagatgccactcaagctcctcaccaaccactatgagcgctgttggaagtactactgcctacccacgggctgggccaacttcggggtcacctcagaggaggagctgcacctcacacggaaactcttctggggcatctttgactctctggcccataagaaatacgacccggagctgtaccgcatggccatgccttgtctgtgcgccattgccggggctctgccccccgactatgtggatgcctcatactcatctaaggcagagaaaaaggccacagtggatgctgaaggcaactttgatccccggcctgtggagaccctcaatgtgatcatcccggagaagctggactccttcattaacaagtttgcggagtacacacacgagaagtgggccttcgacaagatccagaacaactggtcctatggagagaacatagacgaggagctgaagacccaccccatgctgaggccctacaagaccttttcagagaaggacaaagagatttaccgctggcccatcaaggagtccctgaaggccatgattgcctgggaatggacgatagagaaggccagggagggtgaggaggagaagacggaaaagaaaaaaacgcggaagatatcacaaagtgcccagacctatgatcctcgagaaggctacaaccctcagccccccgaccttagtgctgttaccctgtcccgggagctgcaggccatggcagaacaactggcagaaaattaccacaacacgtggggacggaagaagaagcaggagctggaagccaaaggcggtgggacccaccccctgctggtcccctacgacacgctcacggccaaggagaaggcacgagatcgagagaaggcccaggagctactgaaattcctgcagatgaatggctacgcggttacaagaggccttaaggacatggaactggactcgtcttccattgaaaagcggtttgcctttggcttcctgcagcagctgctgcgctggatggacatttctcaggagttcattgcccacctggaggctgtggtcagcagtgggcgagtggaaaagtccccacatgaacaggagattaaattctttgccaagatcctgctccctttgatcaaccagtacttcaccaaccactgcctctatttcttgtccactccggctaaagtgctgggcagcggtggccacgcctctaacaaggagaaggaaatgatcaccagcctcttctgcaaacttgctgctctcgtccgccaccgagtctctctctttgggacagacgccccagctgtggtcaactgtcttcacatcctggcccgctccctggatgccaggacagtgatgaagtcaggccctgagatcgtgaaggctggcctccgctccttcttcgagagtgcctcggaggacatcgagaagatggtggagaacctgcggctgggcaaggtgtcgcaggcgcgcacccaggtgaaaggcgtgggccagaacctcacctacaccactgtggcactgctgccggtcctcaccaccctcttccagcacatcgcccagcaccagttcggagatgacgtcatcctggacgacgtccaggtctcttgctaccgaacgctgtgcagtatctactccctgggaaccaccaagaacacttatgtggaaaagcttcggccagccctcggggagtgcctggcccgtctggcagcagccatgccggtggcgttcctggagccgcagctgaacgagtacaacgcctgctccgtgtacaccaccaagtctccgcgggagcgggccatcctggggctccccaacagtgtggaggagatgtgtcccgacatcccggtgctggagcggctcatggcagacattggggggctggccgagtcaggtgcccgctacacagagatgccgcatgtcatcgagatcacgctgcccatgctatgcagctacctgccccgatggtgggagcgcgggcccgaggcacccccttccgccctgcccgccggcgcccccccaccctgcacagctgtcacctctgaccacctcaactccctgctggggaatatcctgagaatcatcgtcaacaacctgggcattgacgaggcctcctggatgaagcggctggctgtgttcgcacagcccattgtgagccgtgcacggccggagctcctgcagtcccacttcatcccaactatcgggcggctgcgcaagagggcagggaaggtggtgtccgaggaggagcagctgcgcctggaggccaaggcggaggcccaggagggcgagctgctggtgcgggacgagttctctgtgctctgccgggacctctacgccctgtatccgctgctcatccgctacgtggacaacaacagggcgcagtggctgacggagccgaatcccagcgcggaggagctgttcaggatggtgggcgagatcttcatctactggtccaagtcccacaacttcaagcgcgaggagcagaactttgtggtccagaatgagatcaacaacatgtccttcctgactgctgacaacaaaagcaaaatggctaaggcgggagatatacagtccggtggctcggaccaggaacgcaccaagaagaagcgccggggggaccggtactctgtgcagacgtcactgatcgtggccacactgaagaagatgctgcccatcggcctgaatatgtgtgcgcccaccgaccaagacctcatcacgctggccaagacccgttacgccctgaaagacacagatgaggaggtccgggaatttctgcacaacaaccttcaccttcagggaaaggtcgaaggctccccgtctctgcgctggcagatggctctgtaccggggcgtcccgggtcgcgaggaggacgccgatgaccccgagaaaatcgtgcgcagagtccaggaagtgtcagccgtgctctactacctggaccagaccgagcacccttacaagtctaagaaggccgtgtggcacaagcttttgtccaaacagcgccggcgggcagtcgtggcctgtttccgtatgacgcccctgtacaacctgcccacgcaccgggcatgtaacatgttcctggagagctacaaggctgcatggatcctgactgaagaccacagttttgaggaccgcatgatagatgacctttcaaaagctggggagcaggaggaggaggaggaagaggtggaagagaagaagccagaccccctgcaccagttggtcctgcacttcagccgcactgccctgacggaaaagagcaaactggatgaggattacctgtacatggcctatgctgatatcatggcaaagagctgccacctggaggagggaggggagaacggtgaagctgaagaggaggttgaggtctcctttgaggagaaacagatggagaagcagaggctcttgtaccagcaagcacggctgcacacccggggggcggccgagatggtgctgcagatgatcagtgcctgcaaaggagagacaggtgccatggtgtcctccaccctgaagctgggcatctccatcctcaatggaggcaatgctgaggtccagcagaaaatgctggattatcttaaggacaagaaggaagttggcttcttccagagtatccaggcactgatgcaaacatgcagcgtcctggatctcaatgcctttgagagacaaaacaaggccgaggggctgggcatggtgaatgaggatggcactgtcatcaatcgccagaacggagagaaggtcatggcggatgatgaattcacacaagacctgttccgattcctacaattgctctgtgaggggcacaataatgatttccagaactacctacggacacagacagggaacacgaccactattaacatcatcatttgcactgtggactacctcctgcggctgcaggaatccatcagcgacttctactggtactactcgggcaaggatgtcattgaagagcagggcaagaggaacttctccaaagccatgtcggtggctaagcaggtgttcaacagcctcactgagtacatccagggtccctgcaccgggaaccagcagagcctggcgcacagtcgcctatgggacgcagtggtgggattcctgcacgtgttcgcccacatgatgatgaagctcgctcaggactcaagccagatcgagctgctgaaggagctgctggatctgcagaaggacatggtggtgatgttgctgtcgctactagaagggaacgtggtgaacggcatgatcgcccggcagatggtggacatgctcgtggaatcctcatccaatgtggagatgatcctcaagttcttcgacatgttcctgaaactcaaggacattgtgggctctgaagccttccaggactacgtaacggatccccgtggcctcatctccaagaaggacttccagaaggccatggacagccagaagcagttcagcggtccagaaatccagttcctgctttcgtgctccgaagcggatgagaacgaaatgatcaactgcgaagagttcgccaaccgcttccaggagccagcacgcgacatcggcttcaacgtggcggtgctgctgaccaacctgtcggagcatgtgccgcatgaccctcgcctgcacaacttcctggagctggccgagagcatccttgagtacttccgcccctacctgggccgcatcgagatcatgggcgcgtcacgccgcatcgagcgcatctacttcgagatctcagagaccaaccgcgcccagtgggagatgccccaggtgaaggagtccaagcgccagttcatcttcgacgtggtgaacgagggcggcgaggctgagaagatggagctcttcgtgagtttctgcgaggacaccatcttcgagatgcagatcgccgcgcagatctcggagcccgagggcgagccggagaccgacgaggacgagggcgcgggcgcggcggaggcgggcgcggaaggcgcggaggagggcgcggcggggctcgagggcacggcggccacggcggcggcgggggcgacggcgcgggttgtggcggccgcaggccgggccctgcgaggcctcagctaccgcagcctgcggcggcgcgtgcggcggctgcggcggcttacggcccgcgaggcggccaccgcagtggcggcgctgctctgggcagcagtgacgcgcgctggggccgctggcgcgggggcggcggcgggcgcgctgggcctgctctggggctcgctgttcggcggcggcctggtggagggcgccaagaaggtgacggtgaccgagctcctggcaggcatgcccgaccccaccagcgacgaggtgcacggcgagcagccggccgggccgggcggagacgcagacggcgagggtgccagcgagggcgctggagacgccgcggagggcgctggagacgaggaggaggcggtgcacgaggccgggccgggcggtgccgacggggcggtggccgtgaccgatgggggccccttccggcccgaaggggctggcggtctcggggacatgggggacacgacgcctgcggaaccgcccacacccgagggctctcccatcctcaagaggaaattgggggtggatggagtggaggaggagctcccgccagagccagagcccgagccggaaccagagctggagccggagaaagccgatgccgagaatggggagaaggaagaagttcccgagcccacaccagagccccccaagaagcaagcacctccctcaccccctccaaagaaggaggaagctggaggcgaattctggggagaactggaggtgcagagggtgaagttcctgaactacctgtcccggaacttttacaccctgcggttccttgccctcttcttggcatttgccatcaacttcatcttgctgttttataaggtctcagactctccaccaggggaggacgacatggaaggctcagctgctggggatgtgtcaggtgcaggctctggtggcagctctggctggggcttgggggccggagaggaggcagagggcgatgaggatgagaacatggtgtactacttcctggaggaaagcacaggctacatggaacccgccctgcggtgtctgagcctcctgcatacactggtggcctttctctgcatcattggctataattgtctcaaggtgcccctggtaatctttaagcgggagaaggagctggcccggaagctggagtttgatggcctgtacatcacggagcagcctgaggacgatgacgtgaaggggcagtgggaccgactggtgctcaacacgccgtctttccctagcaactactgggacaagtttgtcaagcgcaaggtcctggacaaacatggggacatctacgggcgggagcggattgctgagctactgggcatggacctggccacactagagatcacagcccacaatgagcgcaagcccaacccgccgccagggctgctgacctggctcatgtccatcgatgtcaagtaccagatctggaagttcggggtcatcttcacagacaactccttcctgtacctgggctggtatatggtgatgtccctcttgggacactacaacaacttcttctttgctgcccatctcctggacatcgccatgggggtcaagacgctgcgcaccatcctgtcctctgtcacccacaatgggaaacagctggtgatgaccgtgggccttctggcggtggtcgtctacctgtacaccgtggtggccttcaacttcttccgcaagttctacaacaagagcgaggatgaggatgaacctgacatgaagtgtgatgacatgatgacgtgttacctgtttcacatgtacgtgggtgtccgggctggcggaggcattggggacgagatcgaggaccccgcgggtgacgaatacgagctctacagggtggtcttcgacatcaccttcttcttcttcgtcatcgtcatcctgttggccatcatccagggtctgatcatcgacgcttttggtgagctccgagaccaacaagagcaagtgaaggaggatatggagaccaagtgcttcatctgtggaatcggcagtgactactttgatacgacaccgcatggcttcgagactcacacgctggaggagcacaacctggccaattacatgtttttcctgatgtatttgataaacaaggatgagacagaacacacgggtcaggagtcttatgtctggaagatgtaccaagagagatgttgggatttcttcccagctggtgattgtttccgtaagcagtatgaggaccagcttagctgacacacccccagctggccctccacccccacctcaagtgccttattctcacagcaagccccttagtccccaagcccctccccctaaggcagctgggggagaggtgacctagtac

SEQ ID NO: 119056 - DNA, 954 bp, Homo sapiens
atggcgctggcgctgaaccgctacctgtgctggccgtgctgccgctcatcaccaagtgtgcgccgctctttgcgggcacgaacaccgcgccatcatggtggactctatgctgcataccgtgtaccgccgtctcggggtcgttcgctcaccaaggcgcagcgtgacgtcatcgaggacgcctcatgtcgctctgcagcactgttgcgccgcctggtgttcgacgtgcccatcctcaacgagttcgccaaatgccactcaagctcctcaccaaccactatgagcgctgttggaagtactatgcctacccacgggctgggccaacttcggggtcacctcagaggaggagcgcacctcacacggaaactcttctggggcatctttgactctctggcccatagaaatacgaccggagctgtaccgcatggccatgccttgtctgtgcgccattgccggggcttgccccccgactatgtggatgcctcatactcatctaaggcagagaaaaagccacagtggatgctgaaggcaactttgatccccggcctgtggagaccccaatgtgacatcccggagaagctggactccttcattaacaagtttgcggagtacacaacgagaagtgggccttcgacaaggaaaagagatttaccgctggcccatcaaggagtccctgaaggccatgattgctgggaatggacgatagagaaggccagggaggacctagatcctcgagaaggctacaaccctcagccccccgaccttagtgctgttacctgtcccgggagctgcaggccatggcagaacaactggcagaaaattaccacaacagtggggacggaagaagaagcaggagctggaagccaaaggcggtgggacccaccccctgctggtccccacgacacgctcacggccaaggagaaggcacgagatcgagagaaggcccagagctactga

SEQ ID NO: 119057 - DNA, 478 bp, Homo sapiens
gttctcagtggaatttttctttaataaaaagcagcccctaaaacatttctaacaaaaagcaccctgagaaatcaagctgcaaacatagataagcaagctagaagtttgcataggtaaatgccggcagctatgtcagaagccaggtacattcaacatggaggatatctcctctcttctctttgtcgcccccgtgtgtgggtgtcatggcaacggccaggtaaaccccatttgcataataaaagattcacgggctatgtaaatggcacacctgacacctggtcaatccaatctcctgggccctatgtgaatcaaatacggcctccttaagcccctctataaaatggaccacatctctccccaaacccagaaatccgcttgaacatccccttcctctgcatgaggaagcgcgctctctctctccctcctttcttttgcctattaaactttacgctcttaaacccaaaaaaaaaaaaaaaaa

SEQ ID NO: 119058 - DNA, 623 bp, Homo sapiens
cggggctccgaggagcttgtctgagaaagaaaggcaactcatgggtatgatcaaccagctgagcagcttccgagagcagctgttgcatgcccactatgagcaaaagaaactagctgcctctcagattgagaaacagcgtcagcatatgaagctgggcaagcaggcagcaagaacaaattgcaagacagcagcagcggcttatacagcaacaacacaaaatcaatttgctccagcaacagatccagcagttatatgctgcccagctagctgcaatgcaggtatctccaggagggaagctgccaggcataccccaaggcaaccttggtgctgctgtatctcctaccagcattcacacagacaagagcacaaacagcccaccacccaaaagcaagacttgctgtttgttactgtgggaggatgaacactctgcatctattcctgaggtcaccaaccagcaaatacatctccatctggcaagttctatcacagaccatgggggcaaagtgatttgggaaaggtgcctagaggaaagtgggaagggtgtcactggatttccagactggagtccccgttggggaagaattcctcctgaagggagtaaggaagggtttactaaggaatag

SEQ ID NO: 119059 - DNA, 512 bp, Homo sapiens
cagaagaggccctcaagaagaagaggaagccccagaagccaggcaagtacatctgccagtactgcagccggccctgtgccaagcccagcgtgctccagaagcacattcgctcacacacaggtgagaggccctacccctgcggcccctgtggcttctccttcaagaccaagagtaatctctacaagcacaggaagtcccatgcccaccgcatcaaagcaggcctggcctcaggcatgggtggcgagatgtacccacatgggctggagatggagcggatccctggggaagagtttgaggagcccactgagggagaaagcacagattctgaagaggagactagtgccacctctggtcaccctgcagagctctccccaagacccaagcagccccttctctccagcgggctatacagctctgggagccacagttccagccacgaacgctgttccctgtcacagtccagcacagcccagtcactcgaagaccccccactgtatgcggccgctctagag

SEQ ID NO: 119060 - DNA, 645 bp, Homo sapiens
atgcatgcacagacctatgcacacacggacacacgggcacagccatgcacaagcatggagaagcaggtctccttgaagcccacagaagaggcacacaagaaggagaggaagccccagaagccaggcaagtacatctgccagtactgcagccggccctgtgcaagcccagcgtgctccagaagcacattcgctcacacacaggctatgggtggcgagatgtacccacatgggctggagatggagcggatccctggggaagagtttgaggagcccactgagggagaaagcacagattctgaagaggagactagtgccacctctggtcaccctgcagagctctccccaagacccaagcagccccttctctccagcgggctatacagctctgggagccacagttccagccacgaacgctgttccctgtcccagtccagcacagcccagtcactcgaagacccccctccatttgtggaaccctcatctgagcaccccctgagccataaacctgaagacacccacacgattaagcagaagctggccctccgcttaagcgagaggaagaagcaccaagtgatcgacaggctgggcagtggcatcctggcaggcctgtcctggcagctgctcccacaaggcgaggccctgtga

SEQ ID NO: 119061 - DNA, 1023 bp, Homo sapiens
atggcagcccaccactccagcccactcaagatgcagaataaagctcataaaagtgggcagcatcggggtcggggatctgcacagcaggatggcaagggccatctagcactgaaaaccctaagcaagaaggtgagaaaagaactcagcagagtagaccagaggcattccgccagtcagctccaaaagcagaagaaggaggtggttctggcggagaagagacagctggcactagctgtccagggattatctggcctcccactgaagaaacaaatagatgccagaaagaagctaagtaaagcagtggagaagcactttctggatgacaaactcctcttgttagacactcaacaggaggcagggatgctgcttaggcagttggctaaccagaagcaatggcatcttgcttttcgagatcagcaggcctacctatttgcccatactgctgattttgttcctagtgaagagaataagttgaagatgtcagtattgaatatggtggtgaggcatgaccctggcagcactgaatctgcgaaagccaaggaggagctcatattccgctgtagatccaggcacttccgagcctcacctttattctctcagcatgctgcagcagacaaacataaatttcagagattcctgactgctgatatggccctggcggtgacagtatacgcaccaaccacttttcctccttcatctttgctgcttttcaagcagaaaagcaatggaatgcacaatctcattgctacaggccatcttttgctggtggatccaaacagaatggtcatcaagagagttgtcctgagtgatcctcctttcaaaatttgtactaagatggcagtggtatgttacatgttcttcaatagagaggatgtgcagtggtttaaaccagtagaactgagaacaaagtggagccgcagaggacacatccaggagccttcaggtacccatggccgcatgaagtgcagctttgataggaagctaaaatctcagaacacagaactgatgaacctttacaaatga

SEQ ID NO: 119062 - DNA, 1126 bp, Homo sapiens
gaaaaggcgcaagccctagaagacctggctggcttcaaagacccagcaccaggtcatactgaagaatcaatgactcatgacaaaaccaccaaaataccctgcaaatcaccaccagaactagtagacactgcaacaagctcaaagaaatggcccagggcttgtggccagaaagtagaagtgaaagaagagctattagcagtcggcaagctcacacaaacatcaggggagaccacgcacaccaataaagaaccagaaggtgagggcaaaggcatgaaagcatttaagcaacctgcaaagcagaagctggacccagaaaatgtaactggcagcaggagattgccaagagtgcccaaggaaaaggcccaacccctagaagatctggccagcttccaagagctctctcaaacaccaggccacactgaggaactggcaaatggtgctgatagctttacaagtgctccaaagcaagcacctgacagtggaaaacctctaaaaatatccagaagagttcttcaggcccctaaagtagaacccgtgggagacctggtaggcaccagagactgtaaaatcacaaagcaaaagcaacacctccctgcccccactgcccttcaagaggggatgtggaaaagatggaagtgtcacaggaaccaagaggccgcactgcatgcctgcaccagaggaaatcatagaggagctgccagccagcaagaagcagagagggttgctcccagggtgagaggcaaatcacccgaacccttggtcatcatgaagagaagtctgaggacttctgcaaaaagaattgaacctgcagaagatctgaacagcaataacatgaaaaccaacaattagggtggtgatgatgatcttatgtctatacccactgaactctgtgtgaggtgccatgtcccagtgccccaggctggtcctggggtgctaaagaggaatgtgccgttacaggaatcattgaccttcaaggacgtgtttgtggacttcaccctggaggagtggcagcaacaggggtgggcctaggttctggaattcctcagcattaataacaaagtcctatgtcatgtcccctaaacagggcatctagttgggaagccagatgtgatcttcaggttgggac

SEQ ID NO: 119063 - DNA, 1094 bp, Homo sapiens
ccgcatgaattcggcacgaggaagaatcaatgactgatgacaaaaccactattataccctgcaaatcatcaccagaactagaagacaccgcaacaagctcaaagagacggcccaggacacgtgcccagaaagtagaagtgaaggaggagctgttagcagttggcaagctcacacaaacctcaggggagagcacgcacaccgacaaagagccggtaggtgagggcaaaaggcacgaaagcatttaagcaacctgcaaagcggaagctggacgcagaagatgtaattggcagcaggagacagccaagagcacctaaggaaaaggcccaacccctggaagatctggccagcttccaagagctctctcaaacaccaggccacactgaggaactggcaaatggtgctgctgatagctttacaagcgctccaaagcaaacacctgacagtggaaaacctctaaaaatatccagaagagttcttcgggcccctaaagtagaacccgtgggagacgtggtaagcaccagagaccctgtaaaatcacaaagcaaaagcaacacttccctgcccccactgcccttcaagaggggaggtggcaaagatggaagcgtcacgggaacctaagaggctgcgctgcatgccagcaccagaggaaattgtggaggagctgccaacccagcaagaagcagagggttcgctcccagggcaagaggcaaatcatccgaacccgtggtcatcatgaaggagaagtttgtaggacttctgcaaaaagaattgaacctgcggaagagctgaacagcaacgacatgaaaaccaacaaagaggaacacaaattacaagactcggtccctgaaaataagggaatatccctgcgctccagacgccaaaataagactgaggcagaacagcaaataactgaggtctttgtattagcagaaagaatagaaataaacagaaatgaaaagaagcccatgaagacctccccagagatggacattcagaatccagatgatggagcccggaaacccatacctagagacaaagtcactgagaacaaaaggtgcttgaggtctgctagacagaatgagagctcccagcct

SEQ ID NO: 119064 - DNA, 459 bp, Homo sapiens
atggccaaaccctggagggccctgtgcatcctgctgagaagcctagattcttttcttcagctctcagcttcactcacctgctttggatttatgcacaacacctacaaaaataggccatggggagtactgaggagctccacggagaggagccccagaaaagggactgcaggagacatgagggctggtggaagatttaatgctccactaataggtcaagacttgctgtttaaagaacactttgcttctaaggccctcgacacatgtactaacattgcacgcagtgcaaaaacccaaggaggtcctgtggcagccatcttgctgttactcgcctttgggccctgtatctttaaccttcgtgtcaaatttgtttcttctagaatcaaggccatcaagctacagatggtcttaccatctaccgaggacccctggaccgacccgctggcccttccactggcctaa

SEQ ID NO: 119065 - DNA, 828 bp, Homo sapiens
atgtcaaataacggcctagacattcaagacaaacccccagcccctccgatgagaaataccagcactatgattggagccggcagcaaagatgctggaaccctaaaccatggttctaaacctctgcctccaaacccagaggagaagaaaaagaaggaccgattttaccgatccattttacctggagataaaaaactagaaaagcaagagcaaacacattcaaaagctagcagaaggcaagaaataactaagatcagagcagaactgaaggaaatagagacacaaaaaacccttcaaaaaattaatgaatccaggagctggttttttgaaaggatcaacaaaattgatagaccgctagcaagactaataaagaagaaaagagagaagaatcaaatagacgcaatcaaaaatgataaaggggagatcaccaccgatcccacagaaatacaaactaccatcagagaatactataaacacctctatgcaaatcaactagaaaatctagaagaaatggataaattcctcgacacatacatcctcccaagactaaaccaggaagaagctgaatctctgaatagaccaataacaggatctgaaattgaggcaataatcaatagcttaccaaccaaaaagagtccaggaccagatggattcacagccgaattgtaccagaggtacaaggaggaaatggtaccattccttctgaaactattccaatcaacagaaaaagagggaatcctccctaactcattttatgaggccagcatcatcctgataccaaagcctggcagagacacaacaaaaaaagagaattttagccaatatccttga

SEQ ID NO: 119066 - DNA, 476 bp, Homo sapiens
  misc_feature (1)...(476): n = a,t,c or g
cgcggnngttttaaactgattgcgtggcattcgcacgagaagatctatgaaggccaagtggaggtgactggtgatgaatacaatgtggaaagcattgatggtcagccaggtgccttcacctgctatttggatgcaggccttgccagaactaccactggcaataaagtttttggtgccctgaagggagctgtggatggaggcttgtctatccctcacagtaccaaacgattccctggttatgattctgaaagctcatgctgctatacgagagaatccagtctatgaaaagaagcccaagaaagaagttaaaaagaagaggtggaaccgtcccaaaatgtcccttgctcagaagaaggatcgggtagctcaaaagaaggcaagcttcctcagagctcangagcgggctgctgagagctaaacccagcaattttctatgattttttcagatatagataataaacttatgaacagcaaaa

SEQ ID NO: 119067 - DNA, 452 bp, Homo sapiens
  misc_feature (1)...(452): n = a,t,c or g
gttaaaattaattncaccacaccccaattacaggatgatagttcgtgtgacaaacagagatatcatttgtcagattgcttatgcccgtatagagggggatatgatagtctgcgcagcgtatgcacacgaactgccaaaatatggtgtgaaggttggcctgacaaattatgctgcagcatattgtactggcctgctgctggcccgcaggatggaggagatgtataagaaagctcatgctgctatacgagagaatccagtctatgaaaagaagcccaagaaagaagttaaaaagaagaggtggaaccgtcccaaaatgtcccttgctcagaagaaggatcgggtagctcaaaagaaggcaagcttcctcagagctcaggagcgggctgctgagagctaaacccagcaattttctatgattttttcagatatagataataaacttatgaacagca

SEQ ID NO: 119068 - DNA, 88 bp, Homo sapiens
  misc_feature (1)...(88): n = a,t,c or g
atggaggagatgtataagaaagctcatgctgctatactagagaatccagtctatgaaaagaagcccaagnnnnnnnnnnnnnnnnngg

SEQ ID NO: 119069 - DNA, 1257 bp, Homo sapiens
  misc_feature (1)...(1257): n = a,t,c or g
atggggtttgttaaagttgttaagaataaggcctactttaagagataccaagtgaaatttagaagacgacgagagggtaaaactgattattatgctcggaaacgcttggtgatacaagataaaaataaatacaacacacccaaatacaggatgatagttcgtgtgacaaacagagattatcatttgccagattgcttatgcccgtatagaggggattatgatagtctgcgcagcgtatgcacccgaactgccaaaataatggtgtgaagggttggcctgacaaattatgctgcagccatattgtactggcctgctggctgggcccgcaggcttcttccataggtttggcatggacaaattctatgaaggcccaagtggaggtgactggtgatgaatacaatgtggaaagcattgatggtcagccagggtgccttcaccctgcctattgggatgccaggcccttgcccagaacctccccactggccattaaagttttttggttgccctgaaggggagcctgtggatggagggcttgtcctattccctccacagtacccaaaccgatttccctggttatggattcctgaaagccaagggaatttaaatgccagaaggtaccatcgggaaggcaccatccatgggcccagaattgttgcaggattacatgcgcctaccttaatggaagaagatgaagatgccttacaagaaacagttcgtgcgtcaatacgtaaagaacagcggtaactccagacattgatggaggagatgtataagaaagctcatgctgctatacgaggagaatccagtctatgaaaagaagcccaagaaagaagtttaaaagaaaaaggtggaaccgttcccaaaatgtcccttgctcagaagaaagatcgggtagctcaaaagaaagcaagccccctcaagagctcaggagcgggctgctgagaagctaaaccaaacaattttctataaagatttttcagatatcgctaactaaacttatgaacagccnnnnnnnnnnnnggggggggccctttaaaaagatcccttgggggggcccaagtttacgcgggcttgcaaggttatagctctctccttatggggagccttattatatcctatctggggatttttgggaaggacccttactttgggggggggacatcttggtccaaccttcctcgggagattaatcgcttaggggaatcctaaatttttaaaggggttagggggataatatattgattttttctggggggg

SEQ ID NO: 119070 - DNA, 308 bp, Homo sapiens; identical to SEQ ID NO: 116161
  misc_feature (1)...(308): n = a,t,c or g

SEQ ID NO: 119071 - DNA, 371 bp, Homo sapiens; identical to SEQ ID NO: 116162
  misc_feature (1)...(371): n = a,t,c or g

SEQ ID NO: 119072 - DNA, 1488 bp, Homo sapiens; identical to SEQ ID NO: 116165

SEQ ID NO: 119073 - DNA, 1942 bp, Homo sapiens
acagggacaggatgatacttttgaaaatggagcaggaaattattgatttcattgctgacaacaataatcattataaaaagttccctcagatgtcatcgtatcagaggatgcttgtccatcgagtggcagcttattttggattggatcacaatgtggatcaaacaggaaaatctgttatcatcaacaagaccagcagcaccagaataccagagcaaaggttttgtgaacatttaaaagatgaaaaaggtgaagaatcccagaagcggtttatcttgaagcgagataactctagtattgataaagaagacaatcagtcagtttgctcccaggaaagcctttttgtggaaaacagtaggctcttggaagacagtaacatatgcaatgagacctataagaaaagacagctctttcggggcaacagagatggctcagggagaacatctgggagtcgacagagcagctcagaaaatgaactcaagtggtctgaccaccaaagggcctggagcagcacagactccgacagttccaaccgcaatctaaagcccgccatgaccaagacggcgagttttgggggcatcacggtgctgaccaggggtgacagcacttccagtactaggagtaccgggaagctgtccaaagcaggttccgagtcttccagcagtgcaggctcctcaggatcgctgtcccgcacccatccacctctccagagcacacccctagtcgcagggtgtggcagctggctctccaggctgtgtgccttagtccagagaatggaatagggggccaggttgctcccagcagcaccagctacatcctccttccacttgaagctgcaacaggcatcccgcctggaagcatccttcttaatccacacacaggccagccctttgtgaatcccgatggaactcctgcaatatacaacccacccaccagtcagcagcccctgcgaagcgccatggtggggcagtcccaacagcagccgccacagcagcagccctccccgcagccccaacagcaggtccagccaccgcagccacagatggcaggccctctggtcactcagagtataccagcaaagaaggaactgaatgccttcagagttagaaatcaggaacagagagatacaggaactttgcatgagggttcgggaaagatctcaaggatggtgttgggatgggaaccattatcaccctatgctcctgatagagatgatgtggcaacacagtttggccagatgaccctgagccggcagtcctcgggggagactcctgaacccccatcaggtcctgtctacccatcctcccttatgccacagccggcccagcagcccagctatgtaatcgcctctacaggccagcagcttcctacaggaggattctcaggctctggccctcccatctcccagcaggtcctccagccccctccctcaccacagggatttgtgcaacagcctccgcctgcacagatgcctgtatattattacccatctggtcagtaccctacctcaaccacgcaacagtaccggcccatggccccggttcagtacaacgctcagaggagtcaacagatgccacaggcagcacagcaagcagtactggaagtgctgtcacccctggtcagcaccgtgatgcccccaaaactcgccgtcttggtcatggcgggctttagattgcggttggaactgtcggagtctgtgctgctccaggccctttggtggtcagaccacttgagttcattttctgagctgctctgtcgactcccagatgttctccctgagccatctctgttgcccctggagtacgaccaccagaaagatgcacagggacaggattaccttacatgcatggtgttggttactctcctactggaatcacctactggaatccaggaagatgatagtaatgagatatctgtcattggagctgggccctcttgtaagtaa

SEQ ID NO: 119074 - DNA, 1356 bp, Homo sapiens
atggggatgcatacgccctggtgctgcgtgtcaccctatactgtggaaagtgccacaaatgaggtggtgctggcacccatatttgagatactctccacagagtccattcaggaccagctgccctactctgtcatgctcatgtccatgctggccatcacagagggcaggcggagcttctccgtgtccgtggagaatgcctgctccaactatgttaccaccgtgcaagtaaaagaggtcaaccagatgcacatcagtcccaacagctgcaatgccatccaccccagggaccacatcctggagatcagtggaacccccacccacacactccaagtagaggagttggaggatgcaattagccagatgagccagacacttctgctgttgattgaacatgaccctgtctcccggtccccagcccagctgcggctggatgcctggctctctccccacacacagaatgctggacaccctcacgccctcagcaccctggacaccaaggataatctggaggggacactgagaagatgctccctaagactcagtaacagcatctccaagtcccctagccctagctctccaaaggagcccctgctgctcagccgtgacatcagctgctgggaatccctttgttgttccagcacttactcaaagcagaacttccggtcctgtgacctgatccacggggaggtcctggggaagggcttctttgggcaggctatcaaagtgacacacaaagccacaggcaaagtgttggtcatgaaggaattaatgcgatgtgatgaggagaaccagaagacttttctgactgaagtgaaagtgacactgccctccaaccttcttccccctggccatgatctactgcagactggagcccgagagcagactggcattctcaaaactggaggactctctgtacctgggggagctgggcatcccgccgcctgtagggctggaggagttggaccacactgtgagcatgcagtacggcctgatccaagactcaccccactagccctggcccagccccctgcaggggggtgttccacagccagcattgctcctctgttctccatccctgctgtgagcagggtttttcgggcttcccgtggattggcagcttgtttagaagcagaacaagccggcaggactatacttacatgtgaagtttgcaagcttgttgtagggttgagcctggactcccagcagcagctcagttcagtattgtgtggctggttgtgcctcagctgtccccaactgtggtctttgaaccggcatccccagcatcagcatcaccttgtagaaatgcaaaatctcaagtctcatcccagacctggtgaaacagaatctgccctttaa

SEQ ID NO: 119075 - DNA, 588 bp, Homo sapiens
atggaatatcctgatggaggctccacactagatctgttagaacctggcccgttagatgaaacccagatcattactatattaagagaaatactgaaaggacttgattacctccattcggagaagaaaatccatagaggtgttaaagcggccaacgtcctgctgtctgagcactgcgaggtgaagctggtggactttggcatggctggccaactggcagacacccagaccaaaaggaacacttttgtgggcaccccgttctggatagcacccgagaacaacccaccaacgttggaagaaaactacagtaaacccctcaaggagtttgtggaggcctgtttgaataaagagctgagctttagacccactgctaaggagttattgaagcacaagtttatactacgcgatacaaagaaaacttcctacttgaccgagctcatcgacaggtataagagatggagggcaaagcagagccaagaagactcgagctccgaggattccaactcggaaacagatggccaagactcagtggggcagcgattctggggactggatcttcacaatccaagaaaaagatcccaagaatcttga

SEQ ID NO: 119076 - DNA, 1431 bp, Homo sapiens
ggcccgcgggcctcgccgccccgcgcggatcgtcgcggcccggccgtcccgtcccaggaagtggccgtcctgagcgccatggctcactccccggtgcagtcgggcctgcccggcatgcagaacctaaaggcagacccagaagagctttttacaaaactagagaaaattgggaagggctcctttggagaggtgttcaaaggcattgacaatcggactcagaaagtggttgccataaagatcattgatctggaagaagctgaagatgagatagaggacattcaacaagaaatcacagtgctgagtcagtgtgacagtccatatgtaaccaaatattatggatcctatctgaaggatacaaaattatggataataatggaatatcttggtggaggctccgcactagatctattagaacctggcccattagatgaaacccagatcgctactatattaagagaaatactgaaaggactcgattatctccattcggagaagaaaatccacagagacattaaagcggccaacgtcctgctgtctgagcatggcgaggtgaagctggcggactttggcgtggctggccagctgacagacacccagatcaaaaggaacaccttcgtgggcaccccattctggatggtttcccgaggtcatcaaacaggcgggctatgactcgaaggcagacatctggtccctgggcataacagctattgaacttgcaagaggggaaccacctcattccgagctgcaccccatgaaagttttattcctcattccaaagaacaacccaccgacgttggaaggaaactacagtaaacccctcaaggagtttgtggaggcctgtttgaataaggagccgagctttatacccactgctaaggagttattgaagcacaagtttatactacgcaatgcaaagtaaaacttcctacttgaccgagctcatcgacaggtacaagagtatggaaggccgagcagagccatgacgactcgagctccgagggattccgacgcggaggacagatggccaagcctcggggggcagtgattctggggactggatcttcacaatccgagaaaaagatcccaagaatctcgagaatggagctcttcagccatcggacttggacagaaataagatgaaagacatcccaaagaggcctttctctcagtggttatctacaattatttctcctctgtttgcagagttgaaggagaagagccagggcttgcggaggggaacttgggggtccattgaaggagctgcgaggggccatctacctagcggaggaggcgtgccctggcatctccgacaccatggtggcccagctcgtgcagcggctccagagatactctctaagtggtggaggaacttcatcccactgaaattcctttggcatttgggggtttgtttttccttttttccttcttcat

SEQ ID NO: 119077 - DNA, 375 bp, Homo sapiens; identical to SEQ ID NO: 118686

SEQ ID NO: 119078 - DNA, 599 bp, Homo sapiens
  misc_feature (1)...(599): n = a,t,c or g
agagtctcattctgtaggccaggccggaggacgggaatgagaaaggccatgtacaagaggaagtagtcagccgctaaatccgagatggcgggtgaaaaagttgagaagccagatactaaagagaagaaacccgaagccaagaaggttgatgctggtggcaaggtgaaaaagggtaacctcaaagctaaaaagcccaagaaggggaagccccattgcagccgcaaccctgtccttgtcagaggaattggcaggtattcccgatctgccatgtattccagaaaggccatgtacaaaaaggaagtactcagccgctaaatccaaggttgaaaagaaaaagaaggagaaggttctccgcaacttgttacaaaaccaagttggtggtgacaagaaccggcggtacccgggggggntaaacttccgcaaaatgcctagaatataatcctactgaaagatgtgcctccgaaagctgttgagccacgggcaaaaaaaccctttcagtcagcacgttgagaaaaactgcgagccagcattacccccgggaccattctgattcatcctcactggacgccacaggggcaagagggtggttttcctgaacc

SEQ ID NO: 119079 - DNA, 357 bp, Homo sapiens
ctttatcattaacaaagcactacaatatccattatctcatttaattatgctaatgattttaaaacaaaacttctaccttttgtgtctcagggtctattaaccagttccaggcaccagtagctgtacagacagataccactataagaagcactgatgaaagataaacacgaaattagtaagcaaatacatacttaatatgtgatactatcaccaccagttcctactaaatgacaaccaaagaatatagcactttattaaatggaaaatgcactaactagactcaggaattagaaggcttgccatctggcttcgaggaattctcttaaacattgtgaaccttagtaattaaggatactg

SEQ ID NO: 119080 - DNA, 888 bp, Homo sapiens
cttgaggaccgtgccggacctcccgggacgacgatttcgtgcgatgcggacagggcagcggcggtgacccgagctgccgcccgacatgaactcgctggagcaggcggaagatctcaaggcttttgagaggagacttactgaatatattcattgtttgcaacctgctactggacgctggagaatgcttcttatagtggtatctgtctgtacagctactggtgcctggaactggttaatagaccctgagacacaaaaggtgtccttcttcacatcattatggaatcacccatttttcaccattagctgtatcactctaataggcttgttctttgctggaatacacaagagagtagttgcaccatcaattatagctgctcgatgtcgaacggtattagcagaatacaatatgtcttgtgatgatacaggaaaactaattttgaaacctaggcctcatgttcaatgacaatcttcactcattgttatgggacttagaatagcctttcttcgaataagtgatacagcaaaaagccataaaggattccttttgcggttggatatgtaaaggtcatagcagcaactgacaagaagtgtgcaatatttacctggattatcttgatgatggtgactcattatcagtgctttggtacttttgattacctgtgtttcagtattagagtcactttagtacttcagatcctgcaaatatttttgcagatgaagtatgtatgtatgttactaagttaaacttagaaacagaacctgattcaattggtataatgtatttttgcaaactactgtaaatagcctatcaatgccaatgttaaacaaagaggaaaacgttgagcggactctgttctcttgcaccggtatttcaggaacatctgcttg

SEQ ID NO: 119081 - DNA, 2646 bp, Homo sapiens
atgggggcggtctttttcatgctgttctcgtggtggataacttcaggacacatacagctgctgtgtacccggagaagagccacagtgagcactcaccaagagtttgtggtgactgtgtcaccattttctctaggactggttgtgtctggctgcttagatgcagacaccgccatgcctggttcagcagaagagcagtttcagtggcagtcacaagatggtcaaaaagatatcgaagatgagcttacaacaggtctcgagctggtggactcctgtattaggtcactacaggaatcaggaatacttgacccacaggattattctacaggtgaaagggtgattcattttgggaaaacccttgggctcagttctgaggactattctatcatggagaagggccagatggtcaaagaagtcactgtgacccctcaggtcagcgtcttgaaggcaaatgagaccatggcttctgctctctgtggccaagaaggacatgatgatccgctgttgctcacagttcagatgtctactggaaatcattacattaaagacaatagcctgtttccctgggtgaaatggcccagcctgctctcccagagtgcacttcagctcaattccaaacctgaagggtctttccagtatccggccagctaccatagcaaccagaccctggccctgggggaaaccaccccttcacagctcccggcccgaggcacacaagcccgagctacgggccagagcttcagccagggcacgaccagccgcgccggccacctggcggggcccgagcccgcgccgccgccgccgccgccgccgcgggagccgttcgcgcccagcctgggcagcgccttccacctgcccgacgcgccgcccgccgccgccgccgccgcgctctactactccagctccacgctgcccgcgccgccgcgcgggggctccccgctggccgcgccccagggcggttcgcccaccaagctgcagcgcggcggctcggcccccgagggcgccacctacgccgcgccgcgcggctcctcgcccaagcagtcgcccagccgcctggccaagtcctacagcaccagctcgcccatcaacatcgtcgtgtcctcggccggcctgtccccgatccgcgtgacctcgccccccaccgtgcagtccaccatctcctcctcgcccatccaccagctgagctccaccatcggcacgtacgccaccctgtcgcccaccaagcgcctggtccacgcgtccgagcagtacagcaagcactcgcaggagctgtatgccacggccaccctccagaggccgggcagcctggcagctggttcccgagcctcatacagcagccagcatgggcacctgggcccagagttgcgggccctgcagtccccagaacaccacatagatcccatctatgaagaccgcgtctatcagaagccccctatgaggagtctcagccagagccagggggaccctctgccgccagcacacaccggcacctaccgcacgagcacagccccatcttcccctggtgtcgactccgtccccttgcagcgcacaggcagccagcacggcccacagaatgccgccgcggccaccttccagagggccagctatgccgccggcccagcctccaattacgcggacccctaccgacagctgcagtattgtccctctgttgagtctccatacagcaaatccggccctgctctcccgcctgaaggcaccttggccaggtccccgtccattgatagcattcagaaagatcccagcaaataccccatcctttgcgatggtggaaatccgttttgtgctctcgtatacagaccttcctctagggaacgagcctcttctcttccaaatccatgtgctatcagtaaaacagactgtaccccaagttcagaagagttctgggaagtggtttcgaaggaatgcaaagaaggttctgtgcttcaaaaggtatcaaaggaagattttgtgggtctagtcttgaacaagattgtgaacatggaggacagcacccctgctacccaaagttggttcccacgttgtggaaccctcaccagagagagggaaaccaaaaaaattcagaaagagtatgatgcgtatagagaagcaaaagttactgatcatgggagttgcagtcgtgtggagggagggatagaacaggacaccaccagaggcgttgtgtggcaggcccagtttccaacagagctccccagggctttccatttttctgggggcttggacctgggaggcaggaattccagttgttcccagaggtctctgaagaagggcccagagtgtcggggacttggaagaggatctcgggactggaagtcagagaaagtgcaaagcttgtcactgagccttggaaaaaccttgtccctgagcaccctgagcagccgtactgaggctggggagcctgcacaggcctataagatcctagccctgtttcctgctgctgccccaaatcctgctcagggaggaggaggagggacaggaagaaatctgaacaacaactcttcttgtgacggagttgaaaagcagacctatctgtacaagtcaactctaactggaatgtcactgggttctgaaggggttgaaggaaagtgtcagtccaaacacacagaagctctggaacaaacaggagtttag

SEQ ID NO: 119082 - DNA, 5461 bp, Homo sapiens
gccagcatcccttgtcccgcggccggctcagacaacaaaagcggaagatgctgcagttgggcaaggtcaggaccttgccttgaaagccgggcggcgccgcgcaacgcctcttcccggactgaggagctgtcgccggcggagggtgcatgtttgcgaggaagccgccgggcgccgcgcctttgggagctatgcctgttccagaccagccttcatcagcctcagagaagacgagttccctgagccccggcttaaacacctccaacggggatggctctgaaacagaaaccacctctgccatcctcgcctcagtcaaagaacaggaattacagtttgaaaggctgacccgagagctggaggctgaacggcagatcgtagccagccagctggagcgatgcaagctcggatccgagactggcagcatgagcagcatgagttcagcagaagagcagtttcagtggcagtcacaagatggtcaaaaagatatcgaagatgagcttacaacaggtctcgagctggtggactcctgtattaggtcactacaggaatcaggaatacttgacccacaggattattctacaggtgaaaggcccagcctgctctcccagagtgcacttcagctcaattccaaacctgaagggtctttccagtatccggccagctaccatagcaaccagaccctggccctgggggaaaccaccccttcacagctcccggcccgaggcacacaagcccgagctacgggccagagcttcagccagggcacgaccagccgcgccggccacctggcggggcccgagcccgcgccgccgccgccgccgccgccgcgggagccgttcgcgcccagcctgggcagcgccttccacctgcccgacgcgccgcccgccgccgccgccgccgcgctctactactccagctccacgctgcccgcgccgccgcgcgggggctccccgctggccgcgccccagggcggttcgcccaccaagctgcagcgcggcggctcggcccccgagggcgccacctacgccgcgccgcgcggctcctcgcccaagcagtcgcccagccgcctggccaagtcctacagcaccagctcgcccatcaacatcgtcgtgtcctcggccggcctgtccccgatccgcgtgacctcgccccccaccgtgcagtccaccatctcctcctcgcccatccaccagctgagctccaccatcggcacgtacgccaccctgtcgcccaccaagcgcctggtccacgcgtccgagcagtacagcaagcactcgcaggagctgtatgccacggccaccctccagaggccgggcagcctggcagctggttcccgagcctcatacagcagccagcatgggcacctgggcccagagttgcgggccctgcagtccccagaacaccacatagatcccatctatgaagaccgcgtctatcagaagccccctatgaggagtctcagccagagccagggggaccctctgccgccagcacacaccggcacctaccgcacgagcacagccccatcttcccctggtgtcgactccgtccccttgcagcgcacaggcagccagcacggcccacagaatgccgccgcggccaccttccagagggccagctatgccgccggcccagcctccaattacgcggacccctaccgacagctgcagtattgtccctctgttgagtctccatacagcaaatccggccctgctctcccgcctgaaggcaccttggccaggtccccgtccattgatagcattcagaaagatcccagagaatttggatggagagacccggaactgccggaagtgattcagatgttgcagcaccagtttccctcggtccagtctaacgcggcagcctacttgcaacacctctgttttggagacaacaaaattaaagccgagataaggagacaaggaggcatccagctcctggtggacctgttggatcatcggatgaccgaagtccaccgtagtgcctgtggagctctgagaaacctggtgtatgggaaggccaacgatgataacaaaattgccctgaaaaactgtggtggcatcccagcactggtgaggttactccgcaagacgactgacctggagatccgggagctggtcacaggagtcctttggaacctctcctcatgcgatgcactcaaaatgccaatcatccaggatgccctagcagtactgaccaacgcggtgattatcccccactcaggctgggaaaattcgcctcttcaggatgatcggaaaatacagctgcattcatcacaggtgctgcgtaacgccaccgggtgcctaaggaatgttagttcggccggagaggaggcccgcagaaggatgagagagtgtgatgggcttacggatgccttgctgtacgtgatccagtctgcgctggggagcagtgagatcgatagcaagaccgttgaaaactgtgtgtgcattttaaggaacctctcgtaccggctggcggcagaaacgtctcagggacagcacatgggcacggacgagctggacgggctactctgtggcgaggccaatggcaaggatgctgagagctctgggtgctggggcaagaagaagaagaaaaagaaatcccaagatcagtgggatggagtaggacctcttccagactgtgctgaaccaccaaaagggatccagatgctgtggcacccatcaatagtcaaaccctacctcacactgctctctgagtgctcaaatccagacacgctggaaggggcggcaggcgccctgcagaacttggctgcagggagctggaagtggtcagtatatatccgagccgctgtccgaaaagagaaaggcctgcccatcctcgtggagctgctccgaatagacaatgaccgtgtggtgtgcgcggtggccactgcgctgcggaacatggccttggacgtcagaaataaggagctcatcggcaaatacgccatgcgagacctagtccacaggcttccaggagggaacaacagcaacaacactgcaagcaaggccatgtcggatgacacagtgacagctgtctgctgcacactgcacgaagtgattaccaagaacatggagaacgccaaggccttacgggatgccggtggcatcgagaagttggtcggcatctccaaaagcaaaggagataaacactctccaaaagtggtcaaggctgcatctcaggtcctcaacagcatgtggcagtaccgagatctgaggagtctctacaaaaaggatggatggtcacaataccactttgtagcctcgtcttcaaccatcgagagggaccggcaaaggccctactcctcctcccgcacgccctccatctcccctgtgcgcgtgtctcccaacaaccgctcagcaagtgccccagcttcacctcgggaaatgatcagcctcaaagaaaggaaaacagactacgagtgcaccggcagcaacgccacctaccacggagctaaaggcgaacacacttccaggaaagatgccatgacagctcaaaacactggaatttcaactttgtataggaattcttatggtgcgcccgctgaagacatcaaacacaaccaggtttcagcacagccagtcccacaggagcccagcagaaaagattacgagacctaccagccatttcagaattccacaagaaattacgatgagtccttcttcgaggaccaggtccaccatcgccctcccgccagcgagtacaccatgcacctgggtctcaagtccaccggcaactacgttgacttctactcagctgcccgtccctacagtgaactgaactatgaaacgagccactacccggcctcccccgactcctgggtgtgaggagcagggcacaggcgctccgggaaacagtgcatgtgcatgcataccacaagacatttctttctgttttggtttttttctcctgcaaatttagtttgttaaagcctgttccataggaaggctgtgataaccagtaagggaaatattaagagctattttagaaagctaaatgaatcgcaagtttaacttggaaatcagtagaaagctaaagtgatcctaaatatgacagtgggcagcacctttcctagcgtgagctgttaggagtaacgagaagtgctttatactgaacgtgggttgatgggagggtggagacgaggcattcgggccggtggggcgtaagggttatcgttaagcacaagacacagaatagtttacacactgtgtgggggacggcttctcacgctttgtttactctcttcatccgttgtgactctaggcttcaggttgcattggggttcctctgtacagcaagatgtttcttgccttttgttaatgcattgttgtaaagtatttgatgtacattacagattaaagaagaaaagcgcgttgtgtatattacaccaatgccgccgtgtttcctcatctatggttctaaatattgcttcaatttcaaacttttgaaagatgtatggatttccagtttttctttactttctcccagtatgttttaacaaaaaaaaaaaaaaagcaggaaaaaaggaatatttagcagtattgttcgttctgatatgtgaatttgtttgtgacaactaaacaaggcattcagcagtttctgacaattaacatacatcattccacactccttgtcaacaaagtgctttttcactgcctaagattttagatgtagatatttgaaatagattttttcatttataccagttttctttatgatgatacagtgttaaaagaaaataaattacaattgatctgtcatccatatttgctaagaatgtctatttccaagaacctatatcttacaaaatacacattcttgcttgtgtgtctgtgtgtgtgggtgtatgtatgtccacgtactagaaaaattacctgtgtgagattttattttgacagaagctatttcatttgctgttcatcttgtacaaactttgtttttggttttttagtataaatgtacatcagtttgttccttttgtactgtatctattcttctgaccatctagtgactcaggatattaggcccagttgaagtggagttatggggattttccacacattcacgcatacttggatatcaaccctctctacaggtccgtttccttacacattttatccccctcagaacacgataaaccatggccaattcagtttcactttggggcccaattacttgaagtatcccacagaaaatgtaaactgctcgccttattcccccaaactttttgttcatgtggcagggagcagtacacaactatggaatagattattaaaactgaacttgaagctaacgttagaatagtggttaacagagctaagaaataaggctaaccatcgaaaagaacatgggccgcgggtaaactagctttgctctttagatgcaagtggctgaggccaataggtgcctagtaaatgttaactgttcttggaaaaaataaaaacatcagtaacaaaaaaaaaaa

SEQ ID NO: 119083 - DNA, 595 bp, Homo sapiens
atgcaggtctgcagctcagggggacgcattttgagggtctcaggaacagagaggcagctcagacgcgagggtggacggttttgcctcgggagaggtgtcagaaacctccgggaaggcggagcattgagggcgcccttcactgccccttccttgaccgcactgcccccagacatcgtggacatcaagccggccaactatggaggaccttacggaggtgaccacagcatctgagtcccacccgcaccactgcaacctcttcgtttacagcagcagcaagggcttcctgcggctctgcgacatgcgggcagctgccctgtgtgacaagcattccaagcacccttgtgatgacattgggcccatccagattatccagggtcacctccgtacctcaaggggctggatgatcatcttgccagctttgcagagcaccttcaggtgccggatggatgaacagaacctcagagcctttctcgctccaaggctgtgtgatttttcaacatcacaaccccagccaggctcaccggagcagccagtgatgtctgggctcatcagtccttggacaaagccctccaggagctctgtcttctcaatgtaa

SEQ ID NO: 119084 - DNA, 897 bp, Homo sapiens
atggacacaggaaggggaacaagacacactgggcctgggcagagcattctgctaagtgatgaatccagcgaggctgattctcagagtgaagacgatgatgaagaagaactcaatctcagcagagaagaacttcacaacatgcttcgactacacaaatataagaaacttcaccaaaataagtatagtaaagacaaggagcctgcgggaacaaatatcccaggatcccgggcggtttcgattgacgttacttccgggaaaagtaaccttgcatcggcggttgcgggcctggaaagctctcgcgacattttctcctgcgagatctgcttgctcactgtagcgatgacaccctcctcctcctccccgccgcctttcggcaatcttcgccagtcccagtcccgactaatctgtactcagatggcatggatcagggtctcccctcgaaccccggttcgcacggggcgtcaggtggcagcggcggggtgcgagctgcgcgaggccgacggcagcggcactacgggtgggcacgggcaggcgacgagcattgaatgtgggcggggtggggatactccatatcaagaagcagaatgtcctgagtgtggcagcagaaggagcgaatgtatgtcgccatggcaaactgtgctggctgcagcccttatggagggcatggacattcacatcccccatcaacaaggaagacgaagtccaagcatgccgaacatggaggaccacccatgttcgatggaaaatttcagcaacttaccgcacgctgaggaacaccggacattgttcgctgatctgatgaagattgatcggtggatggatcgaatgttgcccctctttactctaccaatctttgctggcaactcggacaatattcttttatgcattcctttttag

SEQ ID NO: 119085 - DNA, 3210 bp, Homo sapiens
  misc_feature (1)...(3210): n = a,t,c or g
agacagatttgttctatggcctcggagttgggtgccagggatgatggaggctgcactgagctggcaaagcccctctatcttcagtacttggagagggccctccggttggaccattttctgcgacaaacgtcagctatcttcaataggaatatttctagtgatgacagtgaagatggactggatgacagtaatccattattgccccagtctggggatcccttaatacaagttaaggaagaacctccaaattcattgcttggtgaaacttctggagcaggcagttctggaatgttaaacacatattctctgaatggagttctacagtcagaatcaaaatgtgataaggggaatttatataatttctctaagctgaagaaaagcagaaagtggctaaagagcattctgctaagtgatgaatccagcgaggctgattctcagagtgaagacgatgatgaagaagaactcaatctcagcagagaagaacttcacaacatgcttcgactacacaaatataagaaacttcaccaaaataagtatagtaaagacaaggagttgcagcaatatcagtactacagtgcaggcctgctctccacatatgaccctttctatgagcaacaacggcacctacttggacccaagaaaaagaaatttaaggaggaaaagaaacttaaagctaagttgaaaaaagtgaagaaaaaaagacgaagagatgaagaactttcctctgaagaatcccctcgtcgccatcaccaccagaccaaagtctttgccaagttttctcacgatgcacctccccctggcactaagaaaaagcacttatccattgagcagctgaatgctcgtcgcaggaaagtatggctcagcattgtgaaaaaggaactaccaaaggcaaataagcagaaagcttcagctcgtaacctgtttctcaccaatagccgaaagcttgctcaccagtgcatgaaggaggtgcgtcgagctgccttgcaggcccagaagaactgtaaggaaaccttgcctcgtgcccgccgcctcaccaaggagatgcttctgtactggaagaaatatgagaaagtagagaaggagcaccgcaagagagcagagaaggaagctttggagcagcggaagttggatgaggaaatgcgggaggccaagaggcaacagcgaaaactcaacttcttaattacccagacagagttgtatgcccatttcatgagtcgcaaacgagatatgggtcatgatggtatccaggaagaaatcctaaggaaactggaagacagttctacccagagacaaatcgatataggtggaggagtggtagttaacatcacacaggaggattatgatagtaaccattttaaagcccaggccctgaagaatgctgaaaatgcttaccatattcaccaagctcggacaaggtcatttgatgaagatgcaaaagaaagtcgagcagctgccctacgggcagcaaacaagtctggcactgggtttggggagagttatagcctggctaacccatctatccgggctggtgaggatattccacagcccacaatttttaatggcaaattgaaaggttatcaactgaaaggcatgaattggttggccaatctatatgaacagggtattaatggcattcttgctgatgaaatgggccttggtaaaacagtacagagcattgcccttctggcccatctggctgagagagagaacatttggggacctttcttaataatttcagcctgcgtctacacttaacaaggggcgccaggagtttactagatttgttcctaaatttaaggtgctaccatattggggaaatcctcatgatagaaaagtcatcagaaggttctggagtcagaagaccctctacactcaggatgcccccttccatgtggttattaccagctatcagctggtggtgcaggatgtaaagtatttccagcgggtcaagtggcaatacatggtactggatgaggctcaggcgctcaagagtagttccagtgttcgttggaagatcctcttacagttccagtgtcggaatcggcttttgctaaccgggaccccaattcagaacaccatggcagagctttgggctctgctgcatttcattatgccaacattatttgattcacatgaggaatttaatgaatggttttccaaggacattgagagccatgccgaaaacaaatctgctattgatgagaatcaactttctcgcttacacatgattttgaagccatttatgctgaggagaatcaagaaagatgtggaaaatgaattatctgacaagattgagattctaatgtattgccaactgaccagccgacagaagctgctatatcaggcactaaagaacaaaatttccattgaggatttattgcagtcttctatgggctctacccaacaagcacagaacaccaccagcagcctcatgaatctggtcatgcagtttaggaaggtgtgtaatcacccggagttatttgaacggcaagaaacttggtctccatttcatatttccctaaagccataccacatttcaaagtttatctaccgtcatggacagatcagggtcttcaatcattcacgagacaggtggttaagggttctttctccatttgcaccagactatatccaacggtctctctttcacagaaaaggtattaatgaagaaagctgtttctctttccttcgctttattgatatatctccagcagaaatggcaaaccttatgcttcagggacttttggccagatggttagctcttttcctgtctctgaaagcctcctacaggctccatcagctacgctcctggggagcgccagaaggggagagccaccagagatacctgaggaacaaggatttccttcttggggttaattttccactctcctttccaaacctttgcagctgccctttgttaaagtctcttgttttcagcagccactgtaaagcagtgagtggctactcagaccaggttgtccatcagcggagatcagctacctcctcgctgcgtcgctgcctgctcactgagctgccatcttttttgtgtgtggccagtccacgagtaagtgcaaaatactgcagcgcttggagcggttacgcttccttcagctagagcaggaacatacgtgtcctcaggaaggacgcgctgaacgcttaaggnggcagcccctgaaggtactgtagtttcagaggttaatgaagcaagaa

SEQ ID NO: 119086 - DNA, 1522 bp, Homo sapiens
atggtggcacaggcctctggacaaactattcgggaggctgaagtgggaggatcacttacagcccaggaggttgaggctacaagcattctgctaagtgatgaatccagcgaggctgattctcagagtgaagacgatgatgaagaagaactcaatctcagcagagaagaacttcacaacatgcttcgactacacaaatataagaaacttcaccaaaataagtatagtaaagacaaggagtggatgtcccagctggcagccctgaactactacttagctggcggtgatgagcagaagttgctagacttgtcatactctcctccccaaaacagacagccagccatggctaaggcacataacaacaacaacaacaacaacaacaacaacaacaacaaccacaacaaaaacccaaaaaggctgttggatgaaagagagttgctcacatactccacagcaacacagagctttgatacccgcaatacaaggtcatttgatgaagatgcaaaagaaagtcgagcagctgccctacgggcagcaaacaagtctggcactgggtttggggagagttatagcctggctaacccatctatccgggctggtgaggatattccacagcccacaatttttaatggcaaattgaaaggttatcaactgaaaggcatgaattggttggccaatctatatgaacagcgcttggagcggttacgcttccttcagctagagcaggaacatacgtgtcctcaggaaggacgcgctgaacgcttaagggggcagcccctgaagctttgggctctgctgcatttcattatgccaacattatttgattcacatgaggaatttaatgaatggttttccaaggacattgagagccatgccgaaaacaaatctgctattgatgagactaagttgaaaaaagtgaagaaaaaaagacgaagagatgaagaactttcctctgaagaatcccctcgtcgccatcaccaccagaccaaagtctttgccaagttttctcacgatgcacctccccctggcactaagaaaaagcacttatccattgagcagctgaatgctcgtcgcaggaaagtatggctcagcattgtgaaaaaggaactaccaaagaagaccctctacactcaggatgcccccttccatgtggttattaccagcaatcagctggtggtgcaggatgtaaagtatttccagcgggtcaagtggcaatacatggtactggatgaggctcaggcgctcaagagtagttccagcttgactcgaagtaacgctcggtaccccttagtgtcctctcagaggaagattcatgatcaacaggttacgacggacaagagcagcaagatggaccccaaagaagaagaatatattccagcaaaacatgaaatggaaaatacaaaactacaattttacctttcggctattggtgagaaacagtgttcgttggaagatcctcttacagttccagtgtcggaatcggcttttgctaaccgggaccccaattcagaacaccatggcagag

SEQ ID NO: 119087 - DNA, 976 bp, Homo sapiens
atggggtttcaccatgttgcccgggctggtctggaactcctgacctcaggtatgtgttgttattttgcccaagaccttcggccagagcagagcataaaagcttctttgcaaagaataatactgagaaaatatgaaaaatgtggacatcacaatttacagttaaaaaaaggctataaaagtgtggatgagtacaaggtgcacaaaggaagttataatggatttaaccagtgtttgacaactacccagagcaaaatatttcagtgtgataaatatgtgaaagactttcataaattttcaaattcaaatagacatatgactgagaagaatcctttcaaatgtaaagaatgtggcaagtcattttgtgttctttcacacctaactcaacataaaagaattcacactactgtcaattcctacaaacttgaagaatgtggcaaggcctttaatgtgtcctcaaccctttctcaacatatgagaattcatacaggacaaaaacactaccaatgtggagaaatggtgcatagcctttaacaagtcctcacaccttaacacacataagataattcatactggagagaaatcctacaaacgtgaagaatgtggaaaagcttttaacatatcctcacaccttactacacataagataattcatactggagagaatgcctacaaatgtaaagaatgtggcaaagcttttaaccaatcatcaacccttactagacataagataattcatgctggagagaagccctacatatgtgaacattgtggcagagcttttaaccaatcctcgaaccttactaaacataagagaattcatactggtgataaaccttataaatgtgaagaatgtggcaaagcctttaatgtgtcctcaacccttactcaacataagagaattcaacaacaacaacaacaaacaattaagcaaacaaaaaacctattaaacaacaacaacaaaaaattatgggtctag

SEQ ID NO: 119088 - DNA, 693 bp, Homo sapiens
gtatttattcgcgataagctcatggagcggcgtaaccgtcgcacaggaaggacagagaaagcgcggatctgggaagtgacggacagaacggtcaggacctggattggggaggcggttgccgccgctgctgctgacggtgtgacgttctctgttccggtcacaccacatacgttccgccattcctatgcgatgcacatgctgtatgccggtataccgctgaaagttctgcaaagcctgatgggacataagtccatcagttcaacggaagtctacacgaaggtttttgcgctggatgtggctgcccggcaccggatcagaaaatctgatggcaccctacaggaacatgacggtatctgcgagatccatgttgctaaatatgctgaaatattcggattgacctctgcggaagccagtaaggatatacggcaggcattgaagagtttcgcggggaaggaagtggttttttatcgccctgaagaggatgccggcgatgaaaaaggctatgaatcttttccttggtttatcaaacgtgcgcacagtccatccagagggctttacagtgtacatatcaacccatatctcattcccttctttatcgggttacagaaccggtttacgcagtttcggcttagtgaaacaaaagaaatcaccaatccgtatgccatgcgtgttacgaatccctgtgtcagtatc

SEQ ID NO: 119089 - DNA, 1341 bp, Homo sapiens
atggagctgaaaaccaaggctcgagaactacgtgaagaatgcagaagcctcaggagccgatgcaatcaactggaagaaagggtatcagcaatggaagatgaaatgaatgaaatgaagcgagaagggaagtttagagaaaaaagaataaaaagaaatgagcaaagcctccaagaaatatgggactatgtgaaaagaccaaatctacgtctgattggtgtacctgaaagtgatgtggagaatggaaccaagttggaaaacactctgcaggatattatccaggagaacttccccaatctagcaaggcaggccaacgttcagattcaggaaatacagagaacgccacaaagatactcctcgggaagagaaactccaagacacataattgtcagattcaccaaagttgaaatgaaggaaaaaatgttaagggcagcagagagaaagtgtgacaatctaaaaacttgtcacacttcacatggatctgtcatggcggaaacagcggttatcaatcacaagaaacgtaaaaatagcccgcgaatcgtccagtcaaacgacctcactgaggcggcatatagtctctcccgggatcaaaaacgtatgctgtatctgttcgttgaccagatcagaaaatctgatggcaccctacaggaacatgacggtatctgcgagatccatgttgctaaatatgctgaaatattcggattgacctctgcggaagccagtaaggatatacggcaggcattgaagagtttcgcggggaaagaagtggttttttatcgccctgaagaagatgccggcgatgaaaaaagctatgaacaacccagtaaggatatacggcaggcattgaagagtttcgcggggaaggaagtggttttttatcgccctgaagaggatgccggcgatgaaaaaggctatgaatcttttccttggtttatcaaacgtgcgcacagtccatccagagggctttacagtgtacatatcaacccatatctcattcccttctttatcgggttacagaaccggtttacgcagtttcggcttagtgaaacaaaagaaatcaccaatccgtatgccatgcgtttatacgaatccctgtgtcagtatcgtaagccggatggctcaggcatcgtctctctgaaaatcgactggatcatagagcgttaccagctgcctcaaagttaccagcgtatgcctgacttccgccgccgcttcctgcaggtctgtgttaatgagatcaacagcagaactccaatgcgcctctcatacattgagaaaaagaaaggccgccagacgactcatatcgtattttccttccgcgatatcacttccatgacgacaggatag

SEQ ID NO: 119090 - DNA, 906 bp, Homo sapiens
atggggatgactgatatgggcaaatctaagaaaaagagtcagggaccaccttccttccctccagggggcgcaccgccgccggctatcggagcacctgcagggcgggagcgcccacccgggactggggacccatttaatcagcgcccttgtgacaatctaaaaacttgtcacacttcacatggatctgtcatggcggaaacagcggttatcaatcacaagaaacgtaaaaatagcccgcgaatcgtccagtcaaacgacctcactgaggcggcatatagtctctcccgggatcaaaaacgtatgctgtatctgttcgttgaccagatcagaaaatctgatggcaccctacaggaacatgacggtatctgcgagatccatgttgctaaatatgctgaaatattcggattgacctctgcggaagccagtaaggatatacggcaggcattgaagagtttcgcggggaaggaagtggttttttatcgccctggagaggatgccggccatgaaaaaggctatgaatcttttccttggttatcaaacgcagtcctgagtaaagaagaggcaagtttcccttcacccagatgggacaggactgagggagatgatggggccagtcttctggggggagggcagggttgttggtggtctggagttgaaggcccatcttcagcagtgggtgagatgaaagggaagaaggtgaaacttctgaattgtgtccaggaacttggagtggaggtggattctgtggagaatgaagacagaactagctgcaaatgtgagctcctggcccctctgagcagccatattaaagatcaaagggacaaagcctgtgcattccagatggaatcaggcagcaaagcacagctacgaaagcattcttggctgtcataccctcgagtgccatga

SEQ ID NO: 119091 - DNA, 1695 bp, Homo sapiens
gcctctaaagggttcttcttttttaaaaggcgccttgtaaggcctttatccatgttgtttttagagaaaggtgttgtgacaaattgcccccttccagtggtgccaaaatcaccctccaaatgaccagtcctgtcttgtgaccaaattcccctttacccctggtaccaaattgccttcagaaaaagctgtttttttcccaaagtatccccggtttattgactcttttttatttagtgtgacaatctaaaaaacttgtcacactttcacatggatctgtcatggcggaaacagcgggttatcaatcacaagaaacgtaaaaataggccctctaatcgtccagtcaaacgccgtcactgaggcggcatatagtctctcccagggatcaaaaacgtatgctgtatctgttcgttgaccagatcagaaaatctgatggcaccctacagggaacatgacggtatctgcgagatccatgttgctaaatatgctgaaatattcgggattgaccttctggcggaagccagtaaggatatacggcaggcattgaagagtttcgcggggaaggaagtggttttttatcgccctgaagaggatgccggcgatgaaaaaggctatgaatcttttccttggtttatcaaacgtgcgcacagtccatccagagggctttacagtggacatattccccccatatctcattcctcttctttatcgggttacagaacccggttaacgcagttttcggcttagtgaaacaaaagaaatcaccaatccgtatggccatggcgttaatacgaaatccctgttgtcagtatccgtaagcccgggatgggctcaagcatcgtctctctgaaaaatcgactggatcatagagccgtaccagctgcctcaaagttaccagcgtatggcctgactttcgccggcggcttgctggcaggtcttgtgttaatgaaatccaacagccggaactccatgcgcctctcatacattgagaaaaagaaaggccgccagacgactcatatctgtgacaatctaaaaacttgtcacacttcacatggatctgtcatggcggaaacagcggttatcaatcacaagaaacgtaaaaatagcccgcgaatcgtccagtcaaacgacctcactgaggcggcatatagtctctcccgggatcaaaaacgtatgctgtatctgttcgttgaccagatcagaaaatctgatggcaccctacaggaacatgacggtatctgcgagatccatgttgctaaatatgctgaaatattcggattgacctctgcggaagccagtaaggatatacggcaggcattgaaaagtttcgcggggaaagaagtggttttttatcgccctgaagaggatgccggcgatgaaaaaggctatgaatcttttccttggtttatcaaacgtgcgcacagtccatccagagggctttacagtgtacatatcaacccatatctcattcccttctttatcgggttacagaaccggtttacacaatttcggcttattgaaacaaaagaaatcaccaatccgtatgccatgcgtttatacaaatccctgtgtcaatatcgtaaaccggatggctcaaggcatctctctttgaaaatcgactggatcatagagcggttccagctgccctcaaattaccaaccgatgcctgactttccccgccgtttcctgcaggtatga

SEQ ID NO: 119092 - DNA, 1341 bp, Homo sapiens
  misc_feature (1)...(1341): n = a,t,c or g
atgctcagggttccggagccgcggcccggggaggcgaaagcggagggggccgcgccgccgaccccgtccaagccgctcacgtccttcctcatccaggacatcctgcgggacggcgcgcagcggcaaggcggccgcacgagcagccagagacagcgcgacccggagccggagccagagccagagccagagggaggacgcagccgcgccggggcgcagaacgaccagctgagcaccgggccccgcgccgcgccggaggaggccgagacgctggcagagaccgagccanctggtggttggcagagggcagagctgcaggttatgagagacctggcacaagaggggaggtgtgacaatctaaaaacttgtcacacttcacatggatctgtcatggcggaaacagcggttatcaatcacaagaaacgtaaaaatagcccgcgaatcgtccagtcaaacgacctcactgaggcggcatatagtctctcccgggatcaaaaacgtatgctgtatctgttcgttgaccagatcagaaaatctgatggcaccctacaggaacatgacggtatctgcgagatccatgttgctaaatatgctgaaatattcggattgacctctgcggaagccaatcgtaagccggatggctcaagcatcgtctctctgaaaatgactgatcataaacgttccagctgcctaagataccagcgttgccgacttccggcgccgttctgcagaagagacgctcccaggatttggtttccagtgggagaaggaaggcgccgcaaataccatcggctgcgaggcgactgtggtggtcgaaggaacgtgatcctttgtcagctcagcggagccgaagtgatcgccgagttggctgagcagcgccgagggagtttagaatccgctgcagaaaacctaccagcttcttcgcggacacagcagctgaagccctccggatcgacacaacacaacttccgggatcgacgcaacacaacttcccgccagccccttcccttcagcgggctggacacagcccatggcggtgagaagatatcgagtgtcagcaacctggtctggacctggattggggaggcggttgccgccgctgctgctgacggtgtgacgttctctgttccggtcacaccacatacgttccgccattcctatgcgatgcacatgctgtatgccggtataccgctgaaagttctgcaaagcctgatgggacataagtccatcagttcaacggaagtctacacgaaggtttttgcgctggatgtggctgcccggcaccgggtgcagtttgcgatgccggagtctgatgcggttgcgatgctgaaacaattatcctga

SEQ ID NO: 119093 - DNA, 1350 bp, Homo sapiens
  misc_feature (1)...(1350): n = a,t,c or g
atgccgagaaagcaaggcgactaccgcaccccggtatgggaaatcgaggaccggtacttagatatgcttcgtgatctgctcaagatcgatgatattaaagggttccagcctgaagtacgtatctatcttaccagatacataaatagtaatggctcttacaccccacgaatggatgagcaagattccgatgcctgcggatgcatggacataaaaaatgctcgcgcggttattttcctcgctttccggctgtcatcattaaactgtgcaatggcgatagccttcgtcatttatgacccgcgtttatgcactggccatctgctcatcatccagctcgccaaccagaacacgataatcactttcggtaagtgcagcagctttacgacggcgactcccatcggcaatttcgggtaccgagctcgaattcgtaatcatggtcatagctgtttcctgtgtgaaatgggggaggtctccatcaccaatccgtatgccatgcgtttatacgaatccctgtgtgagtatcgtaagccggatggctcaggcatcgtctctctgaaaatcgactggatcatagagcgttaccagctgcctcaaagttaccagcgtatgcctgacttccgccgccgcttcctgcagcttgaatgtctgtatgtggactctagaggaccccccagcgcggcgacgaacgggtcgtcgcgcatccggcgcagcgtgtggaacacccacacaccgcgcaccgggatcgccaggatcagcgccgcgccgacgatgccgaactcgaacaggatccccatcgggtaccgagctcgaattcgtaatcatgggtttattgagaatatgtttttcgtctcagccaatccctgggtgagtttcaccagttttgatttaaacgtggccaatgtggacaacttcttcgcccccgttttcaccatgggcaaatattatacgcaaggcgacaaggtgctgatgccgctggcgattcangtatttattcgcgataagctcatggagcggcgtaaccgtcgcacaggaaggacagagaaagcgcggatctgggaagtgacggacagaacggtcaggacctggattggggaggcggttgccgccgctgctgctgacggtgtgacgttctctgttccggtcacaccacatacgttccgccattcctatgcgatgcacatgctgtatgccggtataccgctgaaagttctgcaaagcctgatgggacataagtccatcagttcaacggaagtctacacgaaggtttttgcgctggatgtggctgcccggcaccgggtgcagtttgcgatgccggagtctgatgcggttgcgatgctgaaacaattatcctga

SEQ ID NO: 119094 - DNA, 783 bp, Homo sapiens
atgatcgcgtattcgatagtggctccaagtggcgaagcgagcaggactgggcggcggccaaagcggtcggacagtgctccgagaacggtgactggcgatgctgtgggaatggacgatatcccgcaagaggcccggcagtaccggcctaaccaagcctatgcctacatcatccacggtgacggtgccgaggatgacgatcatcgcatagttagatttcatacacagtgcctgactgcggtcaccgtcgacagcgacacacttgcatcggatgcagcccggttaacgtgccggcacggcctgggtaaccaggtattttgtccacataaccgtgcgcaaaaagttgtggataagcaggacacagcatccttccacagcaggcatacaaccgcacaccgagggtactccgttctacaggtatttattcgcgataagctcatggagcggcgtaaccgtcgcacaggaaggacagagaaagcgcggatctgggaagtgacggacagaacggtcaggacctggattggggaggcggttgccgccgctgctgctgacggtgtgacgttctctgttccggtcacaccacatacgttccgccattcctatgcgatgcacatgctgtatgccggtataccgctgaaagttctgcaaagcctgatgggacataagtccatcagttcaacggaagtctacacgaaggtttttgcgctggatgtggctgcccggcaccgggtgcagtttgcgatgccggagtctgatgcggttgcgatgctgaaacaattatcctga

SEQ ID NO: 119095 - DNA, 436 bp, Homo sapiens
  misc_feature (1)...(436): n = a,t,c or g
gatccgatgtccgtacgccgtacatcgggnnnnnnnnnnnnnnnnnnnnnnnnnnnnnnnnnnnnnnnnnnnnnnnnnnnngctgctgctgacggtgtgacgttctctgttccggtcacaccacatacgttccgccattcctatgcgatgcacatgctgtatgccggtataccgctgaaagttctgcaaagcctgatgggacataagtccatcagttcaacggaagtctacacgaaggtttttgcgctggatgtggctgcccggcaccgggtgcagtttgcgatgccggagtctgatgcggttgcgatgctgaaacaattatcctgagaataaatgccttggcctttatatggaaatgtggaactgagtggatatgctggttttgtctgttaacaaagaaactggctggtattcactgagaaacgaacgaaacagg

SEQ ID NO: 119096 - DNA, 547 bp, Homo sapiens
ggtcaccgtcgacagcgacacacttgcatcggatgcagcccggttaacgtgccggcacggcctgggtaaccaggtattttgtccacataaccgtgcgcaaaaagttgtggataagcaggacacagcatccttccacagcaggcatacaaccgcacaccgagggtactccgttctacaggtatttattcgcgataagctcatggagcggcgtaaccgtcgcacaggaaggacagagaaagcgcggatctgggaagtgacggacagaacggtcaggacctggattggggaggcggttgccgccgctgctgctgacggtgtgacgttctctgttccggtcacaccacatacgttccgccattcctatgcgatgcacatgctgtatgccggtataccgctgaaagttctgcaaagcctgatgggacataagtccatcagttcaacggaagtctacacgaaggtttttgcgctggatgtggctgcccggcaccgggtgcagtttgcgatgccggagtctgatgcggttgcgatgctgaaacaattatcctga

SEQ ID NO: 119097 - DNA, 735 bp, Homo sapiens
atgaaactcatggaaacacttaaccagtgcataaacgctggtcatgaaatgacgaaggctatcgccattgcacagtttaatgatgacagcccggaagcgaggaaaataacccggcgctggagaataggtgaagcagcggatttagttggggtttcttctcaggctatcagagatgccgagaaagcagggcgactaccgcacccggatatggaaattcgaggacgggttgagcaacgtgttggttatacaattgaacaaattaatcatatgcgtgatgtgtttggtacgcgattgcgacgtgctgaagacgtatttccaccggtgatcggggttgctgcccataaaggtggcgtttacaaaacctcagtttctgttcatcttgctcaggatctggctctgaaggggctacgtgttttgctcgtggaagcgcggatctgggaagtgacggacagaacggtcaggacctggattggggaggcggttgccgccgctgctgctgacggtgtgacgttctctgttccggtcacaccacatacgttccgccattcctatgcgatgcacatgctgtatgccggtataccgctgaaagttctgcaaagcctgatgggacataagtccatcagttcaacggaagtctacacgaaggtttttgcgctggatgtggctgcccggcaccgggtgcagtttgcgatgccggagtctgatgcggttgcgatgctgaaacaattatcctga

SEQ ID NO: 119098 - DNA, 1113 bp, Homo sapiens
atggagaaacagtaccagaaacattcctctattggggacagggctgaattcctgttgtccattcatcctttaaccttgctgttgggcttggccttggcctgcctgcccaggcaccgagtgggccctgcctccaccatgctctcgctgcagacagcagagggcaggcgtggagcacattcccaaaggaacaactgcctggatgcagcgaaggcctgcaacctcgacgacatttgcaagaagtacaggtcggcgtacatcaccccgtgcaccaccagcgtgtccaatgatgtctgcaaccgccgcaagtgccacaaggccctccggcagttctttgacaaggtcccggccaagcacagctacggaatgctcttctgctcctgccgggacatcgcctgcacagagcggaggcgacagaccatcgtgcctgtgtgctcctatgaagagagggagaagcccaactgtttgaatttgcaggactcctgcaagacgaattacatctgcagagtgccccttctgcctgcgccacctcctgatgtggatgtgtggcccttcagctccactcagcagcggcagagctctatcagctcgggctctcagagctcattagagttcagttcctctgactataaacatcaagatgctgtgatacttacctcaacacttccttctgagggtacagacagcaccttcttaaatgaacacaggcttgatgcttcaattgccagaccagtagagggtccacaggtatttattcgcgataagctcatggagcggcgtaaccgtcgcacaggaaggacagagaaagcgcggatctgggaagtgacggacagaacggtcaggacctggattggggaggcggttgccgccgctgctgctgacggtgtgacgttctctgttccggtcacaccacatacgttccgccattcctatgcgatgcacatgctgtatgccggtataccgctgaaagttctgcaaagcctgatgggacataagtccatcagttcaacggaagtctacacgaaggtttttgcgctggatgtggctgcccggcaccgggtgcagtttgcgatgccggagtctgatgcggttgcgatgctgaaacaattatcctga

SEQ ID NO: 119099 - DNA, 1173 bp, Homo sapiens
atgacaaaggactctcagaacaaatgggaagtgaatcagaggaaaattaggagttcggtgatagaaaagcccagggaagtaagtgttttgagaaggaagtggttgactgtgtgggctgatgctgatcatcaggtcaaaatagatgagaacaaagaatgggccttcagtctgacacacagagctgcatggagtcttggcagaacagccactcaggcatgcatggaggcccaggacactcaggcatgcatggaggcccaggagctttacctactgtggcactgggctttccggcaaaatgactgccactctgtaagggttcagaaccggggtgaggctgagatggctgaaatgacagaagtagaattcagaatgtggataaacacaatcttcactgatcttaaggagcacattgtaacccaatgcaggaaagctaaaaatcataaaatattgcaggaagtgacagacaaaatagccagtatagagaagaatgtaatgaacctgatggagctgaaaaacacaatacaagaatttcataatgcaatcacaagtattaatagcagaaaagaccaagtggaggaaagaatctcagagtttgaggactgtgtttctgaaataaggcagacagacaagaatagagaaaaaagaatgaaaaggaacgaacaaaacctccaagaaatatgggattgtgtaaagagactggatctacaactaattggtgtgcctgaaagagatgttggcccagggcttctggatcaacagggacaccaggatttatttattctgcgaagtgatcttccgtcacaggtatttattcgcgataagctcatggagcggcgtaaccgtcgcacaggaaggacagagaaagcgcggatctgggaagtgacggacagaacggtcaggacctggattggggaggcggttgccgccgctgctgctgacggtgtgacgttctctgttccggtcacaccacatacgttccgccattcctatgcgatgcacatgctgtatgccggtataccgctgaaagttctgcaaagcctgatgggacataagtccatcagttcaacggaagtctacacgaaggtttttgcgctggatgtggctgcccggcaccgggtgcagtttgcgatgccggagtctgatgcggttgcgatgctgaaacaattatcctga

SEQ ID NO: 119100 - DNA, 873 bp, Homo sapiens
atggcccgatatcggttaatgcacctgcgcccaacaggcttgcccgactggaaaggggcgtcgaggatctccggggcgcggggcgcgggctggggcccagtgaggcttggcaggctgtgcgcggaccgcgccctggacggcgaaagcaggcccggagggggcggccagtccggcgtcccagcgtccgaggcgagccagaaggcggcccacggccgtcgcctcccgccctcgctcgctctcggtgcctccttggccttggcgcccactctggccgcacttgagcgcttcaacccgccgctgcactgtgggagcccctttctgggctggccaaggccggagccggctccctcagcttgcggggaggtgtggagggagaggcgcgtgcgggaactggggctgcgcacaggcttgcgggccagcgcgagttctggttggcccagggctttccggtatcaacagggacaccaggatttatttattctgcgaagtgatcttccgtcacaggtatttattcgcgataagctcatggagcggcgtaaccgtcgcacaggaaggacagagaaagcgcggatctgggaagtgacggacagaacggtcaggacctggattggggaggcggttgccgccgctgctgctgacggtgtgacgttctctgttccggtcacaccacatacgttccgccattcctatgcgatgcacatgctgtatgccggtataccgctgaaagttctgcaaagcctgatgggacataagtccatcagttcaacggaagtctacacgaaggtttttgcgctggatgtggctgcccggcaccgggtgcagtttgcgatgccggagtctgatgcggttgcgatgctgaaacaattatcctga

SEQ ID NO: 119101 - DNA, 1257 bp, Homo sapiens
atgaaactcatggaaacacttaaccagtgcataaacgctggtcatgaaatgacgaaggctatcgccattgcacagtttaatgatgacagcccggaagcgaggaaaataacccggcgctggagaataggtgaagcagcggatttagttggggtttcttctcaggctatcagagatgccgagaaagcagggcgactaccgcacccggatatggaaattcgaggacgggttgagcaacgtgttggttatacaattgaacaaattaatcatatgcgtgatgtgtttggtacgcgattgcgacgtgctgaagacgtatttccaccggtgatcggggttgctgcccataaaggtggcgtttacaaaacctcagtttctgttcatcttgctcaggatctggctctgaaggggctacgtgttttgctcgtggaaggtaacgacccccagggaacagcctcaatgtatcacggatgggtaccagatcttcatattcatgcagaagacactctcctgcctttctatcttggggaaaaggacgatgtcacttatgcaataaagcccacttgctggccggggcttgacattattccttcctgtctggctctgcaccgtattgaaactgagttaatgggcaaatttgatgaaggtaaactgcccaccgatccacacctgatgctccgactggccattgaaactgttgctcatgactatgatgtcatagttattgacagcgcgcctaacctgggtatcggcacgattaatgtcgtatgtgctgctgatgtgctgattgttcccacgcctgctgagttgtttgactacacctccgcactgcagtttttcgatatgcttcgtgatctgctcaagaacgttgatcttaaagggttcgagcctgatgtatttattcgcgataagctcatggagcggcgtaaccgtcgcacaggaaggacagagaaagcgcggatctgggaagtgacggacagaacggtcaggacctggattggggaggcggttgccgccgctgctgctgacggtgtgacgttctctgttccggtcacaccacatacgttccgccattcctatgcgatgcacatgctgtatgccggtataccgctgaaagttctgcaaagcctgatgggacataagtccatcagttcaacggaagtctacacgaaggtttttgcgctggatgtggctgcccggcaccgggtgcagtttgcgatgccggagtctgatgcggttgcgatgctgaaacaattatcctga

SEQ ID NO: 119102 - DNA, 1239 bp, Homo sapiens
atggtagagaagagagcctcaatggagaacatgggtctggatgagaacatgggtcttggtagttctcggatgggatggaagatcatcgctggggctttcaaaatagtacaacgggaaacaaggtaccgtcaactcctttccaaaagaagctcgacccccatgatagatacgctcagacccgtgcccttcgcgtcggaaatggcgatcagcaagacggtggcgtggctcaacgagcagctggagctgggcaacgagcggctgctgctgatggactgccggccgcaggagctatacgagtcgtcgcacatcgagtcggccatcaacgtggccatcccgggcatcatgctgcggcgcctgcagaagggtaacctgccggtgcgcgcgctcttcacgcgcggcgaggaccgggaccgcttcacccggcgctgtggcaccgacacagtggtgctctacgacgagagcagcagcgactggaacgagaatacgggcggcgagtcggtgctcgggctgctgctcaagaagctcaaggacgagggctgccgggcgttctacctggaaggtggcttcagtaagttccaagccgagttctccctgcattgcgagaccaatctagacggctcgtgtagcagcagctcgccgccgttgccagtgctggggctcgggggcctgcggatcagctctgactcttcctcggacatcgagtctgaccttgaccgagaccccaatagtgcaacagactcggatggtagtccgctgtccaacagccagccttccttcccagtggagatcttgcccttcctctacttgggctgtgccaaagactccaccaacttggacgtgttggaggaattccgcgatcctctccctatagtatttattcgcgataagctcatggagcggcgtaaccgtcgcacaggaaggacagagaaagcgcggatctgggaagtgacggacagaacggtcaggacctggattggggaggcggttgccgccgctgctgctgacggtgtgacgttctctgttccggtcacaccacatacgttccgccattcctatgcgatgcacatgctgtatgccggtataccgctgaaagttctgcaaagcctgatgggacataagtccatcagttcaacggaagtctacacgaaggtttttgcgctggatgtggctgcccggcaccgggtgcagtttgcgatgccggagtctgatgcggttgcgatgctgaaacaattatcctga

SEQ ID NO: 119103 - DNA, 1281 bp, Homo sapiens
atgggcaaggacttcatgtctaatacaccaaaagcaatggcaacaaaagccaaaattgacaaatcggatctaattaaactaaagagcttctgcacagcaaaagaaactaccatcagagtgaacaggcaacctacaaaatgggagaaaattttcagaaatttcttctttcgtcggcagggttggctccttctggagacaataccagcattgccaccggtgggtagaacactaagtgggctcttggagtccctgattccagaacttgactcttggatgacatttctggacctgctctgggccagagaggagaccacttcccttaaggctctggttgaagaagtgtattttgcgcagaaggaacgtgatgaagctgttatgtctagactgcaattagccattgaggagagagatgaagcaattgcacgagccaagcatatggaaatgtctctaaaagtgaaaaagaagtcttggggatcacattctgatacacagactaaagaacaacaacaacaaaaaacccagcagtcaactgtgagaaagaggactgaggaggacaccaggggaacacaaggaaatagcttcacagtgtggcactctgacaaccttatatcttcacatagaccaagcaggcaaggctgtgcaggctgcgagctcgttgacgcatctcagcccactcccttgtcctcccgcctggcgaagatgtccgccaagcctgaagtcagcttagtgcgcgaggcttctcggcagatcgtggccggtggttctgcagtgatcttatgtcattatggtgaaagttggaacatcttacgtgccgatcaacgtctaattttcgccaaaagttggcccagggcttcccggtatcaacagggacaccaggaaaaatatattctgcgaagtgatcttccgtcacaggtattaattcgcgataagctcatggagcggcgtaaccgtcgcacaggaaggacagagaaagcgcggatctgggaagtgacggacagaacggtcaggacctggattggggaggcggttgccgccgctgctgctgacggtgtgacgttctctgttccggtcacaccacatacgttccgccattcctatgcgatgcacatgctgtatgccggtataccgctgaaagttctgcaaagcctgatgggacataagtccatcagttcaacggaagtctacacgaaggtttttgcgctggatgtggctgcccggcaccgggtgcagtttgcgatgccggagtctgatgcggttgcgatgctgaaacaattatcctga

SEQ ID NO: 119104 - DNA, 895 bp, Homo sapiens
gaaatcccagaaagaggacagaacaaggcaaggcacagaacaaggttcagtggtggctgaccaggactcctgttatggtccagaagaggcccacgatagtgtcactcaaatcctctccagacagccctttggaaacatattccatgttcctcttcttagggatgtgggtaggagtgggggtggagatggttctgtaaagcttgaggagcaagtgaatacatatcactatcagcgaatattgttgggaatatcatcggataatgcaatcctcttagaggaagaatctgaggagggacgacccatgcatataagcaccatcaaagagccatcacctgattccccaatcttatacctgacgctgaatctcaaactccttacctcgctgatcttatttcattatggtgaaagttggaacctcttacgtgccgatcaacgtctcattttcgccaaaagttggcccagggcttcccggtatcaacagggacaccaggatttatttattctgcgaagtgatcttccgtcacaggtatttattcgcgataagctcatggagcggcgtaaccgtcgcacaggaaggacagagaaagcgcggatctgggaagtgacggacagaacggtcaggacctggattggggaggcggttgccgccgctgctgctgacggtgtgacgttctctgttccggtcacaccacatacgttccgccattcctatgcgatgcacatgctgtatgccggtataccgctgaaagttctgcaaagcctgatgggacataagtccatcagttcaacggaagtctacacgaaggtttttgcgctggatgtggctgcccggcaccgggtgcagtttgcgatgccggagtctgatgcggttgcgatgctgaaacaattatcctga

SEQ ID NO: 119105 - DNA, 1419 bp, Homo sapiens; identical to SEQ ID NO: 117440

SEQ ID NO: 119106 - DNA, 768 bp, Homo sapiens
atgtactggacagactggggagaagtgccaaagatagaacgtgctggaatggatggttcaagtcgcttcattataataaacagtgaaatttactggccaaatggactgactttggattatgaagaacaaaagctttattgggcagatgcaaaacttaatttcatccacaaatcaaatctggatggaacaaatcggaagaatgtggattccattctccaggattatgcaaattgcaaaaaatctcgtggaaacacagataatgagtatgctgttaatgaagttgtggcagggatagaagaatacttcaatgtgatgttgggcacccagctactctgcaagtttgacagaccacagtatgctgaaattcttgcagatcaccctcatgcactcatgtccaaggtatttattcgcgataagctcatggagcggcgtaaccgtcgcacaggaaggacagagaaagcgcggatctgggaagtgacggacagaacggtcaggacctggattggggaggcggttgccgccgctgctgctgacggtgtgacgttctctgttccggtcacaccacatacgttccgccattcctatgcgatgcacatgctgtatgccggtataccgctgaaagttctgcaaagcctgatgggacataagtccatcagttcaacggaagtctacacgaaggtttttgcgctggatgtggctgcccggcaccgggtgcagtttgcgatgccggagtctgatgcggttgcgatgctgaaacaattatcctga

SEQ ID NO: 119107 - DNA, 795 bp, Homo sapiens
atgggcgtcttccgaatgaagaccccaagatgggaagctgtccattgtgtttcaaaatcctcgaatagtcctacaggagcattgagagagccttggatccagctcaggagagaggagcccctgcatggctcccccattgagaaatttgtgaagtcttcagaagaacatttcccagtggcctccctgtttgcacatctgcaggtgctggtgagtgtgaaccacctgtccctgcctgacacggaaccagatccttctcaggactcacctggggctcgtcaaaacaacatccacaacctctctgtattttatgaaagggagctctttagaagaacaaagtcaggcccgacctggaaaggaaatgatcctgcagcagttctgagggcctatgccctccctaaggatttcttgggattctgggttgggggggtatttattcgcgataagctcatggagcggcgtaaccgtcgcacaggaaggacagagaaagcgcggatctgggaagtgacggacagaacggtcaggacctggattggggaggcggttgccgccgctgctgctgacggtgtgacgttctctgttccggtcacaccacatacgttccgccattcctatgcgatgcacatgctgtatgccggtataccgctgaaagttctgcaaagcctgatgggacataagtccatcagttcaacggaagtctacacgaaggtttttgcgctggatgtggctgcccggcaccgggtgcagtttgcgatgccggagtctgatgcggttgcgatgctgaaacaattatcctga

SEQ ID NO: 119108 - DNA, 1461 bp, Homo sapiens
  misc_feature (1)...(1461): n = a,t,c or g
atggcggaaacagcggttatcaatcacaagaaacgtaaaaatagcccgcgaatcgtccagtcaaacgacctcactgaggcggcatatagtctctcccgggatcaaaaacgtatgctgtatctgttcgttgaccagatcagaaaatctgatggcaccctacaggaacatgacggtatctgcgagatccatgttgctaaatatgctgaaatattcggattgacctctgcggaagccagtaaggatatacggcaggcattgaagagtttcgcggggaaggaagtggttttttatcgccctgaagaggatgccggcgatgaaaaaggctatgaatcttttccttggtttatcaaacgtgcgcacagtccatccagagggctttacagtgtacatatcaacccatatctcattcccttctttatcgggttacagaaccggtttacgcagtttcggcttagtgaaacaaaagaaatcaccaatccgtatgccatgcgtttatacgaatccctgtgtcagtatcgtaagccggatggctcaggcatcgtctctctgaaaatcgactggatcatagagcgttaccagctgcctcaaagttaccagcgtatgcctgacttccgccgccgcttcctgcagcattttctggctcatgctggctgtcccaaaggcacccagaacttcacgtttagaatgaaatttatcatcttctccattaaaaaagttttacctcctgttgacacaatcttagctcatgaccccgttatccatacttgtcatctgagagagtcctttggtagtgtctctccttcatctccaaaatctaatcggttaccatgccctgaagtgatcttatttcattatggtgaaagttggaacctcttacgtgccgatcaacgtctcattttcgccaaaagttggcccagggcttcccggtatcaacagggacaccaggatttatttattctgcgaagtgatcttccgtcacaggtatttattcgcgataagctcatggagcggcgtaaccgtcgcacaggaaggacagagaaagcgcggatctgggaagtgacggacagaacggtcaggacctggattggggaggcggttgccgccgctgctgctgacggtgtgacgttctctgttccggtcacaccacatacgttccgccattcctatgcgatgcacatgctgtatgccggtataccgctgaaagttctgcaaagcctgatgggacataagtccatcagttcaacggaagtctacacgaaggtttttgcgctggatgtggctgcccggcaccgggtgcagtttgcgatgccggagtctgatgcggttgcgatgctgaaacattatcctgagataaatgccttggccctttatttgaaatgtggaactgagtggatatgctngttttgtctggtaaacagagaagctggctggtattccctggagaagcgaaccaaacaatga

SEQ ID NO: 119109 - DNA, 1206 bp, Homo sapiens
atgggggactttaacaccccactgtcaacattagacagattaatgagacagaaagttaacaaggatatccaggaattgaactcagctctgcaccaagcagatctaacagacatctacagaactcttcaccccaaatcaacagaatatacattcttctcagcaacacaccgcacttattccaaaactgaccacatagttggaagtaaagcactcctcagcaaatgtaaaagaacagaaattatgacaaactgtatctcagaccacagtgcaatcaaactagaactcaggattaagaaactcactcaaaaccgctcaactacatggaaactgaacaacctgctcctgaatgactactggggttcacacccaaagtccccccccacgggaccctgttccaaaaggcccgaaaaaaaagggcggggacgaaagcaaggtaagcaaaatctgaaagcgggctacccgggaaagcgtcagttccaaaccaggaaccccccccagaacggacagaagaacaaacacattaacccgattttaaaaattaaaaatccaaaagcatgtttccccaggattcaacctacagcagacagaaattttttttcctctgaactttttactggcatcctgctccacaaagggtaccctgctcctgctgacttaatgtctcagaactttgatgtcgttggtctcagacaccactttaccattcactatctggcaggtggtggtcttttggattgtttgcatggagttgctgctgtccagggcatcaccaagattgaagtcctcgccatcttccagtgggcagcggtagctggtgatctcagcctccagcttgagcttgatgttcagcagggcctcttactcctgggcctgacgctgtctctgaaggccagagaaagcgcgttctggggagtgacggacagaacggtcaggacttggattgggagggcggttgccgccgctgctgctgacggtgtgacgttctctgttccggtcccaccacatacgttccgccattcctatgcgatgcacatgctgtatgccggtataccgctgaaagttctgcaaagcctgatgggacataagtccatcagttcaacggaagtctacacgaaggtttttgcgctggatgtggctgcccggcaccgggtgcagtttgcgatgccggagtctgatgcggttgcgatgctgaaacaattatcctga

SEQ ID NO: 119110 - DNA, 1434 bp, Homo sapiens
atgggagaaattgcttttcccatctgtgcatctgtgatggtgggctttgacctgcagcatggtatggagagtgcaatcacgctgtggcagttcctgttgcagttgctgctggatcagaaacatgagcatttgatctgctggacctcgaacgatggtgaattcaagctcctcaaagcagaagaagtggccaagctgtggggactccgaaaaaacaaaacaaatatgaactatgataagctgagcagagccctgcgatactattatgacaagaacatcatcaagaaggtgatcgggcagaagtttgtgtacaagtttgtctctttcccggagatcctgaagatggatcctcacgcggtggagatcagccgggagagccttctgctgcaggacagcgactgcaaggcgtctccggagggccgcgaggcccacaaacacggcctggccgccctcagaagcacgagccgcaacgaatacatccactcaggcctgtactcgtccttcaccattaattccctgcagaacccaccagacgccttcaaggccatcaagacggagaagctggaggagccgcccgaagacagcccccccgtggaagaagtcaggactgtgatcaggtttgtgaccaataaaaccgacaagcacgtcaccaggccggtggtgtccctgccttccacgtcagaggctgcggcggcgtccgccttcctgttctcgtccgtctcggccaagatctcctctttaatgttgccaaacgctgccagtatttcatccgcctcacccttctcatctcggtccccgtccctgtcccccaactcacccctcccttctgaacacagaagcctcttcctggaggccgcctgccatgactccgattccctggagcccttgaacctgtcatcgggctccaagaccaagtctccatctcttcccccaaaggccaaaaaacccaaaggcttggaaatctcagcgcccccgctggtgctctccggcaccgacatcggctccatcgccctcaacagcccagccctcccctcgggatccctcaccccagccttcttcaccgcacaggtatttattcgcgataagctcatggagcggcgtaaccgtcgcacaggaaggacagagaaagcgcggatctgggaagtgacggacagaacggtcaggacctggattggggaggcggttgccgccgctgctgctgacggtgtgacgttctctgttccggtcacaccacatacgttccgccattcctatgcgatgcacatgctgtatgccggtataccgctgaaagttctgcaaagcctgatgggacataagtccatcagttcaacggaagtctacacgaaggtttttgcgctggatgtggctgcccggcaccgggtgcagtttgcgatgccggagtctgatgcggttgcgatgctgaaacaattatcctga

SEQ ID NO: 119111 - DNA, 1509 bp, Homo sapiens
  misc_feature (1)...(1509): n = a,t,c or g
acaggaagctacagacgtagaaaccaaggcagtgagtgaagtctgtctggtggcagaggaggaggaaggaggcagcccgaaagacgctgatgacacatcaatctacatgttttatcaaaaggtcggcgacaactcaatcgacagctggaaaaacgcgggccgtgtctttaaagacagcgataagttcgacgccaacgatccggggctgaaagatcagacgcaagaatggtccggttctgcaacctttacatctgacggaaaaatccgtttattctacactgactattccggtaaacattacggcaaacaaagcctgacaacagcgcaggaggctaggcagaaaatacttgacccaatcttggctaaatctctgattgggactctagaggatccccggccgctgcaaaacgctgacggaacagtagctgaatacaacggctatcacgttgtgtttgctcttgcgggaagcccgaaagacgctgatgacacatcaatctacatgttttatcaaaaggtcggcgacaactcaatcgacagctggaaaaacgcgggccgtgtctttaaagacagcgataagttcgacgccaacgatccgatcctgaaagatcagacgcaagaatggtccggttctgcaacctttacatctgacggaaaaatccgtttattctacactgactattccggtaaacattacggcaaacaaagcctgacaacagcgcaggtaaatgtgtcaaaatctgatgacacactcaaaatcaacggagtggaagatcacaaaacgatttttgacggagacggaaaaacatatcagaacgttcagcagtttatcgatgaaggcaattatacatccggcgacaaccatacgctgagagaccctcactacgttgaagacaaaggccataaataccttgtattcgaagccaacacgggaacagaaaacggataccaaggcgaagaatctttatttaacaaagcgtactacggcggcggcacgaacttcttccgtaaagaaagccagaagcttcagcagagcgctanaaaacgcgatgctgagttagcgaacggcgccctcggtatcatagagttaaatatgattaccattgaaaaagtatttattcgcgataagctcatggagcggcgtaaccgtcgcacaggaaggacagagaaagcgcggatctgggaagtgacggacagaacggtcaggacctggattggggaggcggttgccgccgctgctgctgacggtgtgacgttctctgttccggtcacaccacatacgttccgccattcctatgcgatgcacatgctgtatgccggtataccgctgaaagttctgcaaagcctgatgggacataagtccatcagttcaacggaagtctacacgaaggtttttgcgctggatgtggctgcccggcaccgggtgcagtttgcgatgccggagtctgatgcggttgcgatgctgaaacaattatcctgagaataaatgcctttgcctttatatggaaatgg

SEQ ID NO: 119112 - DNA, 1425 bp, Homo sapiens
atggggatgacagtacctgctctacttctcgggattgtcatgaggttcaaactaagcgacagagcctatgtgactgtgctggctgttaagctattgtttctcagcactaatccacctctgctctgggatgctggagctgggactctgcaaaccacgctccccctgccagctgctccttgttacgattgccaaaagcggggaatggtcacagggcacgtcccaggacaagcagaggcaagcaagcagggcacctgggacgcagcacgtcaggaggcactgactctctgtgtggaccctgcagttgcccaaccacatggaaatgctaaactctgtccttttaccatctccaatttacggacacagaccctgattagtgatgaaggcttgatgaggttaactgccttgcccaaggttacacatgatgaagcacaggttatcattagtgttagtgtattttatgtgtggcccaagacaattcttcttccaatgtggctcagggaagccaaaagattgaacaccgctgccctaggctttcacattcactcaccactcactgactcacccagagcaacttccagtcctgcaagctccattcatggctgccccagccacctgaaaagcatgccaggacctgaaatagcagccatactcgttggtctgcaaaatgcttttttctgccagtttgatatttttgtcactgtggatcctcatgttctgtatttaaaatatgaagacacttattcaggtataatcaatgcaccaagcaggctatgttctccaggtgggggccctggacagcagcagcagcatcctccggaacttattagaaatgttcctgctcccgccaatcccagacctattgaatccaaaactctaagggtggggcccagccatctgctttttaacaaggcctccaggtgtacagccaaatttgagaaccactgtgccactacacagggcattggaccagatgtcaaatgcagttggcccagggcttcccggtatcaacagggacaccaggatttatttattctgcgaagtgatcttccgtcacaggtatttattcgcgataagctcatggagcggcgtaaccgtcgcacaggaaggacagagaaagcgcggatctgggaagtgacggacagaacggtcaggacctggattggggaggcggttgccgccgctgctgctgacggtgtgacgttctctgttccggtcacaccacatacgttccgccattcctatgcgatgcacatgctgtatgccggtataccgctgaaagttctgcaaagcctgatgggacataagtccatcagttcaacggaagtctacacgaaggtttttgcgctggatgtggctgcccggcaccgggtgcagtttgcgatgccggagtctgatgcggttgcgatgctgaaacaattatcctga

SEQ ID NO: 119113 - DNA, 1404 bp, Homo sapiens
atgaaactcatggaaacacttaaccagtgcataaacgctggtcatgaaatgacgaaggctatcgccattgcacagtttaatgatgacagcccggaagcgaggaaaataacccggcgctggagaataggtgaagcagcggatttagttggggtttcttctcaggctatcagagatgccgagaaagcagggcgactaccgcacccggatatggaaattcgaggacgggttgagcaacgtgttggttatacaattgaacaaattaatcatatgcgtgatgtgtttggtacgcgattgcgacgtgctgaagacgtatttccaccggtgatcggggttgctgcccataaaggtggcgtttacaaaacctcagtttctgttcatcttgctcaggatctggctctgaaggggctacgtgttttgctcgtggaaggtaacgacccccagggaacagcctcaatgtatcacggatgggtaccagatcttcatattcatgcagaagacactctcctgcctttctatcttggggaaaaggacgatgtcacttatgcaataaagcccacttgctggccggggcttgacattattccttcctgtctggctctgcaccgtattgaaactgagttaatgggcaaatttgatgaaggtaaactgcccaccgatccacacctgatgctccgactggccattgaaactgttgctcatgactatgatgtcatagttattgacagcgcgcctaacctgggtatcggcacgattaatgtcgtatgtgctgctgatgtgctgattgttcccacgcctgctgagttgtttgactacacctccgcactgcagtttttcgatatgcttcgtgatctgctcaagaacgttgatcttaaagggttcgagcctgataaagctactcttttacaagatcccttctatgctagtgagttcagtcctgctattggaagtcaaaagccatatagttggcccagggcttcccggtatcaacagggacaccaggatttatttattctgcgaagtgatcttccgtcacaggtatttattcgcgataagctcatggagcggcgtaaccgtcgcacaggaaggacagagaaagcgcggatctgggaagtgacggacagaacggtcaggacctggattggggaggcggttgccgccgctgctgctgacggtgtgacgttctctgttccggtcacaccacatacgttccgccattcctatgcgatgcacatgctgtatgccggtataccgctgaaagttctgcaaagcctgatgggacataagtccatcagttcaacggaagtctacacgaaggtttttgcgctggatgtggctgcccggcaccgggtgcagtttgcgatgccggagtctgatgcggttgcgatgctgaaacaattatcctga

SEQ ID NO: 119114 - DNA, 873 bp, Homo sapiens
atgtcatatcaggccacaaaaataacaattcatgaaaataccactagttcttcaaactggagttcatcaggattcttaagaaatctggtgcagatcccctttgtggaggtgataatgaaggggaagaaggaagggggagcaggagttgacccagctgctgaggttggttgtgtagagcgccacccagagggggatgggccgagaaccgctggggaggtagcagccagaggtggtcctctccgacccactactctgtcgatcatcactggggaggtggaaagacaaggcaagatcctcattttgttgcctgctcaggcctgtgcgcacttactctccatggacacgacggtgagcgtggagcagcccgcggtctcgctgcccccttcactcccggacccccagcctccccagagtggaggggcaagcacacattggcccagggcttcccggtatcaacagggacaccaggatttatttattctgcgaagtgatcttccgtcacaggtatttattcgcgataagctcatggagcggcgtaaccgtcgcacaggaaggacagagaaagcgcggatctgggaagtgacggacagaacggtcaggacctggattggggaggcggttgccgccgctgctgctgacggtgtgacgttctctgttccggtcacaccacatacgttccgccattcctatgcgatgcacatgctgtatgccggtataccgctgaaagttctgcaaagcctgatgggacataagtccatcagttcaacggaagtctacacgaaggtttttgcgctggatgtggctgcccggcaccgggtgcagtttgcgatgccggagtctgatgcggttgcgatgctgaaacaattatcctga

SEQ ID NO: 119115 - DNA, 2053 bp, Homo sapiens
atgtggaagcgactttggagctgggtaacaggcagaggttggaacagtttggaggactcagaagaagacaagaaaatgtgggaaagtttggaacctcctagagacttgttgaatggctttgacaaaaatgctgatagtgatatgaacaataaggtccaggctgaagtagtctcagatgtaggtgaggaacttgttgggaactggagcaaagggactcctgaggattacccacgatttttccatatgcatcctaggacagcagaacttagtctcctggagccagtaaacagagactttcaccagaaatttgatttggttattaaggctgaacaagacaatggtcatcctcttcctgcctttgccggtctacacattgaaatactggatgaaaacaatcaaagtccatattttacaatgcccagttatcaaggctatatcctggaatctgccccagtgggagcaaccatttcggacagtctcaatttgacttcacctttaagaatagtagctctggacaaggacatagaagatacaaaagacccagagcttcacctttttctgaatgactacacctcagtcttcaccgtcacacagactggtattactcgctacctcaccttacttcaaccagtggacagggaagaacagcaaacttacaccttttcgataacagcatttgatggtgtacaagaaagtgagccagtcatcgtcaatattcaagtgatggatgcaaatgataacacgccaaccttccctgaaatatcctatgatgtgtatgtttatacagacatgagacctggggacagtgtcatacagctgctgatggcaacaaaagacactggggactactatggagggagagagggagaagagacaattgaaaaattaactattgtgtactatactcagtatctgggtgacagaatcaatcataccccaaacctcaacatcatgcaatatacccagggggcttccgaggcgatcaagcagtgtcagtcttcagccgctaagccgagaagatctgggaaggagtcagtcagccttgggccagagttccaggggctctgggagtggctgccagtgatcttatttcattatggtgaaagttggaacctcttacgtgccgatcaacgtctcattttcgccaaaagttggcccagggcttcccggtatcaacagggacaccaggatttatttattctgcgaagtgatcttccgtcacaggtatttattcgcgataagctcatggagcggcgtaaccgtcgcacaggaaggacagagaaagcgcggatttggggaagtggacggacagaacggtcaggaacctggatatgtcgaggcgggttgcccgccgctgctgctgacggtgtgacgttcatctgatcccggtccaccacaatacgttccgccattcatatgcgatgcacatggtgttatgcccggtaataccgctgaaagttttgcaaagcctgatgggacataagtccatcagttcaacggaagtctacacgaaggtttttgcgctggatgtggctgcccggcaccgggtgcagtttgcgatgccggagtctgatgcggttgcgatgctgaaacaattatccttgagaataaatgcccttggcctttatatggaaactgggaaactgagtggataatgctgttttttggctgctaaaaaaagaagctgggctgttatccccttgagaagcgaccgaaacaggccgggaaaatctccccttattggggaagatccggattatttaatctaaggaccctggggtaccggttataggaaagaatggttctgtcatgatgcctgcatgcggtaacgaaaacgatttgaatatgccttcaggaacaatacaaatctttctgcgggggtaccttgaattggagcggattatgttagcaatgggccgaacaacctaatgaacacaaaaccatgatggggcctgtccttttacagccagtagtgctcgccgcagtccagcgacagggcgaagccctcgagtgagcgagggagcacccaggaacagcacttatatattctggg

SEQ ID NO: 119116 - DNA, 432 bp, Homo sapiens
atggggccactgggcttcacccaggctgtggtgggcatggggctcacccgggccggcgggtctaaagcccccgggaacggtggcggcaagtactggattttcacaatggctcttgtacatcgaaacaatatcccggacccctgtggaactggagctcaagaactcgaaagtgcgcaaagacgtgctatccccgggccgcacagcctgtatttggtgcaggatgcgcaacttgaacatgctatggagatcgcgaaggtgtctgttcaagccttacaggcatatcgggccccacccccgaggatggagcaagcaaaccccaagaccccgccggacgccaatttatacaagaaagggccatcaccatcaccacgaagggccaacaccacaagactaggctctcgagccacaaagacgatacaccccgacagctga

SEQ ID NO: 119117 - DNA, 1407 bp, Homo sapiens
ttaaacacgaggagaggctttcagagactctttacatcggtgagcccgaaagctatggtgcaataataaggcgacccgtcgtcgaagatcgtatatctcgatgagacatctcatagtaagattgtgataagacgacagccactcaggtagtaatacaacgagcaggtgtatagaccttatactctcgagggctgggcaactctggaaccggttggaacttggtccggggcggcgggattttgccctggtgcctgggattaacccgtggaactccacggaacaggccttggcacttggcaagcccaagccaccctttgggttaccaagaacttggaaagggcaacaccggcgttcccgttggcactggcccaagtaaacagccggtataaaggctggcaccgggtggcggtaccaccagaggtgttggcgatgtggccccagaaagaattttggccgtggcaatttccaaataatgcaccgggggggttgaaaacgttggggcgttagccccccttggcccagaagcaggcggttgcgtcgcaatctcattccccctgtgggggcttccatcggagatggttccgtatgcgactcacaggagaaatcatgaaaataataacctgctttaagctggtgcctgaagaacaggacattgttgtcactccagaatacaccctgaatttcgacaatgccgacgccaaaatcagccagttcgatctcaatgccattgaagctgtcaagccagctcgcaacagatgacgatgagatagccgcgctgaccgttggcggcgtcattgttgcagaactcgaaagtgcgcaaagacgtgctatcccgcgggccgcacagcctgtatttggtgcaggatgcgcaacttgaacatgcactgcctctcgataccgcaaaagcgctggcggcagcaattgaaaagatcggcttcgatttactgatttggacatcatctcgtatccaagccgtagctctggcgtcaccgctctcgaatacttaacggtgaccacagcacttccattgcgactgaaagcgcattcattcggggtaaatctagtggcaaggccaatgtgatacttgactaggagcccagagcgacgccatcgttgcgtgaaactggtcgggcagttcgcagtaccggccagcaaacacgaaccgtaagtcacactcatatatgcgatacacgattcagctcggaggaccattgcacgaggctggacggaacagtctgaagaaagtccctgaactgaagccggccgggcatcgtcgcgtcttcggtcgtcaattcgagtcggggccgtcttatagtcccaaggatcgtttctcaattggttcacagcaacaccaatcagtgcccacatttgcacactcttgatggccacacacttccacaccaccat

SEQ ID NO: 119118 - DNA, 1672 bp, Homo sapiens
atgaatattgaatttttcgatccgcctcgcatcgtgagcggtttaaccctcaatcggatcaacatccagcacccatttcaccttacgggaatccggtattgtattgatgagcgccagcgtaccgttaatgatgtgttgcaagcgcacgcgggaagggtgctgcaacaatatctgccagcgccagcgaccgccacgtttaggtgccagagccggaaccggaccgagaacccacagtttctcgtctgccagtgggctggagaggatcagattacgcagttgttgcaggaacaatggcgcgtgctgattgttatgatcttccgcacgcacaatcacatggctggtccacggcgatggttccgtatgcgactcacaggagaaatcatgaaaataataacctgctttaagctggtgcctgaagaacaggacattgttgtcactccagaatacaccctgaatttcgacaatgccgacgccaaaatcagccagttcgatctcaatgccattgaagctgcaagccagctcgcaacagatgacgatgagatagccgcgcgtgaccgttggcggctcattgttgcagaactcgaaagtgcgcaaagacgtgctatcccgcgggccgcacagcctgtatttggtgcaggatgcgcaacttgaacatgcactgcctctcgataccgcaaaagcgctggcggcagcacttgaaaagatcggcttcgatttactgatatttgtgaagggaacttgccttgtccttcttgtggcctttgggttagtcaccacccattttcagccatgcttatttggagtgcagaatggggaacaagagacagttcagattctgctggtgggggttgtgggagggatggaaagagcagagcgcatcatcataccattcacactagccatcaacaaccagcccaccacgcgcctcaccaaaaccatagcacagggcatgcccgcaatcatacaacgcaacattcctaacccccgcatctcactccagccagcacccacgccgagacacagcgcaaacccagcgaccatgcagccacacgcccaagcaactccaactcccaaaccgcacacgaggacatacccgacgcgaccaccacaccctcagcgcagtgccacaccgggaacccaaagaacacccacccccggaccacaaacggcaagagacagagcaccaaaaccagaccacaccagaccacaaacagcacacacagctcaccacacatccaacgacccacaacagagacatcgcacacggcaacgccacacgaacaaacaacacccgcaccccgcacccccacggctccccacactcccacagaacaacaagcgacagaaaccagccgaatccgacacacgcaaacaccatacaccacacatgagacaacccaccgcgcatgcggaaacgacagcacggaacacacaagcggcacaacactgccacacacagaacacaccacaagcaaatagacacgccacaggcgaccgcccagagcaccaccaggcgagagaccgcacaaggatcgaccccaagccgaacccagatccacgaacaattacaggacatacaaaaggaacaacatacgcacacaaacatacccccctggccacccaccacatgacccggccaaccaccggccaccgccacgggacccaccactga

SEQ ID NO: 119119 - DNA, 1452 bp, Homo sapiens
ttaaacgccaaactcttcgcgataggccttaaccgccgccagatgttccgccatttccggcttctcttccaggtaagcaatcaggtctttcagggtgatgatagagatcactttgcagttgtaatcacgctcaacttcctgaatcgccgaaatctcgccgcgcccgcgttcctgacgatcgagcgaaatcaacacgccagcaagcgtcgcgccattggcctgaataatctccatcgactcgcgaatcgccgttccggcggtgatcacatcatctaccagcattacgcgtccttgtaacgcgctaccaaccagattgccgccttcaccgtggtcttttgcttctttgcggttaaagcagtacggcaggtccaggtcgtgatgctccgccagtgccacagcggttgtggtggcaatcgggatccctttgtaagcaggggccaacagcagatcgaactcaatgccggaatccaccaacgcttcagcgtaaaaacgggctaacagtgccagatcgcgcccggtattaaacagaccggcgttgaagaaataggggcttttgcgcccgcgattcagcgtaaactcgccacactttaacacctggttgctaagcgccaattccataaactggcgctgatatgggttcatgccttcgctcctcatcttacttttgtgattaaacccgatgggcaggtactcaggagcgtcgttagtcagccggagaatggcctctaccactttacctggccactcgatagcaatgcggcaaccggtatgtggcatattcgcgctaacacgggcgataatcagtatcggatgtgggatttccacgtcgaagattttatgccagagcgcatggcgctgaatctggttttgaattcggcgatatagctgccgaaaatctttcccgcacgctggatgaagttcagttgacgctggatgataaagggcgcggcgaagtttcgctggactaaaaagcgcagaataatccgtattgcagattcgctgtaccgccgggtgctgaatcatccgctcagcaaaaatagcatggtactcttccatcacattctcgacgcgaccaatttctacgacagttttatcggcataaaagtcatatgcataaagcgttggggcaacgaagattgcattgtgcatcgcaccaaaagctttcatcaaagcggcatcatcaaactcgccgaggatttctacgtttaatccctgggagttaaaccagttaagcaatttgcgccctaacattgaacgtcgcccaggaatcaaaagtcgccgttcttccagacaagccgggaacggtttttctggtggtggatttgtacaccagaaactcacgccacattcgccaattctcacggagaacaggccttcctgctgcgtagagtctatcggacagtcagaaatgatcatatccagtttatgctgacttaattgctccagcagcat

SEQ ID NO: 119120 - DNA, 424 bp, Homo sapiens
ttaaacgtagaaatcctcggcgagtttgatgatgccgctttgatgaaagcttttggtgcgatgcacaatgcaatcttcgttgccccaacgctttatgcatatgacttttatgccgataaaacactggtaccgttgaccgatgcactggcgaatacgtggcaaaagcagttcccgcttgattacggcaaagggcgactgtggggctcggtggcgtttgtcattggctcggcgctgacgggcaaactggtcactatgtttgattatcgggtgatcctcgcgctgttgacgttgggcgtggcatccatgctgctcggctttctcatccgtccgacgattcagccacaaggggcaagtctccagcaggagagcaccggttggtctgcgtggttggcgctggttcgccagaactggcgctttctggccg

SEQ ID NO: 119121 - DNA, 303 bp, Homo sapiens
atggaccgcagcagcagttcactggaattcccactgatcggcacgggtccttttcgcttaacacaattcacagcagagctggtgcgcctggaaagccatgattattaccatttacgtcatccgctgcttaaagcggagccgtccttcaacagagcacttaactgtggcatgcagaatgccctttcagagatagttcatatctctgccatctctgccatctctgccaacaagccagtcccatctgccagtgtcttcgactgcaatggtagctaccttttcagctgctactgtagtctggaatga

SEQ ID NO: 119122 - DNA, 771 bp, Homo sapiens
ttactctgctttttcttcgacgggagttgttgaggttaagggtgaagtcaatgccgccagtgagccgcctgaaacgccaatttcattgagcaaggagtcaatcagcggtgcctgtgtgcggtaagagagagcggctgataatgcttgttccgccaggtttccgccccccacattacccgtgtttgcatcacccgcagcgccgccacgattcagaccatcgacctgaataatcttgataccggcgattgacttcagccggcttttccccccgtgtggctcatatcccccgggcctttccaccctacaccttcggtcacccgcgttccgctggagaaagagatccgcaccttcgcgcaacgtctctccgtgctgcacggcatcaacgccccggagttcttcgacaagccgttgttcagttctctggtgctgacactgcgtgatgaagggtatatcagcgatagcggcgatgccgaaccggcagaaacgatgaaggtttatcagttgcagaccaacatagttattattcataaatgctttaaagcaggcttcacgctcgcggttggcaatcagtttttgttgataaacaaacagcgcgccagccaccagaattgaccagtaatatccccagcctaagccatttaactcaccgatgatcgccatcagtgccagtacgccaatctgcaaaataccaataatcaatttatcgtattggccgaacaggattgccgtggatttaatgccaatcttcacatcatcatcgcggtcaaccat

SEQ ID NO: 119123 - DNA, 1732 bp, Homo sapiens
atgagcactattcttcttccgaaaccgcagcacctggtagtctttcaggaagtcattagaagtggttctatcggctcggctgcaaaagaattagggttaactcaaccgaccgtcagtaaaatcattaacgatattgaagattattttggtgtggaattagtggtgcggaaaaataccggtgtaacattaacacctgccggtcaattgttactctcccgttccgaatccattacccgtgaaatgaaaaatatggttaatgagataagcggtatgtcttctgaggcggtggtggaagtctcatttggttttccttcattgattggttttacttttatgtcagggatgatcaacaagttcaaagaggtgttcccgaaagcgcaggtttctatgtatgaagcgcaactgtcttcgttcttaccggcaatccgcgacggtcgactggattttgcgattggtacgttaagtgcagaaatgaagcttcaggatttacatgttgagccgctgttcgagtccgagtttgtgctggtagccagtaagtcccgaacatgcaccggcaccaccacgctggagtcgttgaagaacgaacaagagatgattatgccgcaacatgaccaattacatcgctatctgtttgaaaactttgccgtgcgcggcgaactggtaaccgtttcggaaaccctgcaacagatccttgagaaccacgattatccgcagcccgttaaaaacgtgctggcagaactgctggttgcgaccagcctgttaaccgctacgctgaagtttgatggtgatatcaccgtacagctgcagggcgacggtccgatgaatctggcggttattaacggtaacaataaccagcagatgcgcggtgtggcgcgcgtgcagggcgaaattccagaaaatgccgacctgaaaacgctggtcggcaatggttacgtggtgatcaccattaccccgagcgaaggcgaacgctatcagggcgtagttggtctggaaggtgataccctggcggcctgcctggaagattactttatgcgttctgaacagctgccgacgcgcctgtttattcgcaccggcgacgtagacggcaaaccggctgcaggcggtatgttgttgcagagtgccaacccgtcgatcaaccgcggtacgctggagaaagagagccgcaccgtcgcgcaacgtctctccgtgctgcacggcatcaacgcgccggagttcttcgacaaggcggtgttcagttctctggtgctgacactgcgtgatgaagggtatatcagcgatagcggcgatgccgaaccggcagaaacgatgaaggtttatcagttgctggcggagttgattacatcagacgtgcgtttgacgattgagagtgcgacgcagggcgaagggtaatcagagagaattgccggatgcggcgaaaacgccttatccggccttccataatctgcaaattcaataaattgcgatgtgttgtgtaggcctgagaagcgccgcgcatcaggcaacccagaagaaagccggatgatcatccggcttttttacatcatcagaaatgccagtaactcattgccagccctaaaaatagtaccagaccaacatagttattattcataaatgctttaaagcaggcttcacgctcgcggttggcaatcagtttttgttgataaacaaacagcgcgccagccaccagaattgaccagtaatatccccagcctaagccatttaactcaccgat

SEQ ID NO: 119124 - DNA, 1818 bp, Homo sapiens
atgcgcaacgtgccctactccacggactctaccgttccttcagccagcgccagcgagcttatcgatcacgcgctgcaaatgaacaagtttgaagtcgagaaagacacaatcggcgacatcatcattctgccgcgcgagcaagcggtgctgatgacctactatcgcaacaacattgcgcatatgttggtgctgccttcgctgatggcggcaatcgtcacccagcatcgccacatctcccgcgacgtattgatggagcacgtcaatgtgctttacccaatgctgaaagcggagctgttcctgcgctgggatcgcgacgagttgccggacgttattgatgcgctggcaaatgagatgcaacgtcaggggctgattaccctgcaagatgatgagttgcatatcaacccggcgcattctcgcacgctacagctgctggccgcaggcgcgcgcgaaacgctgcaacgttatgccatcaccttctggttgttgagtgccaacccgtcgatcaaccgcggtacgctggagaaagagagccgcaccgtcgcgcaacgtctctccgtgctgcacggcatcaacgcgccggagttcttcgacaaggcggtgttcagttctctggtgctgacactgcgtgatgaagggtatatcagcgatagcggcgatgccgaaccggcagaaacgatgaaggtttatcagttgctggcggagttgattacatcagacgtgcgtttgacgattgagagtgcgacgcagggcgaagggggttacgccgcacaccggattttggatcaaagaaagggtacccgtgaacagatgttctattcctacttggatcaccttctcggctcccaagtgcgcgataaaggaggaccccggggccatcttcctgaacgtgctgaagaactggcttgcactcacacggggttatttgcattttacttctcacacattcatatcccctctggtgatagtaccactgccaagactttcatgtgggggacccataccctctacccactctcagtccaaatggttaagtgggtacgttacgcgttgctacgcgacgtggcgctcaacacatcagatactactctcacacgagtactcactcgagtactcatgcgccgatacgcctcaacactgtttctctctgcgaacttcctcgtttgcggtctactgcgcaactacatgagactacagcgatctcttgggttctactcaccaatagatggtctctgctgcaaaaaaaaggagacaacacaaagaaaaaaaccacgaaagacaaaacagaagacggagaagacagaaggggggaccagggcgggacgaggcaaaggacaagagacgagaaagcagaacgccgagaaaggaggagagaaccggcgggcagagaagcggagaaaaacgaaagaagaagggggaagccagaggaacaagaagaagaagagagggagaggaggacaaacagaagacaggacagaagacaaggagacggaacagaagagaagggagcgggaggaagagaaaaaggggaagggcgaagggagcgaagggagaggcgagaggagaaggagaaaaggagaaacacaaaaacgggaaggggagagaaaagcaggcgaggcggagaggccagcgaggagggaaagaagccgggaaaaagcagaaggggacagagagagcaggagaagaagagacaagcagagacgagagagactgcgagagagaaagaaggaaaagaaagacgaggagcgagacggctcagagaacgaggacattaaccatatttttcatttcacgggtaatggattcggaacgggagagtaa

SEQ ID NO: 119125 - DNA, 354 bp, Homo sapiens
atgcattttatcaagacgatccccagcaggaacagcagcggcggaataccaccaccgacgttgtgcgcacagttccacactgacacaatgccgccacgttctttctgcgaccaccagtgcaccatagtacgaccacacggcggccaccccatcccctggaaccaaccgcagaggaacaacagtacaaacatcaccgcaatgctcgatgtcgcccatggcacaaagcccataaacaacatcactgccgccgccagaatcaaacctgcgggcaggaaaacgcgcggattcgagcgatccgataccgaacccatgagtgaatttagaaaatccatttacattataattagaacctaa

SEQ ID NO: 119126 - DNA, 681 bp, Homo sapiens
atgacagataaacagcaaggcgaaaaacagaaacagaagacagaggacaagacaaagacaaaacagaaacagagaaagaacaaaacagacaagaggcgaaagacaaagaccgaaaggaacacacaacggacacccgaaaggcagacgaacacaaaccagacccggacaaaacagaaaggccggatacaggcgtcactcaggcagatactagacaagatactagcgcgcggcgggctaatgcgccagcccagatctgccgcagcctggatggcggcgttgcgtggagcccgtgaccccaaactgatcacaatggttccacactccaaaattagccggtcgatagtccgcaagggcctacctatgacagaaacacagagaagaacagagacaagcaaaaactacagaccaagagaacaacaaacaagaaacaggcaacaacaagacccaagacaacagagaacagtgcagacacatcagcaagaagagagacgagaaacaaaagacaacaacacacacacgaaaccacacgagacactagcaagaagacatcgacgacataatattcacgcgctggcagctgcggacctggtcattgaagcggcgtctgaagtctggaagtcaaaaaagcgctctttgcacagctggcggaagtttgcccccacaaacgctattgaccactaa

SEQ ID NO: 119127 - DNA, 1016 bp, Homo sapiens
atgttcgacccacggattgattccggggatcctcagatcacacatgttcggaatttactgcctggttttactgtatggacatgtgctgctgaagcgctgacccgcgcaatcgacgggatacacgcgcggctaaattcacgcgtgacgcggggaaaactgactgctgaaacctgtgaacgcacattgaaacgcctgatcccggtgaccgatattcacgcgctggcagctgcggacctggtcattgaagcggcgtctgaacgtctggaagtcaaaaaagcgctctttgcacagctggcggaagtttgcccgccacaaacgctattgaccactaacacttcgtcaatctctatacaccgcgattgctgcggagataaaaaatcctgaacgtgttgcggggctgcatttttttaacccggcaccggtgatgaagttggtggaggtggtcagtgggctggcaacggcggcggaagttgttgagcagttgtgtgaactaacgttgagttggggtaagcagcctgtgcgctgtcattcgactcctggatttatcgttaaccgtgttgcgcgtccttattattccgaggcctggcgggcactggaagagcaggttgctgcaccagaagtgattgacgctgcacttcgcgatggcgctggtttcccgatggggccgctggaattaaccggacctgattgggcaggaccgccattttgctgtcacctgttcggtgtttaacgctttctggcaggagcgtcgttttttaccttcgctggtgcaacaggaactggtgattggtggacggttgggcaagaaaagtgggctgggcgtgtacgactggcgcgcggaacgtgagccagttgttggcctggaagcggtaagcgacagttttagcccaatgaaagtagaaaagaaaagtgacggtgtcacggaaattgacgatgttttattgattgagacaccaaggcgagacggcacaggccctggcaatacgactggcacgcccggtggtagtgatcgataa

SEQ ID NO: 119128 - DNA, 1038 bp, Homo sapiens
tgggaagggtaaccatttcccggggaaccctttggcccgtgtttaaatttagagcgggaccggggggcccagtcttttttgccccttttttaggggggatggtttctccgccattgcttaatcctttggggttaaaccagatgaagcatcttacgcttacgccaaaaaagaaagcaattaacggcgtatgactttgcagataattgtgacaaagctctctattgacgtaaccacagacttataagggagatactcgcattggtgtgcgctcacgacaggcaaaaaaaaacctgccatcgctggcaggttttttatgactaaaaaacgaaattaatcgtctttcggtgcgcggttggcgcggcgacgatcgttttccgtcaggtgacgtttacgaatacggatagagctcggagtcacttctaccagttcgtcatcatcgatgaactccagagcttgttccagagtcatgcggataggcggaaccagaacaacggcttcgtcagtaccggaagcacgcatgttggtcagtttcttaccggtcaggcagtttacagtcaggtcgttagagcggctatgaataccgataatctgaccttcgtaaacttctgcaccgtgaccgaggaacagcttaccgcgatcctgcagaccgaacagcgcgaacgcgaccgctttaccctgaccgttagagatcagtacgccgttctgacgctgacccacttcacccggacgtacgtcgtcgtagtggctgaaggtggagtacagcagaccagtaccggaagtcatggtcatgaactcagaacggaagccaatcagaccacggcttgggatcacgtagtcgagacgtacgcggcctttaccgtctggattcatgtttttcaggtcgccttgacgttcgcccagcgcctgcattacagaaccctgatgctgttcttcaacgtccagagtcacgttttcatacggctcttgtttacgaccgtcgatttcacggaagataactttcggacgggataccgccagttcgaaaccttcacgacgcat

SEQ ID NO: 119129 - DNA, 4332 bp, Homo sapiens
atgaagaaggctttacgcttcgtcaccttccaccatgatacgcaccagcgacttttagtgctgcaacgcaacccacaccgaagaaaatcaacaacccggtaccgaggaattcagcaatgcactggcaaacgcggattcaggcacaggcgaacggttactggctggagcgggagcagtggctggcggtgggtgaacaatggttttggcggatggaatggtcaggcccgcatcgagcagccgcaggaaggttatgccatcatcatggaaacgacgccacctggcaccggggttaatttcatctttgtttccgaccctgcgtttgataaaggatatgcgtttgatttcttctgtctggaaccgatgagccatgcgccggatgatcatcatcgcccggaagggggtgatctcattgcgctagcaccaggggaatcaacaacttcagagatgtcgttgcgggtgccggtcgctaactgcgcggtcactaccgccagcctcgacagctactacggtgaagcgatggcgattggcgagcgtgcgccggttgcgctgctggatttcgccgcctctgcccgtctggcggtcggtgaagcgttaaccaacatcgccgcaacacaaattggcgatatcaaacgcatcaaactttccgccaactggatggcggcggcaggccaccctggtgaagatgcgggcctgtatgaagccgttaaagccgtgggcgaagagctttgtccggcgctgggcctgacgatcccggtgggtaaagactccatgtcgatgaaaacccgctggcaggaaggtaacgaagagcgcgaaatgacgtcgccgctgtcgctggtgatttctgcatttgcccgcgtggaagatgtacgtcacaccatcacgccgcagctttctaccgaagataacgcactgctgctgattgatttgggcaaaggcaataacgcgctgggcgcaacggcgctggcgcaggtttatcgtcagcttggcgacaaaccggcagatgtacgcgatgtcgcgcaactgaaaggcttctatgacgcgattcaggcgctggttgcacagcgtaagctgctggcgtatcacgaccgctctgatggcggcctgctggtaacgctggcggaaatggcctttgctggtcattgtggcattgacgcggatatcgccactctgggtgacgatcgcctggcggcgttgtttaacgaagaactgggtgcggtgattcaggttcgtgccgctgaccgtgaagcggtcgagtccgtactggcacagcatgggcttgctgattgtgtccattatgtaggtcaggcggtttccggtgaccgttttgtgattaccgccaacgggcagactgtattcagcgaaagccgcaccacgttgcgtgtctggtgttcgaggttgaacagcaggataatgaaatggtggtctatgctgccccccgtgatgtgcgtgaacgtaaacagattcagtaagatcctgccagttcacgcgtgccagactggaagtcatcagcacgccaacgtaaatcagcgcaccagctgcagcgtaacctggcaccatccccgccagcggcgacagaaagataaccagcaggaacagcagaccaacaaccactgccgtcagaccggtacgaccgccaaccgatacgccggaagaggactcaatataagccgtaacggaagaagtaccgataaacgaaccggtcacggaagagatactgtcgacatacagcgcctgcttcatgcgcgggaatttccccttctcatccgccagacctgctttatcggtcacgccaatcagcgtaccggaggagtcaaacaagttgaccaacatgaaagagaaaatcacccctgccagcccgaggagctaacgctggtgagaaatgaaaggctttttgcgtttatccttgatgcgctacgcgatgtcgacgtcacgaaactgaaaaaaccgctctacattctggcgactgctgatgaagaaaccagccacaccgtggctgagagcaacgacgagaaactgttccgcatagcgaaaatcaggaatcgaaaaatgactaagcccatcgtttttagtggcgcacagccctcaggtgaattgaccattggtaactacatgggtgcgctgcgtcatgcgactcagttcgccgaagtaggcctatcgcatcggtcactggttgtggaatcagggcgtcgcgcactggcaatctttctgcaaaaccaggtttctgtgacgtcccaggtcgatattcacccggcagcaaaaattggtcgcggtatcatgcttgaccacgcgacaggcatcgtcgttggtgaaacggcggtgattgaaaacgacgtatcgattctgcaatctgtgacgcttggcggtacgggtgtgatgattggcgcgggcgcgaaaatcctcggcaatattgaagttgggcgcggcgcgaagattggcgcaggttccgtggtgctgcaaccggtgccgccgcataccaccgccgctggcgttccggctcgtattgtcgaggaatcccccttgccgccggaagcgcagctgatgatgcagttaagcattgagaatggctataaacgctttatcacgctggttgctgatgcgcgtcattcgacgccggagcagattgataaaattgcccaggcccacgtctggaccggtcaggatgcaaaagctaacgggctggtcgatagtctcggggatttcgatgatcttaactgtagcctatatctatactataagttacaccagcaattgtccaatcggatcctgagtgatatatcgcccctgcagcgggtcataatagcggtggcggttgtaatacaggccggactcctcatcatactgctgccccggcagccggataagctgctgcagctgatgcgggttctcttcattgcgaacgtttcacaggtgatgcatatcatcggtgacgttgcaggtcgtgactgcgtactggtcgatgatatgatcgacactggcggtacgctgtgtaaagctgctgaagctctgaaagaatgtctggcctctcttccattctcttcttgtcaacatcgcgacaactttcgtaaaacatccctaccctgcttcaggtatactatgcccctcgattccacaaacatcaggcagaccatgacagacttaatccaacgccctcgtcgcctgcgcaaatctcctgcgctgcgcgctatgtttgaagagacaacacttagccttaacgacctggtgttgccgatctttgttgaagaagaaattgacgactacaaagccgttgaagccatgccaggcgtgatgcgcattccagagaaacatctggcacgcgaaattgaacgcatcgccaacgccggtattcgttccgtgatgacttttggcatctctcaccataccgatgaaaccggcagcgatgcctggcgggaagatggactggtggcgcgtatgtcgcgcatctgcaagcagaccgtgccagaaatgatcgttatgtcagacacctgcttctgtgaatacacttctcacggtcactgcggtgtgctgtgcgagcatggcgtcgacaacgacgcgactctggaaaatttaggcaagcaagccgtggttgcagctgctgcaggtgcagacttcatcgccccttccgccgcgatggacggccaggtgacgtttacgaatacggatagaggtcggagtcacttctaccagttcgtcatcatcgatgaactccagagcttgttccagagtcatgcggataggcggaaccagaacaacggcttcgtcagtaccggaagcacgcatgttgcgctgggcggcggtttcccggtcggtgcgttgttggcaaccgaagagtgcgcccgcgtgatgaccgttggcactcatggcaccacctatggcggtaatccgctggcctcggcggtggcaggcaaagtgctggagctcatcaacacaccagagatgcttaatggcgttaaacagcgtcacgactggtttgttgagcgtcttaatactattaatcaccgctatggtttgttcagtgaagttcgcggcttaggtttgctgattggctgtgtactgaatgccgattacgccgggcaagcgaaacagatctctcaggaagcggcgaaagcaggcgtgatggtactgattgcgggtggcaacgtggtgcgttttgcgcctgcgctcaatgtcagcgaagaagagccgaggttcatcatgatggtcatccgtcccgttgagcgatcagatgtctcggcgctgatgcagcttgccagcaaaacgggcggcggcttcaaacagcttcgaatcagcgataaaagcatcctgacagttaccgcccgcgaaagcccgcgatga

SEQ ID NO: 119130 - DNA, 626 bp, Homo sapiens
atgcgtgcttccggtactgacgaagccgttgttctggttccgcctatccgcatgactctggaacaagctctggagttcatcgatgatgacgaactggtagaaggggccgctgccgcttttgaagcgctggagatgatgggctcaggccgcgatcgcgaaattccgctatggcgaaggttcgcccgtggtttgacatccgttctgccctgcggcggtgggatcacgctgacgctccataaactacgcctcggcacagcctctgctccgccgtgctgaaccgcctggaacagaaaaaaccggtggggctgcgctacgatccgcaagcacaatcgctggtgtgcctgcccacgcaaacccggacgggctggaatctcaatggctttgaggccagtataacacacagggccctcagaacctcaagatacgacggacagtattactgtcagggtcctcggaccctcacgatacgacggacagtaataatgacagggtcctcggaccctcacgatacgacggacagtaataatgacagggtcctcggaccctcacgatacgacggacagtattactgtcagggtcctcggaccctcacgatacgacggacagtaataatgacagggtcctag

SEQ ID NO: 119131 - DNA, 519 bp, Homo sapiens
atgccacgctttcctgcgaagtggtgctggaaaatctcgccgcctcccctgtcgtcacgacgctggaatataccctgtttgatggcgaacgcgctggtgcacagcagcgccattgatcatttggcaattgaaaaactgaccagcgccagtcttgcttttactgtcgaacagccgcagcaatggtcagcagaatccccttatctttaccatctggtcatgacgctgaaagacgctaacggaaacgttctggaagtggtgccacaacgcgttggcttccgtgatatcaaagtgcgcgacggtctgttctggatcaataaccgttatgtgatgctgcacggcgtcaaccgtcacgacaacgatcatcgcaaaaggcgcggcgttggaatggatcgcgtcgagaaagatctccagttgatgaagcagcacaatatcaactccgtgcgtaacgctcattacagaaagaggagaaataaagaagtaagaacgaagaaaaagatagaaagtatagaagagaagtaa

SEQ ID NO: 119132 - DNA, 681 bp, Homo sapiens
atgcttcgtactactgcacccgcaacgtatctggaactggtagctgtctgtgacagccgcctttcccagcggcaggcgctggcagaaaaatacgggaatgcatccgtgtgggacgatccgcaggccatgctgctggcagtgaaacctgatgtggttagcgtctgctcacctaaccgttttcattacgaacataccctgatggcactggaagcgggctgccatgtgataacaggcgcgggaaatgtcgataccgcgcgcaaactgggcaaggtgctggcctacgactttcaccatcgttttgcgctcgatacgcaacagctgcgtgaacaggtgaccaacggcgttttgggagagatttacgttaccaccgcccgcgccctgcgtcgctgcggcgttcccggctggggtgtctttaccaataaagaactgcagggtggtggcccgctgatcgacatcggcattcacatgctggatgctgccgatgtatgtgctgggctttccgcgcgcgtcgaagattcgctgtgtggcaccattgaattacatagcggctgcattctgtggctggagacgtcatttgcgctcaacatccgcgaacatgcgattatgaacatccgcttttgtggtgataaagctggtgcgagcgtgtttccagcacatatctacaccgctacacaacgatga

SEQ ID NO: 119133 - DNA, 294 bp, Homo sapiens
ctactcctttatggtgctatattcggtggacgccgatggacggtttttagtactgcaatcctgattttccttgcgtctggctcggaattgccgtgcaaaatccgaatactcctttgggatatttatcgttatcgctttgctatgcggttttgcaggtgcaaacttgcttcgagcatgggcaatatcagtttcttctttccaaaagccaaacaaggagcgctctgtatttgcctttccggcgtcaatggcgtaccgcaggccgacggttcggtgatgtcgctggcgatgccgcat

SEQ ID NO: 119134 - DNA, 837 bp, Homo sapiens
acctctttttattaccccgcattaccctccgtttctggggcattattgcgtgttccctactcctttatggtgcctatattcggtggacgccgatggacggtttttagtactgcaatcctgattattccttgcgtctggctcggaattgccgtgcaaaatccgaatactccttttgggatatttatcgttatcgctttgctatgcggttttgcaggtgcaaactttgcttcgagcatgggcaatatcagtttcttctttccaaaagccaaacaagggagcgctcttgggattaatggcggattaggaaacttaggtgtaagtgtaatgcagctggttgcaccgctggtcatttttgtacctgtatttgcctttctcggcgtcaatggcgtaccgcaggccgacggttcggtgatgtcgctggcgaatgccgcatggatttgggtaccgctactggcgattgccacgatcgccgcatggtcagggatgaatgatatcgccagttcacgcgcctcaattgccgaccagctccctgtcttacaacgcctgcatctctggctgctgagcctgctttaccttgccaccttcggttcgtttatcggtttttctgcgggttttgccatgctggcaaaaacccagttcccggatgtgaatattctgcgcctggcgttctttggcccatttatcggtgccatcgcgcggtcggttggtggtgctatttccgataatttcggcggcgtgcgggtgacgttgatcaactctatttttatggcgattttcagtgccctgctgtttctttaccttaccgggcaaaaccccttgcggccgcatcgaatataa

SEQ ID NO: 119135 - DNA, 212 bp, Homo sapiens
tcagtatgcgtctgcgttggtgagtacggcgattgcgctgttgctggtgatgcctggcattcctgtaccctgcggcgaaccagtgaaatacacctccggggtgctgagtattttctggggggatcccgatggatgatcatcggggcttctgtaaccaggatgcatccggctcgtagtcttgtgaggaattgtgacctggataacaatgttaa

SEQ ID NO: 119136 - DNA, 327 bp, Homo sapiens
atgcagggtggttacaacattcatccgctgatcgacgcgctggatgatgccaaactggcacctattgctgccaaagcactttctcacacgctgctgatgttcgataacttctatgacgtagaagagaaagcgaaacgaggcaacgaatatgcgacaggttatgcagtcctgggcggatgcgaatggttcctgaatcgcccggcgctggctgaaaaactgaccgttactgtcttcaaagtcactggcgaaactaacaccgatgacctttctccggcaccggatgcgtggtcacgcccggatatcccactgcacgcgctgggatgctga

SEQ ID NO: 119137 - DNA, 866 bp, Homo sapiens
atggggttagcgcaagcgaagctcttgatcgaagccccggtaaacggcggccgtaactataacggtcctaaggtagcgaaattccttgtcggcggtgccagcctgaacgatgtttacctgcatcagcacgataaatatcgctacgaccgttatcatctgatccgtaaccgtgagaagacccatcattatgcccgaatgggttacacagaatattatgaatggccgcggcgttaatcgtctggatgatgttaatcggccaaaaagcccggaaatcaagaacgatattcgtctgttccgccaggagctgcgtgatgccgcttatcatttccagggcgatgccgacaacgatcagctttctgtaacgccgctagtggggctggggaaatcgagtctgttgatcaagcaccattttccatcgtatgcgttgggccgagcagaacctctccatctgttcgtcatccttcaaccggccagcaatctttgtgcgcaatattatccagctgttgcgcgaaggaaaaaaggtcgaaattactgttggtgataaacacgagaatgacttctacattccggaagatgaacctttcaagataattggcgcattgccttatctctatgagatcaatctgcgtcgtttcctgagccgtttgcagtattacgtcaatactgaccagctagtggttcgggtatgggaaagaagacgacaaccacctatcacctggaaaggatggtggggtgatgataagtggatggtgattaccgggaaataaactggacccgcgcgcctggcgtctggatctggaaaacgccattttgatccacgatccgcaacttgagctggcgccacagcgagagaaagaactggagct

SEQ ID NO: 119138 - DNA, 3486 bp, Homo sapiens
gttatgttcttctttttgccaggcctgttaatggcgtcctgggcaacccgtacgcctgctatccgcgatattctctctgtctcgatcgctgaaatgggcggagttctctttggtctgtcgatcggttcgatgagcggtattctctgctcggcgtggttagtgaaacgctttgggacacgtaatgtcatcctggtcacgatgtcctgcgcattgatcgggatgatgatattaagtctggcactctggctgacatcgcccctgctctttgccgttggtctcggcgtctttggggcaagttttggttctgcggaagtggcgataaacgttgaaggtgctgccggtgagcgagaaatgaataagacgggtttgccgatgatgcacggcttttatagcctgggcacgctggcaggcgcaggtgtcgggatggcactgacggcctttggcgttccggcaacggtgcacattttattggcggcgctggtagcgcaaattgccgcctggtataaggcgcttcaggaacagatccccgactttattccccgtgcgccgcagcggcagatgattgcggacgtcgccaaaacgctggccggagaagaagggcgacatctggcgattgaagcccccaccggcgttgggaaaacgctctcttatttgattcccggcatcgccattgcccgcgaagagcaaaaaacgctggtggtgagtaccgccaacgtggcattgcaggatcagatttacagcaaagatttaccgctgctgaaaaagatcattcccgatcttaaattcactgccgcttttgggcgtgggcgctacgtttgtccgcgtaatctgacggcgctcgccagtactgaacccacgcaacaggatctgctggcgtttcttgacgacgaactgacgccgaacaatcaggaagagcaaaaacgttgtgcgaagctgaagggcgatctcgatacttataaatgggatggtctgcgcgatcatactgatatcgctatagatgacgatctctggcgtcgtttaagtaccgacaaagccagctgcctcaaccgcaattgttactactatcgtgaatgcccgttttttgtcgctcgtcgggagattcaggaagcggaagtggtggtggcaaaccatgcgctggtgatggcggcgatggaaagcgaagcggccaaaagcgaacgaatttcagacatcagcacccaactgaacgcctttcccggctgtgaagttgctgtcagcgacgcgccgacgttgattgtggtggtggaagcagaagacagcgaaacgctgatccaaaccattgagtcagtacgcaacgtagagggcgtgctggcggtgtcgctggtttatcaccagcaggaagagcaagctaacgccgttgcggccgctgcggcggctgccggtctcagcgtgccgggcgttgccgcgccgttgttggtcagcaggaagccatcaaatgggataaacgccgtccgtttctcggtactggttcggcgtctggtcgacgcacaggactgtgtgctgcaggcaccgacgacggaagaagataaatccaccaaccgcccttatacctcacgttatatcggttcactgggggcggatttccatggtaacctgctgaaaggcggtatttatctctacccaagcaccgccagccacccggacggcaaactgcgtttgctgtatgagtgcacccgatggcattcctggcggaacaagcgggcggtaaagcgagcgatggcaaagagcgtattctggatatcatcccggaaaccctgcaccagcgccgttcattctttgtcggcaacgaccatatggttgaagatgtcgaacgctttatccgtgagttcccggacgccgtccctaataccgttccaacgccaccgctcaaaagcgtaccgccaattaccactgaggcgatacatccagttccacacctacgcccgccagcgcatatccggcctgggtataaatcgagaagacaatccccgccagcgttgccagtccggtggagagcatatagatgcgaatagtggtgctgcgagtggatatccccatcagattcgccgacgtttcgttgccgctaatggcgtataccttgataccaaaccggaattgactcatctggagcctatgatagtgaaaaaactcaccttaccgaaagatttcttatggggcggcgcagttgccgctcatcaggtcgaaggcggctggaacaaaggcggaaaagggccgagcatttgtgacgttctgaccggtggcgcacacggcgtgccgcgcgaaatcaccaaagaagtcttgccaggaaaatactatccaaaccatgaagccgttgatttttatggtcactataaggaagacatcaagctatttgccgaaatgggcttcaaatgttttcgtacatccattgcctggacgcgcatttttccaaaaggcgatgaagctcagccaaacgaagaagggctgaagttctacgatgatatgttcgatgaactgctgaaatacaacatcgaaccggtgatcaccctctcccactttgaaatgccgctgcatctggtgcagcaatacggtagctggaccaaccgtaaagtggttgatttctttgtacgtttcgcggaagtggtatttgaacgctataagcacaaagtcaaatactggatgaccttcaacgaaattaacaaccagcgtaactggcgtgcaccgctgttcggttactgctgctccggcgtggtgtataccgagcatgaaaacccggaagagacgatgtatcaggtgctgcatcaccagtttgtcgccagcgccctggcggtgaaagctgcgcgtcgcattaacccggagatgaaagtcggctgtatgctggcgatgctacgtctttaccgatgtgcactaagcggctattaccggtcctatgtgttgacgattgggaccttccgggatttacatcaaaatggagtgatgcaccatatcactgctaccagccgcgttgtggtaattggtattggcgggctggggcatatcgctataaaacttctgcacgcaatgggatgcgaggtgacagcctttagttctaatccggcgaaagagcaggaagtgctggcgatgggtgccgataaagtggtgaatagccgcgatccgcaggcactgaaagcactggcggggcagtttgatctcattatcaacaccgtcaacgtcagcctcgactggcagccctattttgaggcgctgacctatggcggtaatttccatacggtcggtgcggttctcacgccgctgtctgttccggcctttacgttaattgcgggcgatcgcagcgtctctggttctgctaccggcacgccttatgagctgcgtaagctgatgcgttttgccgcccgcagcaaggttgcgccgaccaccgaactgttcccgatgtcgaaaattaacgacgccatccagcatgtgcgcgacggtaaggcgcgttaccgcgtggtgttgaaagccgatttttga

SEQ ID NO: 119139 - DNA, 850 bp, Homo sapiens
atgttggtgggtaaggtagtggtttctgagggcgcttcttttagaacgcatggtgccgtggataccagcaaagcgtacgtttcgctcgagaatagcggatggaccatcattgccgatatcactacgacgaaccaaaacaccctcctcaacttagccaaccttgcgatgtctgacgcaaatgtgattatgatggatgagccagtgactcgttcatcagtgacggcaagtgcggaaaatttcattacgttgaccaccaataccctgtcgggaaacggcaatttttatatgcgtaccgatatggctaatcatcagagcgatcagctcaacgtcaccggtcaggcaacagcaggagatagccttacactggtaacaacgggcggcggtgatgctgcatttacgttgggcaatgccggacgtgtgtttgatatcggtacgtatgaatataccttgctggataatggcaaccatagctggagtctggcagagaatcgcgcgcaaattactccttcaaccactgatgtgctgaatatggcggccgcacaaccgctggtatttgatgcagaactggacaccgtgcgtgagcgtctttggtagcgtaaaaggcgttagttacgatacggcgatgtggagttcggcaattaacacccgcaacaacgtgaccactgatgcgggactgcgtgcccaggctataaaaaccgtgcatcatcggcaaaaccgtcttattcatttctcgctcaacggcagcaccttcaacgtttatcgccacttccgcagaaccaaaacttgccccaaagacgccgagaccaacggcaaagagcaggggcgatgtcagccagagtgccagacttaa

SEQ ID NO: 119140 - DNA, 1777 bp, Homo sapiens
  misc_feature (1)...(1777): n = a,t,c or g
agtatatggccttggggagttggccgtgctggcctttctgagatgcacaccttacaccctggagtctgaaccaggggccacaaaggaaccggtcgaacggacccggccaccagggcattggttgcgaacaaacaacaatggaccgggcttcgccaaatggcattacgccaacggttccaccgcgggctatgccgggggtcctggttccatgggcagcctgggtcaaacccaaatccttgggacgggcgccttggtccctggggcgaatccttcctggggcataggacatctccaaaaacccccgctgagccgccaacctttggacggcgacccacggccccgacgggatccatcagcggaaacccccaccggacgccaaacccgcacaccgggcgaaacctatcctccgccgaaccacgactaccttttcgcaagcgccaagaaagaaaagaagaacatcagtcggacccttctcgcggtttatactgacaatacgaaggaactaccgctgatagttatgaagccatcaccgcaacaccgcgaaggggtgaaagatgtgatgcgctttaacgagccgatgtacaaggttggagagcagaacagcgtctgtatgtcctgtcatctgccggaacagttgcaaaaagcgttctggccgcacgatgtccactactctaaggatcccggcaacagcgcggcgagtttttgctggaagggactgtcgggcgaatccccgttcacagccggttcatcgaagcgggcgaaacatcctgacgtcgtaaaactgcgggtaaatgagagacaagcccgcgcacgcggatatgcggtcaacagctcggacaaaggctcaatctcggacaaatacggcagggtaccgaaggccagcagatcggacccggcatccagcaagctaacacgcgcgggcgaagaaacgcctgagctgcctcaacgactacacatgataatcgccacggcaatcagagaccatcgacaagatacgcgcgctcatcaacgtggtgaagcgttgtcggattcgcgtgctcatcgacggcataaacctggtttgccggaagctggaacagatattcatcaacagatgttaagttgcaggttacctacggatgaataccacgccataaggcgctgcgacagtgccgatattctggcttgcgatctcaacggcaagacccgncaggctgacctagagtatcccgatatcgtgctgcgcggcgaatacggcaatctgctggaagcaaagcagcaacgtttggtggaaggagaaatgctgtttattccggcgcgcgcggctaatttaccggtcaacaacaaaccggtgatgctgttaagcctggtgttcgctccgacctggcttgggttatcgttttacgatagccgcaccacgtcgttgttgcatcctgctcgccagatccagcttcccagcctgcaacgcggtgaaggtgaagcgatgcttaccgccctcacccatcttagccgttcgccgctggagcaaaatatcattcagccgctggtgttaagtttgctgcatctttgccgtagcgtggtgaatatgccgccgggcaattcgcagccgcgcggcgattttctctatcacagcatttgtaactgggttcaggataattatgcccagccgctcacccgcgagagcgtggcgcagttttttaatatcacgcccaatcatctgtcaaaactgtttgctcagcatggaacgatgcgtcttatcgagtatgtgcgttgggtgcgaatggcgaaggcgagatga

SEQ ID NO: 119141 - DNA, 1098 bp, Homo sapiens
atgaaagcaccaggcttgcccgccgatcaacaatttttcgccgatctgttcagcggcctggtgcttaacccgcaactactggggcgcgtctggtttgccagccagcctgcctcgttgccggtgggcagtttatgtattgattttccccgtctggatatcgtgctgcgcggcgaatacggcaatctgctggaagcaaagcagcaacgtttggtggaaggagaaatgctgtttattccggcgcgcgcggctaatttaccggtcaacaacaaaccggtgatgctgttaagcctggtgttcgctccgacctggcttgggttatcgttttacgatagccgcaccacgtcgttgttgcatcctgctcgccagatccagcttcccaagcttgcaacgcggtgaaggtgaagcgatgctttccggccctcaccctttttagccgttcgccgttggagcaaaatatcattcagccgctggtgttaagtttgctgcatctttgcggtagcgtggtgaatatgccgccgggcaattcgcagccgcgcggcgattttctctatcacagcatttgtacctgggttcaggataattatgcccagccgctcacccgcgagagcgtggcgcagttttttaatatcacgcccaatcatctgtcaaaactgtttgctcagcatggaacgatgcgttttatcgagtatgtgcgttgggtgcgaatggcgaaggcgaggatgattttgcagaaatatcatctgtcaattcatgaagtggcacagcgttgcggttttccggatagcgactatttttgtcgcgttttccggcgtcagtttggtctgacgccgggagagtacagcgcccgttttcagggctaacgtcagaaggttaattctgtttccagcagcgtcaggatactttgtgcatcttgcgcggcaaacaacgactggcggaagtttttattcaccagtttacgcgccagctgcgagaagactttcacatgattcatcccttcgttagcacccagcgtcagcatgatcaccagttcgacttcgcccatttctgactgccagccaatcggtttcgccagccgggcaatgctgatactggaatgac

SEQ ID NO: 119142 - DNA, 639 bp, Homo sapiens
tttcgtggcgcgcgcggtcagctgttggcggtgcagggaggaggacgccggggctcgccttccctcctctgccgccgctgccgccatgattccggtgtcgctggtggtggtggtggtgggtggctggactgtcgtctacctgaccgacttggtgctgaagtcatctgtctattttaaacattcttatgaagactggctggaaaacaacggactgagcatctcccctttccacataagatggcaaactgctgttttcaatcgtgccttttacagttggggacggcggaaagcatggatgctttaccagtggttcaattttggaatggtgtttggcgtaattgccatgtttagctcattttttctccttggaaaaacgctgatgcagactttggcacaaatgatggctgactctccctcttcttattcttcctcctcttcttcctcttcctcctcttcttcctcttcctcttcttcatcttcttcctcttcctcgcttcacaatgaacaggtgttacaagttgtggctcctggtataaatttacccctcaatcaactgacctatttcttcacggcagttctcattaatggcgttgtaccatgaaactggccatgggataaccacctttcagggaaacaagt

SEQ ID NO: 119143 - DNA, 873 bp, Homo sapiens
atggtgaacaagtacatctatgatgtgtcacatactgaagaagaagaagaagaagaagaagaagaagaagaagaagaagaagaggaagaggaagaggaagaggaagaggaagaggaagaggaagaggaagaagaagaagaagaagaagatgattttgggaagattttaatacctatatgcaatttttttaatggttatgtttcttttgggtttactctttcctttaggatcaattctgataaattgtattcgtctacaaatgaaatcctccaagcttttagttgggcatgtcagcgaccttcacagcagcctctttcctcaccagccagaggcttagaagggaaaaatggtttcatgggctgggaccagagccctctggctctatgcagcctagggacttggtgccctgcgccccagttgctttggctccagccctggctaaaaggggccaacatatatttcaatcagttgcctcagagtgtgcaagccccaagccttggcatcttacatgtgatgttgggcctgcagatcatcccattgtctctgaagctcttagcagagaggaggacctggagtgggttgctcctctctgtagcaggtcatccctggagtgggaagctcctctctactactggttgtcctgacgttttccagctattggcagagaagctatctcctctctgcagctggttatccatcatctgctcagctctggctgagcccagggcttttatagacctcagagtggaagaagtgcatgctgattcatccatgggcagccatgggcagtcctggaaaaggcaccacaagttccaaatacagtccatgggactggtagcccagctcccagccttcaggtcctccctggcctga

SEQ ID NO: 119144 - DNA, 657 bp, Homo sapiens
tttcagtggtttacttttgacggaagcgtgttcccatttggggacttgtgagggctatcaggccagttcaaccgtcccacatcccagttaggtgggtctatttgttgaagcttttacccatggcagcttgactgaccagggcccgagggtgactactggggacacccatcaaggtcagccccaagctgtagcccaactgagccaggtagagtctggggctcagaggcttcctcctaaggcaggcttccacagggtctggccctctatcctgccgtgtcctggcacttttgatgaaggatagtgagttgctcctggtgacaggcatgcattccctctggcaccttcaggtctcagccctgagctcactctccctcagactcagtgctgtgctcaggcaactgtgcagggcctggaggggaccagaagctggtcccagagtgggacaagtagcctgagtccatggtctcacacttccttaagaagaagaagaaaagaagagggagaagaagaagaggaagaggaagaggaagaagaagaagaagaggaagaggaagaagaagaagaagaggaagaggaagaggaagaagaagaagaagaagaagaggaggaagcaaaaacacaatagaaaagtggacaaaagatataaacagacagccc

SEQ ID NO: 119145 - DNA, 552 bp, Homo sapiens
atggaccccgttttggtgctgctggaggccaggtatcccctgagatgcctcttagctcagtgcattcagttcagtgcccacttttcaagagaccccatctcaccgctcagcccagagcaggcctgtgataaagacctggcggctgctgcttggttgtttgggccgttcctctggtcccgaggctcgctctcactggaggagtggaagcagcccttggaatggcggagaccgtgtcagatgccccagatggcagttgctgcagccagcaggctggggctggcaggcatgggaatctggccagtacccttcagcccagatctctatgccaagcagtctgaaatccttctgagcaaccactacaccacctccgaggtcagggtctttggtgtcccagaggttctggagaacttggaggtgaaatccgggtccccggccgtgctggccttggtgaagaagtctcttgggtcacatacacggtcagcgtcgcggaacccgcggcggcagccgggggcctctgtccactaccttgaccttctccagccccgagactaa

SEQ ID NO: 119146 - DNA, 4512 bp, Homo sapiens
ttatacaattcgcgcaaaaccggcgtccagatcggcaatcagatcgtcgacatcttccagaccaatatgcaggcgaatcaaggtcccgctaaaatcgatctcgccttgtgggcgaatggcggcgatatgttctggttgatttgccaggatcaacgattcatacccgccccacgagtaggccatgctgaataaactgaagttatccagatagttcgccagctcttcattattgagttttttcttaagcacaaaggaaaatagcccgctgctgcctgtaaagtctcgtttccagaattcgtgacctttactgccaggcagagcagggtggttaactcgcgcaacttgcggatgttctgccagccattcagccactttcagactgctttcatgatgttgacgcaaacgcacacctaatgtgcgcaggccacggctggttatataggcggtatcggcatcgaccatctggcccatcagataggcattttcccgtagctgctcccagcaacgggcattgcacacggcagtgccaatcatcgcataccccaccaccgccaagcacggcgcgttgtgatctaaggatccccgaaaacgtttatccgctacaaacgcatgaagattcaacatgttgcaatagattttgtaggcctgataagcgtagggcatcaggcattgagcacctaatgccggatgcgtcgtgaacgccttatccggcttcgctttggcggtttcttcgccgaccagacctatcttcaggtaacccgcctgatgcagcgtatccattaccttcatcaacgtctcgtaatcgacggttttgtccgctcggaagaagatggtggtgtctttcttgccttcggttaacgcattcaacgccgtaatcattgtttcatcggtgaccggatcgttaccgataaacatcgagttgtctgccttcaccgacagataaaccggtttttccgggcgcggctgcggcgtgctggtagaagcaggcaagttcaccttcacatctaccgtcgctaacggtgccgccaccataaagataatcagcagaaccaacatcacgtcgataaacggcgtcacgttgatatcatgcatttcgccgttatcgtcgaggtttcgttcagatgcattgccatcggatattatcctgcgccgtaattccgtgcgacacgaaccggatgcgcacggggcgggcttcacgatcacggtcccggtttggcgcccaataccctccgagcccgagacagctcgacaccgccggcagagacgctttgccgttcggcagcggctcaacggttccctctttcggcaaccagccgtaataaccggtttccggctcgttcctttctgctgggcattggcagaacgcgcaagaccggtcaggcgataagagtaaacaccgtcatcatccaacgaatcgctaaagtcaaaaccagtctggaacaggctgtcagtaccggctttaaactgaacttctttcagcggttcggtggtcggacgcttgctgaccatattcaacaggccgccaggactgcttttaccgtaaagcacggaaaccgggccacgcataatttcagcgcgttccagcatatacgggtcaatgaccgcatcgttatagaagttgccctgcaacttcaggccattcagatagttattctggctttggccttctgccgcaaagccgcgaatgatcaggtggtcataggtgttggatgcgccacgcgtaccaacagagacacccggcgtgtagctaagcgcttcttttaccgacttcggctgatgcagcgccatctcttcggcggtcacaacagaaatagactgtggcactttttgaatcggcgtatcggttttagtgccggtagcagactgtcgcgccgcaatagttgcagcaagccccatgcgctttcttgggcgcaggtgaacggtaacgtgaagtgtctcttcggtcaacgcgccgtgataaagaatccgtacggtgtcggggctggcatccagggagttgcgtgggctggggtccagtttggggggtctatctttggttgagagcgcaaacacagaggaaccgctcggctgacgactggtaaaggcgtcggcatggatagagacaaacaggtcagcacgctgtttctgggcttttgctacgcgcacttgcaatggaatgaagatgtcttcattgcgcgtcatgtacaccttcatattgccctctttctcgatcagagagcgcaaacggcgagctatttgcaataccacatctttttcgcgcgttttgtatttccccaccgcaccggagtcttcgccaccgtggccagggtcaagcataatgacaatcggacgatcgcgccctgctttacccggttgtggaccactttgcgctggcggcacctgcttttcgaggtcgcctttgttgtaatcctccagcagcgccagcagcgggtcctgcatatcctgtgcattggccggatagaggtccatcaccagacgctctttaaacccggcgaccggcgcaagggcaaacagctgcggttttacgtttggctttaattcaaaaaccatccgtacggtttgcgggtcaaattgcccgacgcgcgccgacttgatgaacgggtcgtctgcacgaatttgtgccgccatccccttgagtaccgagttcaggtttacatcttcgatatccaccaccacgcgttcagggttactcaacgcgaactgcttatatttcagctgacgatttgattccaccgtcacgcgggtgtagctggacgcaggccagacgcgcaccgccacgacctggctgaccgcagccagactgacctgacttacgctcaatagccacatggcacccgcgcttatccccatattggcaatgtcggcaccaatgacgccgatgaagaatcttctcaggtacatgcacaaggtctggtgattcgcgacctgccgctgattgccagcaacttccgtaataccgaagacctctcttcttacctgaaacgccataacatcgtggcgattgccgatatcgatacccgtaagcatgctgcttgtgccgtgcctaatacactcgtggctcgtggtcttaggaagcatctgaagcgggtagcagctccacagcattggattgctggatgaattgactagtgtgtttgctccttgtccaaccaccagtccccacaagctgagagatgtgctgctgcctgaagattgtctgcatgaaggaaccagacttaagtatgccggggatccgtctagactggtgatgactgggcgaagcacatccgcagtggaaaacgtagcagttataccgcaggtgaattggtagtgccgaacggttcgatggtttccgctggggagaaaaaggcaaatggaatctggaatccattgccgccggtacggaaaccgaattgtcgttaaccctgctcggtcaacatgacgctgttgcaggcgtggccttcccctactttggcggcattgaaaatccgcattttcgcagcgtaaaacacaatccggtgctgtccggtggtcagcgtttatgatttggtactggcgaattacggcctcgatcgcgggctggaagatgaaaacagtgcgaaagattacgctgaaatcaaaccgtacaccccagccggcgtgccgcgccagtatattgaaaccatcgcccgtgaatttgccgataccgcccataaaacgcatgggcgctcgatgattatcctcggcgcaggtgttaaccactggtatcacatggacatgaactaccgcgggatgatcaatatgctgatcttctgcggttgtgtcgggcaaagcggtggcggctgggcacactatgtcggccaggaaaaactgcgcccacaaaccggctggttgcactggcctttgcgctcgaccggtaataacacgaaacgttggcgtaaagtagcggatgcgcacatcgctgtcgtcgctgtgcagcagaaaagcagtttccgaatggccgaactcgcgggcgataagctgcatttgcgcttcgctaagattatcggcggggaaaacaacaccggcagaattgccgcgaaacggttgtgaggtaaaagcatcgacgtggtacacaatttgatatcgacgagtaaagtactcaaacggcgcgctccacacatgcaccagtcgggtgaacgggaagagcaggaagatggtcattcccaacaccagatgcaggcggaagacgaacgctacgccgttgagcatctctgacgatccaccacggaaagtgacaatgctttgcgcccaacccaccagcttcatcatttcgctaccatcaggatactgtgctgaaaacggtatggtacttagccccaacagacactggatcagcaaaatgctcatgatgatgatatccggcgtagtggaagtggcacgcacgcgctgatttgtcagcctgcgccacagcagtcctgcgcggcaatctacgtcacacaccgcaaataacggcgagcacaatgccagaattgttcccgccctgcgaaaccagccgtaatacagggggtacat

SEQ ID NO: 119147 - DNA, 1902 bp, Homo sapiens
gttgaaatatcccatgaagcgcgtcggcaagcgcggtgaaggtaaatttgaacggataagttgggacgaagccctggataccatcagtgataatcttcggcggatcctgaaagattacggcaatgaggctgtacatgtcctgtacggaacaggcgtagatggcggaaacatcaccaactcaaacgtcccgtaccgtctgatgaactcttgcggtggttttctcagtcgctatggcagctacagtaccgcacagatcagtgccgcaatgagttatatgttcggtgccaatgatggcaacagcccggatgatatcgccaatacgaaactggtcgttatgttcggaaataacccggcagaaacgcggatgagcggcggtggtgtcacttactacgtcgagcaagcccgcgaacgttcaaacgcacgcatgatcgtcatcgatccacgttataacgacactgctgccgggcgtgaagatgaatggctgcccattcgccctggcaccgatggcgcactggcctgtgcgattgcctgggtactgattactgaaaacatggtcgatcagccatttctcgacaaatattgtgttggttacgatgaaaaaacgctgcccgccaacgcaccacgtaacgcgcattataaagcctatattctgggcgaagggcctgacggcatagctaaaacgccggaatgggcagcaaaaatcaccagcatcccggcagaaaaaattatccagttggcacgagagatcggttcagcaaaacctgcttatatttgtcagggttgggggccacaacgacattccaacggcgagcaaacatcccgcgctattgccatgctttccgttctcaccggcaacgtcggcataaacggcggcaactcaggcgtacgcgaaggggcaacaggttcggcggttggggaagtcgttttcaatacttcaatgaccggttatcaagaaatcctcactgatccttcctattctcgtcaaatcgttactcttacttatccccatattggcaatgtcggcaccaatgacgccgatgaagaatcttctcaggtacatgcacaaggtctggtgattcgcgacctgccgctgattgccagccaacttccgtaataccgaagacctctcttcttacctgaaacgccataacatcgtggcgattgccgagtatcgatacccgtaagctgacgcgtttactgcgcgagaaaggcgcacagaatggctgcattatcgcgggcgataacccggatgcggcgctggcgttagaaaaagcccgcgcgttcccaggtctgaatggcatggatctggcaaaagaagtgaccaccgcagaagcctatagctggacacaagggagctggacgttgaccggtggcctgccagaagcgaaaaaagaagacgagctgccgttccacgtcgtggcttatgattttggtgccaagcgcaacatcctgcggatgctggtggatagaggctgtcgcctgaccatcgttccggcgcaaacttctgcggaagatgtgctgaaaatgaatccagacggcatcttcctctccaacggtcctggcgacccggccccgtgcgattacgccattaccgccatccagaaattcctcgaaaccgatgttccggtattcggcatctgtctcggtcatcagctgctggcgctggcgagcgatgtggagaaaaacgtggtaatgatcaccgcccagaaccacggttttgcggtggacgaagcaacattacctgcaaacctgcgtgtcacgcataaatcccatgttcgacaggtacgttacagggcattcatcgcaccgatgaaccggcattcagcttccagaggcaccctgaagccagccctggtccacacgacgcccgcgccggttgttcgaccactttatcgaagttaa

SEQ ID NO: 119148 - DNA, 456 bp, Homo sapiens
aacctgacgagcttatgcagttggacgtgtcgagcatgcactgtgtggagaaatgccctttcaggacagcatcctgaagcagctgtgttctgtgccttgcccaggagactgccatttaacagaatggtcagagtggagcacatgtgaattaacctgcattgatggaagaagctttgagactgtgggccgccagtctagatcaaggacttttataattcagtcttttgagaaccaagacagctgcccccaacaggttctagaaacacgcccttgtacaggaggcaaatgttatcactacacatggaaagcaagtctttggaacaataacgaacgaactgtatggtgccagcgttcagatggcgttaatgtcacaggaggctgctcccctcaggcccgtcctgctgccattcggcagtgcattccagcctgcagaaaacctttcttctactgtgcacg

SEQ ID NO: 119149 - DNA, 1228 bp, Homo sapiens
atgaagctcgggctgtggcttcggagagtggaagccccaagccttggcagcttccatgtggtgttgagcctgagggtgcaaagaagtcaagaattgaggtttgggaacctctgcctgtatttcagaagatgtatggaaacgcctgcgtgcccaggcaatagtttgctgctagggcaggcccctcatggaaaaccccctctagggcagtgcagaagggaaatatgggtcgagcccccacacagagtccctagtggggtgctgcctagtggagctgtgagaagagggccattgttctacatcctcgtgaatggtagacccactgacagcttgcaccgtgtgcctggaaaacctgcagacactcaacgccagcccatgaaagcaggcaagagggaggctgtgccctgcaaagccacagggatggagctgcccaagaccatggcaacccaccttttgcgtcagtgtgacctgaaagtgagacctggagtcataggagatcattttggagctttaaaatttgactgccccactggatttcggacttgcctgggccgcataacccctttatttttgccaagttctcccatttggaatggctgtatttttccaatacctgtgccgggtggagactgtggggaaggagttcagatccgcagcctttcctgcatggtccacagtggttcaatatctcatgcagctggacgtgtcgaggatgcactgtgtggagaaatgccctttcaggacagcatcctgaagcagctgtgttctgtgccttgcccaggagactgccatttaacagaatggtcagagtggagcacatgtgaattaacctgcattgatggaagaagctttgagactgtgggccgccagtctagatcaaggacttttataattcagtcttttgagaaccaagacagctgcccccaacaggttctagaaacacgcccttgtacaggaggctgctcccctcaggcccgtcctgctgccattcggcagtgcattccagcctgcagaaaacctttctcctactgtacacagggtggagtctgtggttgtgagaagggctatacagagataatgaaatcaaatggtttcctggattactgcatgaaagtaccaggctcagaggataaaaaagctgatgtgaaaaacctttctgggaaaaacagacctgtgaattcaaaaatacatgatatttttaaaggatggtctcttcaaccacttgatccag

SEQ ID NO: 119150 - DNA, 519 bp, Homo sapiens
atgctgcggatcctgtgcctggcactctgcagcctgctgactggcacgcgagctgaccctggggcactgctgcggttgggcatggacatcatgaaccgtgaggtccagagcgccatggatgagagtcatatcctggagaagatggcagccgaggcaggcaagaaacagccagggatgaaacctatcaagggcatcaccaatttgaaggtgaaggatgtccagctgcccgtcatcacactgaactttgtacctggagtgggcatcttccaatgtgtgtccacaggcatgaccgtcactggcaagagcttcatgggagggaacatggagatcatcgtggccctgaacatcacagccaccaaccggcttctgcgggatgaggagacaggcctccccgtgttcaagagtgagggctgtgaggtcatcctggtcaatgtgaagactaacctgcctagcaacatgctccccaagatggtcaacaagttcctggacagcaccctgcacaaagtcctccctgggctg

SEQ ID NO: 119151 - DNA, 743 bp, Homo sapiens
atgtgtcccgccatcgatgcagtcctggtgtatgtgaacaggaagtggaccaacctcagtgaccccatgcctgtgggccagatgggcaccgtcaaatatgttctgatgtccgcaccagccaccacagccagctacatccaactggacttcagtcctgtggtgcagcagcaaaagggcaaaaccatcaagcttgctgatgccggggaggccctcacgttccctgaggtgttatgccaaaggctcgccgcagctgctggtcccagccaccttcctctctgcagagcttgcccttctgcagaagtcctttcatgtgaatatccaggatacaatgattggtgagctgcccccacaaaccaccaagaccctggctcgcttcattcctgaagtggctgtagcttatcccaagtcaaagcccttgacgacccagatcaagataaagaagcctcccaaggtcgctatgaagacaggcaagagcctgctgcacctccacagcaccctggagatgttcgcagctcggtggcggcgcaaggctccaatgtccctctttcttctagaagagcacttcaatctgaagggccagcactcactgcatgagaaccagctgcagatggccacttctttggacaggagagggaattaactggcttcatcaccagctatctcgaagaagcctacatcccagttgtcaatgatgtgcttcaagtggggctcccactcccggactttctggccatgaattacaa

SEQ ID NO: 119152 - DNA, 3435 bp, Homo sapiens
caagaaaaggggctttgcctttgtaacctttgacgaccatgactccatggataagattgtcattccgaaataccatactgtgaatggccacaactgtgaagttaggaaagccctgtcaaagcaagagatggctagtgcttcttccagccaaagaggtcaaagtggttctggaaactttggtggtggttgtggaggtggtttctgtgggaatgacaactttggtcatggaggaaacgtcagtggtcgtggtggctttggtggcagccatggtggtggtggatatggtggcagtggggatggctataatggatttggtaatgatggaagctaagagaccaattataaaacaataaaatactcctctctcccacagttgccttttttctctcttcttgtaattttctcttgctctatttggcccttcttttcacttgtccttccagccagtcaagttctccccaaattcccaggaactcttggggtaggtgtgtgtttttcacatcttaaaggctcacagaccctgcgctggacaaatgttccattcctgaaggacctctccagaatccggattgctgaatcttccctgttgcctagaagggctccaaaccacctcttgacctcaaatttcactttattctttgcatgtttttttttctttctctaggttgtttggttagggctgaatgttttcctgtttgtggatgccttcctgaacctccctaactcattttatgaggccagcatcattctgataccaaagcctggcagagacacaaccaaaaaagagaattttagaccaatatccttgatgaacattgatgcaaaaatcctcaataaaatactggcaaaccgaatccagcagcacatcaaaaagcttatccaccatgatcaagtgggcttcatccctgggatgcaaggctggttcaatatacacaaatcaataaatgtaatccagcatataaacagagccaaagacaaaaaccacatgattatctcaatagatgcagaaaaggcctttgacaaaattcaacaacctttcatgctaaaaactctcaataaattaggtattgatgggacatatttcaaaataataagagctatctatgacaaacccacagccaatatcatactgaatgggcaaaaactggaagcattccctttgaaaactggcacaagacagggatgccctctctcaccgctcctattcaacatagtgttggaagttctggccagggcaattaggcaggagaaggaaataaagggtattcaattaggaaaagaggaagtcaaattgtccctgtttgcagatgacatgattgtatatctagaaaaccccatcgtctcagcccaaaatctccttaagctaataagcaacttcagcaaagtctcaggatacaaaatcaatgtacagaaatcacaagcattcttatacaccaacaacagacaaacagagagccaaatcatgagtgaactcccattcacaattgcttcaaagagaataaaatacctaggaatccaacttacaagggatgtgaaggacctcttcaaggagaactacaaaccgctgctcaaggaaataaaagaggatacaaacaaatggaagaacattccatactctggtgaaatgaagcagctgatggtctctttttctcctctgctgtagtcaacattggcctgtgcccgagcgtctgctctctgcttgaattttaacagcacgctgatcctgcttaaagctggctggcgacatctgaccatgatcattctacatttgtagttttgcagccgcacactgagaaagcaattggatcacaactgttgctgagatgcctcttaacatttcttttcatctttccatttagctattcacatcattgcacacctgtttaactttgactgctatagcagaagccgacaggccacagatggctcccttgcctccattctctccagcctatctcatgatgagtgcacaggtggacattgtgtcaggctgacatttctcctttcacagacagtggagtatgtgacattcaccagcattgctggtctcactggagtgatcatgacaatagccttgattctcatggtaacttcagctactgagttcatccggaggagttattttgaagtcttctggtatactcacccttgcataattctttgtcccaaaccatccttctttgtctatttcagtggaattgtccggggtcaaacagaggagagcatgaatgagagtcatcctcgcaagtgtgcagagtcttttgagatgtgggatgatcgtggattaaagacttaaatgtaaaaccccaaactataaacaccgtagaagacaaccaccctggaagacaacctaggcaataccattcaggacataggccctggcaaagatttcatgatgaagataccaaaagcaaatgcaacaaaaataaaaattgatgaatgggatctaattaaactaaagagcttctgcacagcaaaagcaactaccaagagagtaaacaaacaagacgagagcctgaggagccattatgagtgatggggaatgctcacagactgtgtggtaatgagagatccaaacaccaagcgctccaggggctgtgggtttgtcacatacgccactgtggaggaggtggatgcagccacgaacgcaaggccacacaaggtggatggaaaagttgtggaaccaaagagaactgtctcaagagaagattctcaaagaccaggtgcccacttaactgtgaaaaagatatttgttggtggcattaaagaagacacggagggctttgcctttgtaacttttgacgaccatgactccgtggataagattgtcattccgaaataccatactgtgaatggccacaactgtgaagttaggaaagccctgtcaaagcaagagatggctagtgcttcatccagccaaagaggtcgaagtggtcgtggaggtggttttggtgggaatgaaaactttggttgtggaggaaacttcagtggtcatggtggctttggtggcagccatgatggtggtggatatggtggcagtggggatggctataatggatttggtaatgatggtggttatccaggaggcggccctggttactctggaggaagcagaggctatggaagtggtggacagggttgtggaaatcaggacagtggctatggcaggagtggcagctatgacagctgtaacaagggaggcagaggcggctttggcagtggtagtggaagcaattttggaggtggtggaagctacaatgattttggcaattacaacaatcagtattcaaattttggacccatgaagggaggaaactttggggcagacgctctggcccctagggtgatggaggccaatactttgccaaaccaccaaaccacagtggctatggcggttccagtagcagcagtagctatggcagtggcagaagatgt

SEQ ID NO: 119153 - DNA, 636 bp, Homo sapiens
atgagagatccaaacaccaagcgctccaggggctttgggtttgtgacatgtgccactgtggaggaggtggatgcagccatgaatgcaaggccatgcaaggtggttggaagaactgtggaaccaaagagagctgtctcaagagaagattctcaaagaccagaagacactgaagaacttcacctaagagattattttgaacagtatgggaaaattgaagtgattgaaatcatgactgaccaaggcagtggcaagaaaaggggctttgcctttgtaacctttgacaaccatgactccatggataagactgtcattcagaaataccatactgtgaatggccacaactgtgaagctaggaaagccctgtcaaagcaagagatggctcgtgcttcatccagccaaagaggtcgaagtggttctggaaactttggtggtggtcgtggaggtggttttggtgggaatgacaactttggtcgtggaggaaacttcagtggtcatggtggatttggtggcagccatggtggtggtggatatggtggcagggggatggctataatggatttggtaatgatggaggtggtggaagctacaatgattttgtcaattacaacaatcagtcttcacattttggacccatga

SEQ ID NO: 119154 - DNA, 3855 bp, Homo sapiens
atgactggaatctgctacacagaagatgaaagatcatataagaaaaatgctcaaccaacggcagcaagtaaaaagcaaaaagaaacacagaaattctgtctaagagtagacgggcaacaaaaagtgaagctctcggtgctccaggagaaaagcgcgcagctcacagtacaacttaagagccagaagttcctgggccaccccacagcgggccggggtcgcagcgagctctgcctggacctccccgatcccccagaggacccagtggcactggagacccggagtgtgggcacctgggttcgagaacgggacttgggcatgcctgatggggaggctgccctcgccgccaaggtcgctgtgctggagacccagctcaagaaggcgctgcaggagctgcaggcagctcaggcccggcaggctgacccccagccccaggcctggccaccgccggacagcccggtccgcgtggatacagtccgggtggtagaagggccacgggaggtggaggtggtggccagcacagccgctggcgcccccgcacagcgggcccagagcctggagccttacggcacagggctgagggccctggcaatgcctggtaggcctgagagcccacctgtgttccgcagccaggaggtggtggagacaatgtgcccagtgcccgctgcagctaccagcaacgtccatatggtgaagaagattagcatcacagagcgaagctgcgatggagcagcagaaatgaaatgggaggaccagaacattggagatcagtgccaaaatgccaagagaaatctaaggatggcattaacatcctctctgggctgtggatttctccaggttgtgctgagactccagaatttacagcaggtgatagtcagctatttcggccagtgcaagtttggatgcctgcaaggtcaatcatgcgagcatcaggaatatggagagaagccatatacacataagcaacgtgggaaagccatcagtcatcagcactccttccagacacatgaaaggccccccaccggaaagaaacccttctattgtaaagaatgtgcaaaaacctttagttctcttggaaacctccgaagacacatggcggcacaccatggagatggaccttataaatgtaagttgtgtgggaaagcctttgtttggcccagtttatttcatttgcacgaaagaacacacactggagagaaaccgtatgaatgtaagcagtgttctaaagcctttcctttttacagttcctatctaagacatgaaagaatccacacgggagagaaagcgtatgaatgtaagcagtgttccaaagcctttcctgattacagtacctatctaagacatgagagaactcacaccggagagaaaccctataaatgtacacaatgtgggaaagccttcagctgttactattacactcgactacatgaaaggactcacacgggagaacaaccctatgcatgtaagcaatgtgggaaaacgttttatcatcacacaagctttcgaagacacatgataaggcacactggagacggaccacataaatgtaagatatgtgggaaaggctttgattgtcctagttcagttcgaaatcatgaaactactcacactggagagaaaccctatgaatgtaagcagtgtgggaaagtgttatctcatagctcgagctttcgaagtcacatgataacacacacaggagatggaccccagaaatgcaagatatgtgggaaagcctttggttgtcccagtttatttcaaagacatgaaaggactcacactggagagaaaccctatcaatgtaaacaatgtggtaaagccttcagtcttgccggttcccttcgaagacatgaagcaactcacactggagtgaaaccctataaatgtcagtgtgggaaagcctttagtgatctctcttcctttcaaaatcatgagacaactcacactggagagaagccatatgagtgtaaggaatgtgggaaagcattcagttgtttcaaatacctttctcaacataaaaggacccacacagtacaaaaaccttatgagtgtaaaacatgtagaaaagccttcagtcatttcagtaacttaaaagtccatgaaaggattcactctggagagaagccatatgaatgtaaggaatgtggaaaagcattctcttggctcacttgccttctacgacatgaaagaattcacactggagagaaaccctatgaatgtctacaatgtggtaaagccttcactcgttcccgtttccttcgaggacatgaaaaaactcacactggagagaagctgtatgaatgtgtctgcaaggtggacaaacagaaccgtgctggctacagccctattatgctcaccgccctggccaccctgaagacccaggacgacatcgagactgtccttcagctcttccggcttggcaacatcaatgccaaagccagccagccatatgtggcccagggggacctgagtggattccaagacattggtggctacacaaaaaggaaactggacttttattccacgctgttggctggcagtccaggacctcagcatccaggaagtcacctttgtcctcagaccaacctggaaaaatctcgcttttctgcccgtggacaccgccgaagaagcatcgttaaagtctctcttcaccctgccgtcatgtctaagtcagagtctcctaaagagcccgaacagctgaggaagctcttcattggagggttgagctttgaaacaactgatgagagcctgaggagccattttgagcaatggggaacgctcacggactgtgtggtaatgagagatccaaacaccaagcgctccaggggctttgggtttgtcacgtatgccactgtggaggaggtggatgcagctatgaatgcaaggccacacaaggtggatggaagagttgtggaaccaaagagagctgtctccagagaagattctcaaagaccaggtgcccacttaactgtgaaaaagatatttgttggtggcattaaagaggacactgaagttcatcacctaagagattattttgaacagtatggaaaaattgaagtgattgaaatcatgactgaccgaggcagtggcaagaaaaggggctttgcctttgtaacctttgacgaccatgactccgtggataagactgtcattcagaaataccatactgtgaatggccacaactgtgaagttagaaaagccctgtcaaagcaagagatggctagtgcttcatctcagccaaagaggtcgaagtggttctggaaactttggtggtggtcgtggaggtggtttcggtgggaatgacaacttcggtcgtggaggaaacttcagtggtcgtggtggctttggtggcagccgtggtggtggtggatatggtggcagtggggatggctataatggatttggtaatgatggaagcaattttggaggtggtggaagctacaatgattttgggaattacaacaatcagtcttcaaattttggacccatgaagggaggaaattttggaggcagaagctctggcccctatgggcggtggaggccaatacttttgctaaaccccgaaaaccaaggtggctatggcggttccagcagcagcagtagctatggcagtggcagaagattttaattaggaaacaaagcttagcaggagaggagagccagagaagtgacagggaagctacaggttacaacagatttgtgaactcagccaagcacagtggtggcagggcctagctgctacaaagaagacatgttttagacaaatactcatgtgtatgggcaaaaaactcgaggactgtatttgtgactaattgtataacaggttattttagtttctgttctgtggaaagtgtaaagcat

SEQ ID NO: 119155 - DNA, 784 bp, Homo sapiens
atgaggaggaggctacaacttgactcactccttcatcccccttcttgtttctcctccactctgaaatgtggaaaagctgcagctgcagcttgcgacagcagtgaccagatccaagaaagactgcagacaggccacctgccctgtgaagccagccataccatatgccctccgaaccaccacagccagtcgactctgaggccccctctcccacccccatcacaaccacacgctgtcccatcaccactcgtccgccaactccctcaacaggaactcactgaccaatcggcggagtcagatccacgccccggccccagcgcccaatgacctggccaccacaccagagtccgttcagcttcaggacagctgggtgctaaacagcaacgtgccactggagacccgcttctggtgttgccagagatttttggtgttccctggcctacagctgcaacacctcactctctctctgcctgtgtggtcacacggtgctctccctgtgtctctctgcatctttacgtggctgtcttctcataaggacaccagtcattttggattacgagtccacttgctcagtctgccgctggaagcaaaatattctttctatcctggatgtccagtcttggaaccagctccgaatccattgaaaggcccctggtgtctctggggggttggtaccttcagacgttattgtactacatttttgttcaatgagtcagagccaaaggacttggttggtgaaaaatttaaatcagatcgcctttgccgagaagcgcatctccaggagtag

SEQ ID NO: 119156 - DNA, 1865 bp, Homo sapiens
tttcggattatgaaataaaatgctgttcatccactgaagaacagacccttgcttcctgcactatcttcaaaagtttaggtcggaggagcgcacgaaccccttggcgccaggctgggccagacccgtcggcctggcaggcgcggcccccggttcagctgcgccggggcggcccagcgcgactccgcgggccttttggctgctcgccccggctccggaacactgtcagatccttctccgcagagttgtgtcctttgtggttcttggatgtcatcacccccacattaggcacctgcagggcaacacacaagtttgctgattgcaaagccaaacgtgacacccccacctcatgcactgttgattattctactgtgtattttgtcaacattgaagtctgggtagaagcagagaatgcccttgggaaggttacatcagatcatatcaattttgatcctgtatataaagtgaagcccaatccgccacataatttatcagtgatcaactcagaggaactgtctagtatcttaaaattgacatggaccaacccaagtattaagagtgttataatactaaaatataacattcaatataggaccaaagatgcctcaacttggagccagattcctcctgaagacacagcatccacccgatcttcattcactgtccaagaccttaaaccttttacagaatatgtgtttaggattcgctgtatgaaggaagatggtaagggatactggagtgactggagtgaagaagcaagtgggatcacctatgaagatagaccatctaaagcaccaagtttctggtataaaatagatccatcccatactcaaggctacagaactgtacaactcgtgtggaagacattgcctccttttgaagccaatggaaaaatcttggattatgaagtgactctcacaagatggaaatcacatttacaaaattacacagttaatgccacaaaactgacagtaaatctcacaaatgatcgctatctagcaaccctaacagtaagaaatcttgttggcaaatcagatgcagctgttttaactatccctgcctgtgactttcaagccaagacagtcaattccagcatcttgcagtacggcctggagtccctgaaacgaaagacctcttacattgttcaggtcatggccagcaccagtgctgggggaaccaacgggaccagcataaatttcaagacattgtcattcagtgtctttgagattatcctcataacttctctgattggtggaggccttcttattctcattatcctgacagtggcatatggtctcaaaaaacccaacaaattgactcatctgtgttggcccaccgttcccaaccctgctgaaagtagtatagccacatggcatggagatgatttcaaggataagctaaacctgaaggagtctgatgactctgtgaacacagaagacaggatcttaaaaccatgttccacccccagtgacaagttggtgattgacaagttggtggtgaactttgggaatgttctgcaagaaattttcacagatgaagccagaacgggtcaggaaaacaatttaggaggggaaaagaatgggtatgtgacctgccccttcaggcctgattgtcccctggggaaaagttttgaggagctcccagtttcacctgagattccgcccagaaaatcccaatacctacgttcgaggatgccagaggggacccgcccagaagccaaagagcagcttctcttttctggtcaaagtttagtaccagatcatctgtgtgaggaaggagccccaaatccatatttgaaaaattcagtgacagccagggaatttcttgtgtctgaaaaacttccagagcacaccaagggagaagtctaa

SEQ ID NO: 119157 - DNA, 587 bp, Homo sapiens
atgacggtgaacaccaccggagccgcaaccggtgggaggaaacggccgacgcgagttggtcggcacccccacgagcaggacggggttcggtggacacgctacagaaagagtgtgctccaacgaggcggagatactgggcacagaacgagacagacaaaagacgccgacaaggtcgcgtgtttccccgagaatggaagcaaacagcggccaaggtatcgcgccgggtttccatcagaaggtcctgagaccaaggtggagaacattggcgtgaagacggtcacgatcacatggaaagagattcccaagagtgagagaaagggtatcatctgcaactacaccatcttttaccaagctgaaggtggaaaaggattctccaagacagtcaattccagcatcttgcagtacggcctggagtccctgaaacgaaagacctcttacattgttcaggtcatggccaacaccagtgctgggggaaccaacgggagccagcataaatttcaagacattgtcattcagtgtctttgagattatcctcataacttctctgattggtggaggccttcttattctcatcactagtgcgacca

SEQ ID NO: 119158 - DNA, 552 bp, Homo sapiens
gaggcccgccgtgggggcagagaagtccaacccctccaagcgacaccgggaccggcttcaacgccgaggttggaccacctggccagcctgctgccgttcccgcctgacatcatctccaagctggacaagctttctgtcctgcgcctcagtgtcagttacctccgggtgaagagcttcttccaagtgaaacgtcagaggagagagatacatggaaggaattgccaaaagaaaaggaaccagaacttgaaggacaggggttggcagtggcagatgccgaagatgtggatgaccacacgggcgaacgaaggcccatgtcgttcaggaggccccgagcattggacacccaggccctgagacgtactcagttcggtctgcatctgttgatggtgaatattgcaggactgatagccactgaccgcctgtagtgatgtgtgaggacaatgaaggcaatggtgattcacaggcaggccagccccatatgggtgttagttgtaaattcatggttacataacataataaatttacctacgaattcattatttataaaaaaaa

SEQ ID NO: 119159 - DNA, 503 bp, Homo sapiens
aggcccctgcagaaacagaggcccgccgtgggggcagagaagtccaacccctccaagcgacaccgggaccgcctcaacgccgagttggaccacctgggccagcctgctgccgttcccacctgacatcatctccaagctggacaagctttctgtcctgcgcctcagtgtcagttacctcggggtgaagagcttcttccaaggacaggggttggcagtggcagatgccgaagatgtggatgaccacacgggcgaacgaaggcccatgtcgttcaggaggccccgagcattggacacccaggccctgagacgtactcagttcggtctgcatctgttgatggtgaatattgcaggactgatagccactgaccgcctgtagtgatgtgtgaggacaatgaaggcaatggtgattcacaggcaggccagcaccatatgggtgttagttgtaaattcatggttacataacataataaatttacctacgaattcattatttataaacaaaa

SEQ ID NO: 119160 - DNA, 1179 bp, Homo sapiens
atgccaaagctggtgaagtcctggcctcttcccatctcagacaccctcaaggcactgtcctctctctatatcctgaacttggctgcagcaggggtagatgaaaaggaggagaaactgttggataaaaagaaattaaaaaaaaaaaaagccccgctcccactccttcaccctcctctggacctcccgcccatctacccaccccacgcagggaacaagactgcccagtaccaggattttcttcttggggaacataggttgtatctgcagcaaacgctcaatgacactgtgggcaggaagattgtcatggacttcttaggttttaactggaactggattaataagcaacagggaaagcgtggctgggggcagcttacctctaacctgctgctcattggcatggaagtgaaatgtgacacctgctcactatgatgagcagcagaacttttttgctcagattaaaggttacatacgatgcatcttattccctccggatcagtttgagtgcctctacccataccctgttcatcacccatgttacagacagagccaggtgtgacttgacaatcccgactacgagaggttccctaatttccaaaatgtggttggttacgaaacagtggttggccctggtgatgttctttacatcccaatgtactggtggcatcacatagagtcattactaaatggggggataaccatcactgtgaacttctggtataagggggctcccacccctaagagaattgaatatcctctcaaagctcataacaaagtggccataatgaaaaacattgagaaaatgcttggagaggccttggggaacccacaagaagtggggcccttgttgaacacaatgatcaaggggccgatacaactagcctgccaggggtcaaggcctcctgccaggtgactgctatcccgtccacaccgcttcattgatgaggacaggagactccaagcgctagtattgcacgctgcacttaatggactggactcttgccatggcccaggagtcaggtgtttggagcgaggcagggcagttggcactccactcctatttggagggacttcatacccttgcctcttgtgccccagcaccttctctctctgccccccgcctaaagtcctgcattcagtgtgtggagtcccagcttttggttgtcatcaaaaaaaaaaaaa

SEQ ID NO: 119161 - DNA, 927 bp, Homo sapiens
atggcgtttcaccatgttggccaggctgatctgaaactcctgacctcaggggaagaacgccaggatgtctacgtggccttcaaggagaaccctgagaagacagcaacaaagggatccgacagtagtcacgtgccgcagacatctctgctatcccttgcatccatggagccttggtcactagtaaaatccatcacaaatagcttttcatcacgactctcagagaacccatactatgacacgaaaagcctggacgacagcgtgagactcggtctcaaaatcatcatcatcatcatcatcatcatcatcatcatcaagagaagattaggatacagacgttcacagagagaccatgagaagacacggagagaagtgactgtccacaagccaagaagagaagccccagaagaaatcaaccctgctgacaccttgattttgaacttccagccgccagagctgccacacaaccggttaacagtggagccagagctggacgtgccggagccacagtgcctcgccacacggccaccttgctccttctgcaccagcgacgtgactatgcaggaggcagcttgtgtgatattgatcgagctcctgatgcaaagcagggtgggaaatcctaggaatcagaaactgactcacggttctggaaagggactgtatgctgagatcacacagccggctgggtacacggccgccccaccaccccacaccactcatcccctgacagccgtaacggaggattccagctgcaccagcagatcgctctggctgctggatggagagagggagccagcaggccaaagcaagagccactgcagcctggaccggagcaggggcagcggaggggccgccgagaaccagtgcaagggaaggcacccagtgggcaccaatcgtggcctgctgaataatgaccattctgagtactga

SEQ ID NO: 119162 - DNA, 876 bp, Homo sapiens
atgcgacctgaactgcctatcataaactgggtgctttctggcccatctagccataaagtgggttatgcacagcagcattccatcatcaaatggaagtggtacatacatgatcagtttcgagcaggtcctgaaggcacaaccacccctgtcattgcccaatgggcccatgaacaaagtggccatggtggcaggcatggaggttatgcatggactcagcaacatggacttccactcaccaaggctgacctggctatggccactgctgagtgcccaatttgccagcagcagaaaccaacactgagccctcgatatggcaccattcctcagggtgatcagccagctacctggtggcaggttgattatattggacctcttgcatcacggaaagggcagagatatgggtttgcctatcttgcacgcaatgtttctgccaagactaccatacatggactcatggaatgccttatccaccatcatggtattccacacatcattgcctctgaccaaggcactcactttgtggctaaagaagtgcggcagtgggctcacgctcatggaattcactggtttcaccatgttgcctatcatcctgaagcaggtggattgacagaatggtggaatggccttttgaagtcacaattacaacgccaactaggtgacaatactttgcaggactggggcaaagttccccagaaggccatgtatgctctgattcagtgtccaatatatggtattgtttctcccatagccaggattcacaggtccaggaatcaaggggtgaaagtggaaatggcaccattcaccatcacccctagcgatccactagcaaaatgtttgcttcctgttcttgtgacattacgttctgctggcctatag

SEQ ID NO: 119163 - DNA, 311 bp, Homo sapiens
caaatcaccatgcaacctgaactgcctatcatgaactgggtgctttctgtcccatctagccataaaatgggtcatgcacagcagcattcaggaagtggcacaaatgcccagggtctccacccctgccaccctgccttctctcccccagcctgcactgatggccccgtggacagttccctatgatcagttgatggaggaagagaaagctagggcacgatatgcaggcaccatccaaaagtggacagctgcagcactacagcccctttctaggacatccctgaaggacagtggtgaagggacttctaagtggg

SEQ ID NO: 119164 - DNA, 594 bp, Homo sapiens
atgacccagcagatccaatggtgcttgaggtgtcagaggcagatagggatgcaggtacccataagtgaatcacagcagaggcctctaggattttggagcaaggccctgccatcttctgcaaataactactctttttttaagagacagctcttggcctgttactgggttttggtggaaattgaacatttgactatgggtcatcaagtcaccatgcgacctgaactgcctatcataaactgcgtgctttctgacccatgtagccataaagtgggtcatgcacagcagcattccatcatcaaatggaggtggtatatacatgattgggctgaaggcacaagtaagttacatgaggaagtggctcaaatccccatggtctccactccttctctcccccagcctgcaccgatggcctcatgggaagttccctatgatcagttgacagaggaagagaagactagggcctggttcacagatggttctgcacgacatgcaggcgccacccaaaagtggacagctgtagcactacagcccctttctgggacatccctgcaggacagcagtgaagagaaatcttcccaatggacagaaatttga

SEQ ID NO: 119165 - DNA, 582 bp, Homo sapiens
gtccaggctgctgtgctagctgctttgcaacttgggccatatgacccagcagattcaatggtgcttgaggtgtcagtgtcagatagggatgctgtttggcgcctttggcgggcacccataggtgaatcacaacggagatctctaggattttggagcaaggttctgccatattctgcagataactactttccttttgagagacagctcttggcctgttactgggctttgttggaaactgaccgtttgactgtgggtcatcaagtcaccttgcaacctgaactgcctatcatgaactgggtactttctgacccatctagccataaagtgggtcatgtacaccagcattccatcatcaaatggaagtgccacccctgtcatcacccaatggatacccatgaacaaagtggccttagtggcagggatggaggttacgcatgggctcagcaacatggacttccactcaccaaggctgacctggctatggccactgctgagtgcccaatttgccagcagcagagaccaacactgagccctagatatagcatcattcctcggggtgatcagccagctacctggtggcag

SEQ ID NO: 119166 - DNA, 635 bp, Homo sapiens
gcaggcattgacttggcaaatgcctttttctccattcctgtccataaggcccaccagaagcaatttgtcttcagctggaaaagccaggaatatacctttactgtcctacctcagaggtatatcaactctccggctttgtctcataatcttattcggagagaacttgatcacttttcacttctggacgatatcacactagtccgttacattggtgatattatgcttattggatccagtaagcaagaagtagtaaacacactggacttattggtccaggctgctgtgctagctgctttgcaacttgggccatatgacccagcagattcaatggtgcttgaggtgtcagtgtcagatagggatgctgtttggcgcctttggcgggcacccataggtgaatcacaacggagatctctaggattttggagcaaggttctgccatattctgcagataactactttccttttgagagacagctcttggcctgttactgggctttgttggaaactgaccgtttgactgtgggtcatcaagtcaccttgcaacctgaactgcctatcatgaactgggtactttctgacccatctagccataaagtgggtcatgtacaccagcattccatcatcaaatggaagtg

SEQ ID NO: 119167 - DNA, 1540 bp, Homo sapiens
tttttttcctattggattttggaggcaacacattcctcgtttgagtgtgttactccagcacatttattgagtgacctgaaaggctgccagttttgagtggggtccaaaacaggagaaagctctatgacaggtccaggctgttgtgcaagttgctctgccacttgggccatatgacccagcagatccaatgttgcttgaggtgtcagtggcagataaggatgctggctgcagcctttggcaggcccccataggtgaatcacagtggcggtctctaggctttcggagcaaggccctgccatcttctgcagataactactcttcttttgagagacagctcttggcctgttactgggctttggtggaaactgaatgtttgactctgggtcatcaagtcaccatatgacctgaactgcctatcatgaactgggtgctttctgacccatctagccataaagttggtcatgaacagcagcattccatcatcaaatggaggtggtatatatgtgattgggctgtagtaggtcgtgagagcacaaccaatggtttggctggatggtcagagacttggaagaagcatcattgggaaatgggtgaaaaacaaatttggggaagaagtatgtggatggaactttctgagtggtcaaaaactgtgaagatatttgtatcctatgtgagtgcccaccaatgtgtaacctcaacagaggaggatttcaataatcaatgggatggaatgacctgttctgtggacaccactcatcctctttccctaaccacctctgtcatcgccaagtgggcccatgaacaaagtgaccatggtggcaggtatggaggttatgcaggggctcagcaacatggacttccacttaccaaggctgacctggctatgaccactgctgagtgcccaatttgccagcagcagagaccatcactgagccctcaatatggcaccatttctcagggtgatcagccagctacctggtggcaggttgattatattggacctcttccatcatggaaagggcagaggtttgtcctcactgtaatagacacttactccggatatgggtttgcctatcctgaacacaatacttctgccaagaccactgtcaatggacccatggagtgccttatccaccgtcatggtattccacacggcattgcctctgaccaaggcactcgctttacagctaaagaagtgtggcagtgggctcatgctcatggaattcactggttttactatgttccccatcatcctgaagcagctggattaataggatggtggaatggccttttgaagtcacaattacaatgccaactaggtgacaatactctgcagggctggggaaaagttcttcagaaggctgtgtgtgctctgaatcagcatccaatatatggtactgtttctcccgtagccaggattcatgggtccaggaatcaaggggtggaagtggaagtggcaccattcatcatcacctctagtgaccgactagcaaaatttttgcttcctgtttcctcgacatcatgttctgctggcctatag

SEQ ID NO: 119168 - DNA, 966 bp, Homo sapiens
atattaaaagagaagttactttattacaatttgttatctcatcccgaggtcagggccccttgcttagtgggaaaaaaaaccctttaggactgagtctcggaacagcacctgctggacagaggggagaaccaacccaggtcagaggggaaagcagcatggcaagacctagacccagttctaagagcacttccttgtccccgctcttacccgggccaccaccttcaaggcccattacctgtcctaaacccaacttctctgtgatgcccggatttcttgattttgatccagtagctgctcattttcctgccttttacatttaggagattcaagctctgtcatttcctctagctgcccctgaagtccgtccttcctgcagggcccaactccacgtagagtgagtgcagccacacagcagtaaccagatagagcagcctgccctgcagacatgagcaaagaagggatccagagagccaaggctgtatcatagattcttgtggggtcaaaggggcagtcagtatgtcccggcccctcatccagtggtaccagaggatccagcagtcctggggtggcagtcagcaataaggcggcggccaccgttgggccacagtgagtgacacagcaagaaggaggcccagggagcaggcaacggacaagagcaggttcaccagagctagtgccagcaggacccagtgcagtggagggcgaagaaggttcctggacgccaggagggccacaagtcccacggaaacgctcagcagccccgagccgacagagatgacattggctacggtgtactccggcgtgacagcgccgcggggattggccacgtgccgcaggacggtgccatgcagcacggcccccagcagcaggttcacgtgcgcccaccaagatcagcgcgaggcccacacgcatcagccgcctgggcccccgggcggcgtcgaaagcgcagagactgcagcgcctcat

SEQ ID NO: 119169 - DNA, 1374 bp, Homo sapiens; identical to SEQ ID NO: 114409

SEQ ID NO: 119170 - DNA, 5652 bp, Homo sapiens
tgttgcttgagaaacttcgccagcgaatacatgataaagctgttgctctggagcgggctatagatgaaaaattctctgctctagaagagaaagaaaaagaactgcgccagcttcgtcttgctgtgagagagcgagatcatgacttagagagactgcgcgatgtcctctcctccaatgaagctactatgcaaagtatggagagtctcctgagggccaaaggcctggaagtggaacagttatctactacctgtcaaaacctccagtggctgaaagaagaaatggaaaccaaatttagccgttggcagaaggaacaagagagtatcattcagcagttacagacgtctcttcatgataggaacaaagaagtggaggatcttagtgcaacactgctctgcaaacttggaccagggcagagtgagatagcagaggagctgtgccagcgtctacagcgaaaggaaaggatgctgcaggaccttctaagtgatcgaaataaacaagtgctggaacatgaaatggagattcaaggcctgcttcagtctgtgagcaccagggagcaggaaagccaagctgctgcagagaagttggtgcaagccttaatggaaagaaattcagaattacaggccctgcgccaatatttaggagggagagactccctgatgtcccaagcacccatctctaaccaacaagctgaagttacccccactggccgtcttggaaaacagactgatcaaggttcaatgcagataccttccagagatgatagcacttcattgactgccaaagaggatgtcagcatacccagatccacattaggagacttggacacagttgcagggctggaaaaagaactgagtaatgccaaagaggaacttgaactcatggctaaaaaagaaagagaaagtcagatggaactttctgctctacagtccatgatggctgtgcaggaagaagagctgcaggtgcaggctgctgatatggagtctctgaccaggaacatacagattaaagaagatctcataaaggacctgcaaatgcaactggttgatcctgaagacataccagctatggaacgcctgacccaggaagtcttacttcttcgggaaaaagttgcttcagtagaatcccagggtcaagaaatttcaggaaaccgaagacaacagttgctgctgatgctagaaggactagtagatgaacggagtcggctcaatgaggccttacaagcagagagacagctctatagcagtctggtgaagttccatgcccatccagagagctctgagagagaccgaactctgcaggtggaactggaaggggctcaggtgttacgcagtcggctagaagaagttcttggaagaagcttggagcgcttaaacaggctggagaccctggccgccattggaggtgcagctgcaggggatgacaccgaagatacaagcactgagttcactgacagtattgaggaggaggctgcacaccatagtcaccagcaacttgtcaaggtggctttggagaaaagtctggcaactgtggagacccagaacccatctttttcccctccttctccgatgggaggggacagtaacaggtgtcttcaggaagaaatgctccacctgagggctgagttccaccagcacttagaagagaagaggaaagctgaggaggaactgaaggagctaaaggctcaaattgaggaagcaggattctcctcagtgtcccacatcaggaacaccatgctgagcctttgccttgagaatgcggagctgaaagagcagatgggagaagcaatgtctgatggatgggagatcgaggaagacaaggagaagggcgaggtgatggttgagactgtggtaaccaaagagggtctgagtgagagtagccttcaggctgagttcagaaagctccagggaaaactgaagaatgcccacaatatcatcaacctcctcaaagaacaacttgtgctgagtagcaaggaagggaatagtaaacttactccagagctccttgtgcatctgaccagcaccattgaaagaataaacacagaactggttggttcccctgggaagcaccaacaccaagaggaggggaatgtgactgtgaggcctttccccagaccccagagccttgaccttggggctaccttcacagtggatgcccaccaattggataaccagtcccagcctcgtgaccctgggcctcagtcagcgtttagcctaccagggtccacccagcacctgcgctcccagctgtcacaatgcaaacaacgctatcaagatctccaggagaagctgctgctatcagaagccactgtctttgctcaggctaacgagctggagaaatacagagttatgcttacaggtgaatccttggtgaagcaggacagcaagcagatccaggtggacctccaggacctgggctatgagacttgtggccgaagcgagaatgaggctgaacgggaggaaaccaccagtcctgagtgtgaggagcacaacagcctcaaggaaatggtcctgatggaggggctgtgctctgagcagggacgccggggctcaacactggctagttcctctgagaggaagcccttggagaaccagctagggaagcaggaagagttccgggtatatggaaagtcagaaaacatcttggtcctacgaaaggacatcaaagatctgaaggcccaactgcgaaatggccacaagggcaattcaaaacctcaagagccgggtccggtccctctcagttacaagtgattattcgtctagtctggaaagaccccggaagctgagagctgttggcaccttggaggggtcttcacctcatagtgtccctgatgaggatgaggggtggctgtctgatggcactggggctttctactctccagggcttcaggccaaaaaggacctggagagtctcatccagagagtatcccagctggaggcccagctcccaaaaaatggactagaagagaagctggctgaggagctgagatcagcctcgtggcctgggaaatatgattccctgattcaggatcaggcccgggaactgtcttacctacggcaaaaaatacgagaagggagaggtatttgttatcttatcacccggcatgcaaaagatacagtaaaatcttttgaggatctcctaaggagcaatgacattgactactacctgggacagagcttccgggagcaactcgcccagggaagccagctgacagagaggctcaccagcaaactcagcaccaaggatcataaaagtgagaaagatcaagctggacttgagccactggccctcaggctcagcagggagctgcaggagaaggagaaagtgattgaagtcctgcaggccaagctggatgctcggtccctcacaccctccagcagccatgccttgtctgactcccaccgctctcccagcagcacctctttcctgtctgatgaactggaagcctgctctgacatggacatagtcagcgagtacacacactatgaagagaagaaagcttctcccagtcactcagattccatccatcattcgagtcattctgctgtgttgtcttctaaaccatcatcaaccagtgcatctcagggggctaaggccgaatccaacagcaaccccatcagcttgccaactccccagaatacccccaaggaggccaaccaggcccattcaggctttcattttcactccatacccaagctggctagccttcctcaggcaccattgccctcagctccatccagcttcctgcctttcagccccactggccctctcctccttggctgctgtgagacaccagtggtctccttggctgaggctcagcaggagctacagatgctgcagaagcagttgggagaaagtgccagcactgttcctcctgcttccacagctacattgctgagcaacgacttggaagccgactcttcctactacctcaactctgcccagcctcactctcctccaaggggcaccatagaactgggaagaatcctagagcctgggtacctgggcagcagtggcaagtgggatgtgatgaggcctcagaaagggagtgtatctggggacctatcctcaggctcctctgtgtaccagcttaactccaaacccacaggggctgacctgctggaagagcatcttggtgaaatccggaacctgcgccagcgcctggaggagtccatctgcatcaatgaccgcctacgggagcaactggaacaccggctgacctctactgctcgtggaaggggatccacttctaacttctacagtcagggcctggagtccatacctcagctctgcaatgagaacagagtcctcagggaagacaatcgaagacttcaggctcaactgagtcatgtttccagagagcactcccaggaaacagaaagcctgagggaggctctgctgtcctctcgatcccaccttcaagagctggaaaaggagctggagcaccagaaggtggaaaggcagcagcttttggaagacttgagggagaagcagcaagaggtcttgcatttcagggaggaacgtctttccctccaggaaaacgactccagtgggccttgcctctccctggtcagactgcagcacaagctggttctcctgcagcaacagtgtgaagagaaacagcagctctttgagtccctccagtcagagctacaaatctacgaggcactttatggcaattccaagaaggggctgaaagcttacagcctggatgcctgtcaccaaatccctttgagcagtgacctgagccacctggtggcagaggtacgagctctgagagggcagctggagcagagcattcaggggaacaattgtctgcgactgcagctgcaacagcagctggagagcggtgctggcaaagccagcctcagcccctcctccattaaccagaacttcccagccagcactgaccctggaaacaagcagctgctcctccaagattcagctgtgtcccctccagtccgggatgttggtatgaattccccagctctggtcttccccagctctgcttcctctactcctggctcagaaacgcccataatcaacagagcaaatggcttgggtttggatacttctccagtaatgaagacccctcccaagctagagggtgatgctactgatggctcctttgccaataagcatggccgccatgtcattggccacattgatgactacagtgccctaagacagcagattgcggagggcaagctgctggtcaaaaagatagtgtctcttgtgagatcagcgtgcagcttccctggccttgaagcccaaggcacagaggtgctaggcagcaaaggtattcatgagcttcggagcagcaccagtgccctgcaccatgccctagaggagtcggcttccctcctcaccatgttctggagagcagccctgccaagcacccacatccctgtgctgcctggcaaagtgggagaatcaacagaaagggaacttctggaactgagaaccaaagtatccaaacaggagcggctccttcagagcacaactgagcatctgaagaacgccaaccagcagaaggagagcatggagcagttcatcgtcagccagctaaccagaacacatgatgttttaaagaaggcaaggactaacttagaggtgaaatccctaagggctctgccatgtactccagccttgtga

SEQ ID NO: 119171 - DNA, 1332 bp, Homo sapiens
ttatttaggaagacatctttgtcttttttcagagcatgaggagcacagcagccgcaaggaaatggtcctggtggaggggctgtgctctgagcaggggcgccggggctgaacgctggctagttcctctgagaggaagcccttggagaatgaacgttgagccactatggagaggatcaagaaatgacgctcttggaaggagagaagcttgggcagtatgaccattttcacgatagtgattcttcctacccatgagcgtggaatgttcttccatttgtttgtatcctcttttattttgttgagcagtgttttgtagttctccttgaagaggtccttcacatcccttgtaagttggattcctaggtattttattctctcattggcccaggtgctgctctccctccggttgtctgctttcagccctgcctgggaaatcaggccggcgccctgatcttcctgactctcattttgtgaggaacctgaacggatgagccatcgctcttgtcccacacgttctgtccaaaaggtgccctcctctctgcttgctcgggggcctgccctctgagctctggcactcaggctgggatgccgcccagtacagaggctctgcagccctgcaggggtctgactgttccacaccagcaggataaaggccacagggcatgttccccttggcggctctggcagcagattggtcggttgagtggcagaaaggcagacggggactgggcaaggcactgtcggtgacatcacggacagggcgacttctatgtagatgaggcagcgcagaggctgctgcttcgccacttgctgcttcgccacgaaggagttcccgtgccctggcaggggagataccatgatcacgaaggtggttttcccagggcgaggcttatccattgcactccggatgtgctgaccccatatcatgttccctgagataggatggctgggggttgggggtgaacagtatttgggagggaaaatcagggactctgttttggacacaatccattggagttgcaggtagacgttccagtagagaagacaagtggctggctggctctctgagcctggagttgagggggtgatgtgggctggagattggactttggcatcatcagtgttggtgaggcagctacaatcatgactctggatgagctcattgatgggggcagcaagtgtggacagagaagcaggaggtctgaagactgaggtctgaggtgtttggggagaagaggaggaaccttcaaaactattgtatgatttcacaaacaggacactgacattgatagagtccagattcagaacatgtccgtcatcaccaaggtccctcat

SEQ ID NO: 119172 - DNA, 909 bp, Homo sapiens
tgcctcctgcagcaaccaggccagggggaatctggattcctattacacttctgaggaaggtggtcagggagtgtggaggatgtgggtgggagggggtgaggttgagggcaggagtacactgtggtcttctgtcttctacctcattggcccaggtgctgctctccctccggttgtctgctttcagccctgcctgggaaatcaggccggcgccctgatcttcctgactctcattttgtgaggaacctgaacggatgagccatcgctcttgtcccacacgttctgtccaaaaggtgccctcctctctgcttgctcgggggcctgccctctgagctctggcactcaggctgggatgccgcccagtacagaggctctgcagccctgcaggggtctgactgttccacaccagcaggataaaggccacagggcatgctgtggtggaaggctctggcagcagattggtcggttgagtggcagaaaggcagacggggactgggcaaggcactgtcggtgacatcacggacagggcgacttctatgtagatgaggcagcgcagaggctgctgcttcgccacttgctgcttcgccacgaaggagttcccgtgccctgggagcggggataccatgatcacgaaggtggttttcccagggcgaggcttatccattgcactccggatgtgctgacccctgcgatttccccaaatgtgggaaactcgactgcataatttgtggtagtgggggactgcgttcgcgctttcccctgactttctggagtttcaggtcatgtcttttttcgtattggtttgtgtcttagttgttaatcctacagtggaggcctggggaataagcagcggcaggcccagcttgtgcagcggctgcagggcaaggtcagggccacccattcctgctcttt

SEQ ID NO: 119173 - DNA, 585 bp, Homo sapiens
ttatttaggaagacatctttgtcttttttcagagcatgaggagcacagcagccgcaaggaaatggtcctggtggaggggctgtgctctgagcaggggcgccggggctgaacgctggctagttcctctgagaggaagcccttggagaatgaacgttgagccactatggagaggatcaagaaatgacactcttggaaggagagaagctcattggcccaggtgctgctctccctccggttgtctgctttcagccctgcctgggaaatcaggccggcgccctgatcttcctgactctcattttgtgaggaacctgaacggatgagccatcgctcttgtcccacacgttctgtccaaaaggtgccctcctctctgcttgctcgggggcctgccctctgagctctggcactcaggctgggatgccgcccagtacagaggctctgcagccctgcaggggtctgactgttccacaccagcaggataaaggccacagggcatgcctccttgaggacctgggttttcaggcccccgaggttggtcaatgtggagtctttcccactgttcatctgggaactgaaggaatatcccat

SEQ ID NO: 119174 - DNA, 994 bp, Homo sapiens
tgagtgcggcggaattcctggaagaagagaggtgagccggcggtcaggcagaggctggcctggcagcgggtcttgactgcgcccctgaggtggaggtaccaagtgacactgtttctccttctaggaagcagaagcgttggagaaccagtcccagccttgtgacactgggcccaatcagcatttagcccaccagggtccacccagcacccgcgctcccagctgtcacaatgcaaacaacgctatcaagatctccaggagaagctgctgctatcagaagccactgtctttgctcaggcgaacgagctggagaaatagagagttatacttagtaggtgaacccttgctgaagcaggacagtaaacaggtccaggtggacctccaggacctgggctatgagacttgtggccaaagcaagaatgaggctgaacaggaggaaaccaccagtcccgcacctacttggtcccgcgcgctccctcgtgtcgcccctcggagcagcagccgccgcggtcgccgctacccggaaagaagtcagagacgccgcgaggtcgccgccaccgccatgcccaagaataaaggtaaaggaggtaaaaatagacgcaggggtaagaatgagaatgaatctgaaaaaagagaactggtattcaaagaggatggtcaggagtatgctcaggtaatcaaaatgttgggaaatggacggctagaagcaatgtgtttcgatggtgtaaagaggttatgtcacatcagaggaaaattgagaaaaaaggtttggataaatacctcggacattattttggttggtctccgagactaccaggataacaaagctgatgtaattttaaaatacaatgcagacgaagctagaagtctgcaggcatacggcgagcttccagagcatgctaaaatcaatgaaactgatacatttggtcctggagatgatgatgaaattcagtttgatgacattggagatgatgatgaagatattgatgacatctaa

SEQ ID NO: 119175 - DNA, 550 bp, Homo sapiens
cggcggtatcgaccccgacgtgttcaagatcctggtggacctgctgaagctgaacgtggcccccctcgccgtcttctaaatgcgcgagtccatgtgtgccgggcagaggctagcgagcgagccccaggaccctgcggccgtgtctctgcccacgtcgagcgtgcccgagacccgaggcttgagtgacaacttgaggacaaggcggcgcctcgacaagatttcacacagcagctacgggggccagagaagcagcaccgcatggtgtggcaggagaaggaggacatgcacaagcaattggttgaagcttcagagacattgaaatcccaagccaaagaactgaaagatgcccatcagcagcaaaagctggccctgcaggagttcttggagctcaatgagctcatggcagagctctactcccagaagcagaaggtgtgggacaaggaggaggagatggaagtagccatgcagaaagctgacatgatgtggcaggagatctgaagatccaagaagctcagaaagaggatgctgtttagccagatgcggtggctcc

SEQ ID NO: 119176 - DNA, 638 bp, Homo sapiens
tttttttttttttgacctggaccctctgcatctcaaaaaggtttattatcaattgaaggaggtaacatgtagctttttgctggggacaaaaatgcaacaagtctttgccccatcctaggtgctgccccgtgtagggctctttcccaggccccgccccccttgggcaaaccttggtaacgctgggcttggcgtggcaatcctctggctggatccttcgcggctggctcgttccgcccagggccaaatgctccccccgagggcaagcgcttgccatttgtctctcccttcggggtctcggggcacgctcgacgtgggcagagacacggccgcagggtcctcggggctcgctcgctagcctctgcccggcacacatggacttgagcatctggaagacgggcgacggggggccacgttcagctttcagcaaggtccaccagggatctttgaacacgttcggggtcgataccgccgcccgccgcctgagccaagctcgtacagctccatctccttcggtgctcagcaccttcttccgccgcagcgccagcttctgccgggccgcctccagccccgggggcgccgccgaccccggcccaggccctacgccctgcgccgccatccccgcggcccgcggaaaggtg

SEQ ID NO: 119177 - DNA, 787 bp, Homo sapiens
cccggaagcagatcgcgctggggaaaggccacgtcgctatgagtgtgtttcagtctacctggattaaacgtttgcttctcttcgtctaccttgattaaacgtgcacttcgcagtcctcggttctccatacccgtgacctggggatcgctacggaccttaaaatacccgcaacagccccttcgtcccaagtaggtaggagaattgctcccctttcggtttaaaatctctctgaggccgttccttgctctctgcctttcttccttaggaccatgtagacaaccccattcaggtagtgttcccgcttaaaaccctctgcttgggccccgcgccaagtcgagtcctcattcgggatgtggactagcgcccttcgcgatccccgagctcctccgtcgtctgcccctggaggggagcgcccactgtccggctcctgaaggagccgcttctcctcccacgtcctgggattctgcagaccctccctgtcgagagacatcgatcttcgcgccacctcgtgtcgtcctcacgccagggccttccgctccccaggcttccccttcacagccactgcttttcttgactccccgttgggacaggttacctgagtctgtcttgtgacacccagtgttcttccttcccaaattttactccactggaaaatgtgctcttccgggaggagggcatcctattcctcccctttcctcccgaatgggtgggtgagagggatcaggagaggaaaaagacggggaacgacggagcaaaaggaaaaactgatgagaaaagaaatgaggaa

SEQ ID NO: 119178 - DNA, 2633 bp, Homo sapiens
gggtatgcggaacagaacacagtggtctagctaaccgatttccgctagacgtccagctatctttcaaaatattttgtttctgcacggcaacttcagccgctaaaaaagcatccagcttacaacggaacctggagggttggtaaaggccccctgcgctggccccgccccatgggaccgggcggcgtgggcgtgagaggcggggcggggcgcgctctgcttgccaatgtctttataggtcacccggaaggcacgcggaacctcggcgcggtgcttccagcagggtctctccgccactccagccccgcgcccctcgccgcggccctcgggcgtctgcgccgcagctgccgcccccgcctctttggagtctctcgcggcctcaaagcgcggcctgcgtcgcttccggcagttcccgaccgcgggcgatggctgccgctgggggcgcccggctgctgcgcgccgcttctgctgtcctcggcggcccggccggccggtggctgcaccacgctgggtcccgcgctggatccagcggcctgctgaggaaccgggggccgggcggtagcgcggaggcgagccggtcgctgagcgtgtcggcgcgggcccggagcagctcagaagataaaataacagtccactttataaaccgtgatggtgaaacattaacaaccaaaggaaaagttggtgattctctgctagatgttgtggttgaaaataatctagatattgatggctttggtgcatgtgagggaaccctggcttgttcaacctgtccacctcatctttgaagatcacatatatgagaagcttagatgcaattcactgatgaggagaatgacaatgctcgatctgggcaatggactacccagccagatccccggttgctgccaaatcctgtttgacaaaaatctatggacaatatgactgttcgagtgcctgaaacagtggctgatgccagacaatccattgatgtgggcaagacctcctgaactagaacaaatagggaatattttcatggaaaatttacctatttttataattattatttcttaaagtgattaaattgagaacatggatgagtggacttcatattatgactagctttactattttaattcaccttgcataactactgaattttgtcattcttgaaagtatgcaatttttattttggttatattacaaaaatgtcaatcaaatattaaaaaatagttaatgtgatagaaaaaccttacatatttttttctcatgtgtgtgtatcgcgacttgcgcaatgtgttttcataatatctcatctggtttaccctggaagattgggttaagaaaatattttattattcctggtttgaagtgggttgaaggccagagatcttaccctggcttggtttagggccataccaactatttacaaactctgtactagaccctgtgtccttattcctataagctatggtgttcagactgaaactggagaaattatgactaatttatttatagtagtagttaaattccgagtggtgtatggcacaaaaaatatttattggctcagtaaagctgcttaacttcaaaagatagttattgccctttataaataaatatttcaaaattttgatgcggaaggactaagtctggccgtagacgattataatgctatcaaagaagtttgatctctgttttgactaaactagaggaaaaatgattggatgtgtttattcttttctaagcagaatggtttaactttgtactctttgaaaaataatgctgatttataaatctctgcctataacagaatggaaaccttatgaatgaattgtgtttctctgtcctgagctcggtacccctggagaagggaatgagcaggctgacacgttgcacagccccaggtggcgccattctctcacgcaaggatggggctgcagggtgagcagcgtgggctgcagtgtgtcagtcccaggagtgagggagtggcaagcaccacagattaccacgtatgtgtggaagacattcgtactcttatctttactataaataaattcataaaagttaacaaaggggtacacagtatggtctttggaaatataataaaacatcaactaacttggactaattgtgaggaaagagcagaccaaattagtagaaagaggttataagacaattgagttagcttcatgtgtattattgcagcttgatcatttatataaatatttgtctagtacaatgcttgacatacagcattgtgttatgcccattggggacacagaggtgaacaagacaaggaatgccatcagggaattcaccttttattaggaaaatataaaatatgtatgtatgtgcagataatttgcttgaactaaactgactagttctgctaaataagattttaaactaattcatatgtaaaaagtgattaggaagaacttgaagtatcatttgatgcttaataactattgagtaggtttttttttttttttttggtggggggagcgggggacagggtcttactctgtcactcaggccagagtacaatagtatgatctcggctcactgcaacttctgcctcccagtttcaagggattctcgtgcctcagcctcccaggtagctggtactacaggcacggaccaccacgcctgggctaatt

SEQ ID NO: 119179 - DNA, 933 bp, Homo sapiens
atgaggatggagactgggaccagagaagaggaggtgaggctggagaccaggaccagaggagaggaggtgaggatgaagaccaggaccagagaagaggaggtgaggatggaaacagggaccagaagagagatggtgaaaatggagactgggactggaagagagaagatgaaaataaagaccaggatgaaaagagagaaggtgaagatggaaaccaggaccagaggagaggaggtgaggatggagaccaggaccagaggagaggaggtgaggatggaaaccaggaccagaggagaggaggtaaggatggagaccaggaccaggggagaggaggtgaggatggagaccaggaccaggggagagaaggtgaggatggagaccaggaacagaggagaagaggtgaggatggagagtgagaccagaggagaggaggtgaggatggaggccaggaccagaagagaggaggtgaggatggaaaccaggactggagcagagagggtgaggatagagactgacactggaggagaggaggtgaggttggagagtgagaccagaggagaggaggtgaagatggagagtgaggccagaggagaggcagtgaggatggagactgggaccggagcagaggaggtgaggatggagaccaggaccagaggagtgttggtcatctgtgtcactctcaaggtcctccagcatctggttgtgtcagctgagatggtgggcaaggccttggtgccttattaccgtcaaatcctccctgtcctgaacatctttaagaatatgaatgaatcccacaatgaacatgctggtccactttatgatgttccacagctccacattcagaagcagcaatcagaacacaggtccccaagttttggaggaaagggtccttttcacctgcactggctcccacaagctgtgtgcaagctactctag

SEQ ID NO: 119180 - DNA, 882 bp, Homo sapiens
  misc_feature (1)...(882): n = a,t,c or g
tgaattgcatatgaaaattatagtttattgtctatacaactgaaggtttaactcggactcctgcttctgtcggagctgtataaagaagcaattcttctcttagaacaaataagcacagtacactattgtaatctaagaaacaggcactatttatgtattggaaagccttgctctcaatagggctaacagtccaatggcccataagccactattttagcagctgtagaaaagaaagctgtggaagtcacaaggaatgagatgctaaaagcaacagagacagatgatcccaacacccancgggaggtttcaagtcccagctgctgccactgttagtttagcaagcaagactcgtaggttgggaccacgtacttaatgttgataaaggcattttctcctccgtagcgctcgaaggcctccagtgtctcctggatcaagtccccaatgttctccctcttctgctggctgtagtcaatgccgtctccggagttcacattcatattcttaaagatgttcaggacagggaggatttgacggtaataagggcaccaaggccttgcccaccatctcagctgacacaaccagatgctggaggaccttgagagtgacacagatgacctgtcggtttcggaggttcaaggcattttttatcgggataatgagctgtggaaggacaggtaggatcttgttccccccgtgttccagcatgtcgtggattccttgccgagcaaaaaactcatagggaaatgtcatttcacaaagcccatcaaaaaacagaggcagataatgatggtaatccagcttctcaatttctaccttccaggcgattttgtttcctttcgaatcatgctcaagggcaattgggaagtcacccggacgcgtggg

SEQ ID NO: 119181 - DNA, 1353 bp, Homo sapiens
gtatgggagactgcagggtcagtgttggtcagcgacggaccctgctctcagcatgctctttctgcctgactgctttcagtgtctgcagcagctgctagcagggtgagagaggaggaagagagcagtcggaggctttgacctggttttgggagagcagccctctgataaaatatttaggtaagtgattgtctagggacttgctttgtggttgcccctcagcaagagctttgtgattccaccagccgaactggccatcaatccatcagcaaagtgcaagacggacatgactgtgatggaggatgctgtggaggtcaggtgagtctggcttcaggactgaggcctcgacagcctggaggttctcttagattcctttgggccggtgcgcgactgcagcaaagataacgggggctgcagtaagaatttccgctgtatttcagatcgcaagctggactccactggttgcgtggtaggtctgccctgcaagctagtagtggacagctctggctgctatgaccgccacatcggggtggactgttccgacggcttcaacggcggctgtgagcagctgtgcctccagcagatggcgcccttcccggacgaccccaccttgtataacatcctcatgttctgtgggtgagttgagctgccagcgaggccactggatggacgctcttgccaactcatcacggagacctgtccagagggaagtgactgtggggaaagcagggagcttcccatgaaccagaccctctttggggagatgttctttggttacaacaaccattccaaggaagtggctgccggacaggtgctgaaaggaacattcaggtaaacctcatatacatagaactgataccagcaactgccagatggtcttgtggtggccactgtgcccctggagaatcaatgcctagaggagatctcggagcccacccctgaccctgacttcctgactggtgagtgtgccttctcaaccttattcgggtaccctgtgctgcagcactggaaggtccggtctgtgatgtaccacatcaaactcaaccaagtggccatctctcagggtgagcactgctgcaggctatcctgcgatggggctacatctcgtgcagattttgtggcgctgttggaccagttcggcaaccattacatccaggaagctatctacggctttgaggagtcctgttctatctggtacccaaacaagcaggtccagcggcgactctggctggagtatgaagacatcagtaaaggtgagtggcatgcttgttggcaaattctctccacatttccctggattgtcatttccctgcataactgtcttccataataatagacttgacagtatttaccata

SEQ ID NO: 119182 - DNA, 482 bp, Homo sapiens
gtttctattccgccttccttgtagcagataaggttattgtcacttcaaaacacaacaacgatacccagcacatctgggagtctgactccaatgaattttctgtaattgctgacccaagaggaaacactctaggacggggaacgacaattacgtgagtatgaccaattccttataagaattaatagtcatggtgaggatcttgactctccagttctattctctgagcaaatgacttattctgggccttaattttcctgccttataaaatgaggaaacagaactgttgtcacttgaagaaatgtttgaggacctgcaaagggccaggcacaaaggtttgtgattgctgttgtacatggagggtataaagtaggaaatagcagcagcttccccaagggagaaggcttcttgggtacccacagaggaggcactgctttgtcagtttcccaggttagaagagtaatttgtctgtggagcatcctgat

SEQ ID NO: 119183 - DNA, 2726 bp, Homo sapiens
  misc_feature (1)...(2726): n = a,t,c or g
atgagggccctgtgggtgctgggcctctgctgcgtcctgctgaccttcgggtcggtcagagctgacgatgaagttgatgtggatggtacagtagaagaggatctgggtaaaagtagagaaggatcaaggacggatgatgaagtagtacagagagaggaagaagctattcagttggatggattaaatgcatcacaaataagagaacttagagagaagtcggaaaagtttgccttccaagccgaagttaacagaatgatgaaacttatcatccattccttgttatagaataaagggattttccttgagagacttatttccaattcctcctgttgctttggataggttaagcctaatatcactgactgatgaaaatgctctttctgtaaatgagtaactaacagtcaatcattaagtgtgataaggagaagaacctgctgcatgtccagcacaccggtgtaggaatgacccagagaagagttggttaaaaacccttggtaccatagcccaaatctgggaccaagcgagttttttaaacaaaatgncctgaagccacaggaagatgggcccagtcaaccttcctgaattgattggcccagtttgggtgtccggtttcctattcccgccttcccttgtagcagataaggttattgtcacttcaaaacacaaacaaccgataccccagcacatctggggagtctggactcccaatggaattttcttgtaattgctggacccaagagggaaacactcttaggaccgggggaaccgacaatttaccctttgtccttaaaaagaagaagcatctgatttaccttggaatttggataccattaaaaatctccgtcaaaaaaatattcacagtttcataaaacttttcctaatttatgtatggaggcagcaagactgaaactgtttgaggagccccatggggggaagaagaagcagccaaagaagagaaagaagaatctgatgatgaagctgcaggtagaggaagaagaagaagaaaagaaaccaaagactaaaaaagttgaaaaaactgtctgggactgggaacttatgaatgatatcaaaccaatatggcagagaccatcaaaagaagtagaagaagatgaatacaaagctttctacaaatcattttcaaaggaaagtgatgaccccatggcttatattcactttactgctgaaggggaagttaccttcaaatcaattttatttgtacccacatctgctccacgtggtctgtttgacgaatatggatctaaaaagagcgattacattaagctctatgtgcgccgtgtattcatcacagacgacttccatgatatgatgcctaaatacctcaattttgtcaagggtgtggtggactcagatgatctccccttgaatgtttcccgcgagactcttcagcaacataaactgcttaaggtgattaggaagaagcttgttcgtaaaacgctggacatgatcaagaagattgctgatgataaatacaatgatactttttggaaagaatttggtaccaacatcaagcttggtgtgattgaagaccactcgaatcgaacacgtcttgctaaacttcttaggttccagtcttctcatcatccaactgacattactagcctagaccagtatgtggaaagaatgaaggaaaaacaagacaaaatctacttcatggctgggtccagcagaaaagaggctgaatcttctccatttgttgagcgacttctgaaaaagggctatgaagttatttacctcacagaacctgtggatgaatactgtattcaggcccttcccgaatttgatgggaagaggttccagaatgttgccaaggaaggagtgaagttcgatgaaagtgagaaaactaaggagagtcgtgaagcagttgagaaagaatttgagcctctgctgaattggatgaaagataaagcccttaaggacaagattgaaaaggctgtggtgtctcagcgcctgacagaatctccgtgtgctttggtggccagccagtacggatggtctggcaacatggagagaatcatgaaagcacaagcgtaccaaacgggcaaggacatctctacaaattactatgcgagtcagaagaaaacatttgaaattaatcccagacacccgctgatcagagacatgcttcgacgaattaaggaagatgaagatgataaaacagttttggatcttgctgtggttttgtttgaaacagcaacgcttcggtcagggtatcttttaccagacactaaagcatatggagatagaatagaaagaatgcttcgcctcagtttgaacattgaccctgatgcaaaggtggaagaagagcccgaagaagaacctgaagagacagcagaagacacaacagaagacacagagcaagacgaagatgaagaaatggatgtgggaacagatgaagaagaagaaacagcaaaggaatctacagctgaaaaagatgaattgtaaattatactctcaccatttggatcctgtgtggagagggaatgtgaaatttacatcatttctttttgggagagacttgttttggatgccccctaatccccttctcccctgcactgtaaaatgtgggattatgggtcacaggaaaaagtgggttttttagttgaattttttttaacattcctcatgaatgtaaatttgtactatttaactgactattcttgatgtaaaatcttgtcatgtgtataaaaataaaaaagatcccaaat

SEQ ID NO: 119184 - DNA, 416 bp, Homo sapiens
ttttttttttttttaccaggccaaattttttaatttttttgtagagatggggtctcgccatgttccccagtctggacaacaagagtgaaactctgtctcaaaaaaaaaaaaaaaaagatctatgtccccacatttcatttgaaatggatctgaccacggcagatgcccgctgggtgcaagacgcagccacgaggctcctggctaccactcggtgtccaccaaactccagaggtagtcgctgatgaatttcctggagagctgggtgctgtcctggtggatgggctgggccacactggggccatgatggatgcctttgaccatccctggctcacactcataatcccactcaattttactaacttggtgaggatctctcgcagctgcttctcggcaccgtcttgcgtttccagcagccg

SEQ ID NO: 119185 - DNA, 477 bp, Homo sapiens
atggccgccttccgcgacatagaggaggtgagccaggggctgctcagcctgctgggcgccaaccgcgcggaggcgcagcagcgacggctgctggggcgccacgagcaggtggtggagcggctgctggaaacgcaagacggtgccgagaagcagctgcgagagatcctcaccatggagaaggaagtggcccagagccttctcaatgcgaaggagcagctcaccagagagctggaagagctcaaggagattgaggcggatctggagcgacaggagaaggaggtcgacgaggacacgacagtcacaatcccctcggccgtgtacgtggctcaactttaccaccaagttagtaaaattgagtgggattatgagttccatcatggccccagtgtggcccagcccatccacctggacagcacccagctctccaggaaattcatcagcgactacctctggagtctggtggacaccgagtggtag

SEQ ID NO: 119186 - DNA, 864 bp, Homo sapiens
tcaggactgggtcatgggggtggtctgccagccagcagaggcacaggaaggacagagggctggactctgctggctctgggtgggtgagccacatccttcctgttcccgctcctccgccggctgatgcacgtccctcggcgagcagatggagaaggcagggaagccatcctctcccaggaaggacagagtgtccctccgtccagccactctgcctgcctcctccagcaggacatcatagaaatcacagcatagcaagcccatctcagactccacctccaaggagccttccaggatcccaagacaaatccctctttcttccaagggataggagaacaggggagggagagggacatatgaattaggccccactgagtgcaccaggtacctcatgtaggtcaggtggctccacgtcctggcttcctgagattctgggccccacacagtgaaagaaatcccagactgttcttctacccgagtccccctgcggcttaggcggtacctgacacaaagcctgggccccagctgggctggggagagcggggaggggagaggaagagaagcgctgtgggcctcagtcactcggcagtgcttggtaaatgatactgctgttggcactggtactggtgctgcggtcatgtctcctttttgatttgttaaatcgtcatggttgcatgttaaggagtcctctgggaagaagtgggtgaacaacatccctgcagctcctccagaagcctggggagtatgactaagttgtctcctccacctccttgtcttcttcttccctgctgctttgatacaggaggagggggcgagagttggggggactcctgcatcagcttcagggaaatgaccttgaagggccat

SEQ ID NO: 119187 - DNA, 633 bp, Homo sapiens
aaatcccttaagattcttttctataattagttttctttgaagaagcttggaaagttttctgcattgagatttagaatccacagtgtttctgtaatttagctttccaggaattttgaattttaatttttgtttttactttttatgtacacagtataatgatgttagtgttaaatattaaaaatctgactcttcactgggacttttttatagatacaaatgtatctgtggtagtacaaggactttgttactttggcgtgcagtcttatcaaggagttgtgtgtgtgttttgcatacaactttacaatttcatagttgaaagctgttacaaaatgaaagttttgtgtatggtaggatatcttcaaggtgggtggatgttttctgtttaaaagattaagatgccaacagcgtttttttcttttaattttttcatcaagcacccagtcagcttgaagagtttcaaatggaccctaccactgagaaatcaagatggcagtctactatggggaattgaggaaaaatggattaatacaagagtcctgtgataatatacaaccaagacagggttcttttaacatggattccatgcagtgaatgaagacaggtttcttacccaacacaaatggacagtggatt

SEQ ID NO: 119188 - DNA, 557 bp, Homo sapiens
cattcgacatcgatgatcactagtccagagtggtggaattccgcgctcggacccggttctccaacggaggagctttttaacctctttccggtgaggagggaactcatcttcatgatcgaatttaaaagaacaatggaaccctgactacgtttcaacaaaaataaaacttgtttttttccctcctatagggtggtggcttttaactctttcaaagccgattttgaaacggctgcagtgatacatgcgaaggtgacttaagagattaaaattaatttggttgctgttggttctgaacaaataaagagttcttttatttgaggtatgccattttgaaaactgagacgttggagttttatcctacaggatacaggaaatctttgggaaaggcagtattgtatatagcaaaaatatgaacctcaaactgaatcctgtaaaggccccatacaatgaagtagacattggtggaaacatttacacccagtcagcttgaagagtttcaaatggaccctaccactgagaaatcaagatggcagtctactatggggaattgaggaaaa

SEQ ID NO: 119189 - DNA, 1078 bp, Homo sapiens
  misc_feature (1)...(1078): n = a,t,c or g
actcggcaacctacaaaggccaaagtattactaaaattaaaacttaaacattttaattaaaccttcccactttaaaanaaaaaaaaccccaaacctgagaaattttttaagtgttacaaatttttattaaaaattaacatttcaagaggtcatacggtatacaaatcaaactgcaaaaaaattccaggcataaaaactattatctggggtaagtgtgcccatctttcttctcccaaatggtcaaaaatggtcccaccaaaaaaagtctttaggaaaagtccaaatcccactgtcccatttgtggttggggtaagaaacctatgtcttcattcactgcatggaatccatgttaaaaggaacccctgtcttggttgtatattatcacaggactcttgtattaatccatttttcctcaattcccccagtagtagactgcccatcttgatttctcagtggtagggtccattttgaaactcttcaaagctgactggggtgtaaatgtttccaccaatgtctacgttcattggtatgggggcctttagaggattcagtttgaggttcatatttttgctatataaaatactgactttcccaaagatttcctttatcctctaggataaaactccaacgtctcagtcttcaaaatggcatacctcaaataaaagaactcgattatttgttcagaaccaacagcaaccaaattaattttaatctcttaagtcaccgggtccgagcgcggccaccggcacctcctggtcgcccaaatccgagtcccgggccggaccgcccgcccgagcctcccgcccgcgccgggtccagccgccggggcccgggggagcctccgagacggcaaccgcagcggcgctttcggcgtcgtgggcccgaccgccctgggcgcctctcccgcgggctgtgacgccgacgcgcgcggcccgcctcgcctcagccgcggcagcaccactcccgcgggcctgctggccgtccgggcgtagctccccgccggccggcgggcctcgcggccgcggcggaacgcctgacagctcggggtgctgctgcctctccggccatccctcgtgcc

SEQ ID NO: 119190 - DNA, 455 bp, Homo sapiens
  misc_feature (1)...(455): n = a,t,c or g
gggtaagccggttcnnnnncaatgagactaagacatgcggnggcatctaaggaacagaacgaggcctcacaaataacaccacacatctacaaccacctgatctttgacaaaccctatttaatatatggtggtgggaaaattggctagccatatgcagaaagctgaaactggatcccttccttacaccttatacaaaaattaactcaagatggattaaagactaaaatataagacctaaatccataaaaaacctggaagaaaacctaggcaataccattcagcacttaggcatggcaaagacttcatgactaaaacaccaaaagcaatggcaacaaaagccaaaattgacatatgggatctaattaaactaaagagcttctgtacagcaaaagaaactatcatcagagtgaacaggttacctacataatgggaaaaaatttttgcaatctacccat

SEQ ID NO: 119191 - DNA, 861 bp, Homo sapiens
atggataaattcctggacacatacaccctcccaagactaatccaggaagaagttgaatccctgaatagaccaatcacaggctctgaaattgaggcaataattaataggctaccaaccaaaaatgtccaggaccagacggattcacagccgaattctaccagagagaataaaatacctaggaagccaacttataagggatgtgaaggacctcctcaaggagaactacaaaccgctgctcaacgaaataaaagaggacacaaacaaatggaagaacattccatgctcatggataggaagaatcagcatcgtgaaaatggccatactgcccaagccatatgcggaaagctgaaactggatcccttccttacaccttatacaaaaattaattcaagatggattaaagacttaaatgttggacctacaaccataaaaaccctagaagaaaacctaggcaataccattcaggccataggcatgggtgaggacttcatgactaaaacaccaaaagcaatggcaacaaaagcaaaaattgacaaatgggatctaattaaactaaagagcttctgcacagcaaaagaaactaccatcagagtgaacaggcaacctacagaatgggagaacatttttacaatctacccatctgacaaagggctaatatccagaatttacaaagaacttaatcaaatttacaagaaaaaaatcaaggaaccccatcaaaaagtaggtgagggatatgaacagacatttctcaaaagaagacatttatgcagcccacagacacatgaaaaaatgctcatcattactggacatcagagaaatgcaaatcaaaaccacaatgagataccatctcacaccaattag

SEQ ID NO: 119192 - DNA, 372 bp, Homo sapiens
aactaaagagcttctgcatggcaaaagaaactaccatcagagtgaacaggtaacctacagaatgggagaacatttttgcaatctacccatctgaaaaagggctaatatacagaatctacaatgaagccacaaataaagaccttgtacggaggtctggccctctgaaaacacccaaaaagaaaagccaactgaccgtactcaacttagtcacctttaaaagaacaccagccctctcagaggagaaagaatcagcacaagtactctggcaatttaaaaagccagagtgtgtacttacttccaaaagagtccactagctccccggtaatggttcttcttgcattcaattacacataatcaatgtacagaatgttc

SEQ ID NO: 119193 - DNA, 1866 bp, Homo sapiens
atgaatattgatgcaaaaatcctcaataaaatactggcaaaccgaatccagcagcacatcaagaagcttatccaccatgatcaagtgggcttcatccctgagatgcaaggctgggtcaacatatgcaaatcaataaacataatccagcatataaacagaaccaaagacaaaaaccacatgattatctcaatagatgcagaaaaggcctttgacaaaattcaacaacgcttcatgctaaaaactctcaataaattaggtattgatgggacatatctcaaaataataagagctatctatgacaaacccacagccaatatcatactgaatgggcaaaaactggaagcattccctttgaaaactggcacaagacagggatgccctctctcaccactcctattcaacatagtgttggaagttctggccagggcaatcatgcaggagaaggaaataaagggtattcaattaggaaaagaggaagtcaaattgtccctgtttgcagatgacatgattgtatatttagaaaaccccatcgtctcagcccgaaatctccttaagctgataagcaacttcagcaaagtctcaggatacaaaatcaatgtgcaaaaatcacaaacattcctacacaccaataacaggcaaagagagagccaaatcatgagtgaactcccattcacaattgcttcaaagagaataaaatacctagaaatccaacttacaagggatgtgaaggacctcttcaaggagaactacaaaccactgctcaatgaaataaaagaggacacaagcaaatggaagaacattccatgcttatggataggaagaatcaatatcatgaaaatgtccatactgcccaaggtaattcataaattcaatgccatccccatcaagcgaccaattactttcttcacagaattggaagaaactactttaaagttcatatggaaccaaaaaagagcccgcattgccaagacaatcctaagcaaaaagaacaaagctggaggcatcacgctacctgacttcaaactatactacaaggctaacagtaaccaaaacagcatggtactggcagaaaaacagagatacagaacaatggaacagaacagaggcctcagaaataatgccacatatatctacaactatctaatctttgacaaacctgagaaaaacaagcaatgggggaaaggattcccttatttaataaatggtgctgggaaaactggcttagccatatgtagaaagctgaaacttggatcccttccttacaccttatacaaaaattaattcaagatggattaaagacttaaatgttagacctaaaaccataaaaaccctagaagaaaacctaggcaataccattcaggacataggcatgggccaagaacctcatgactaaaacaccaaaagccaatggcaacaaaagccaaaattgacagatgggacctaattaaactaaagagcttctgcacagcaaaagaaactatcagcagagtgaacaggcaacctacagaatgggagaaaatttttggaatctacccatctgacaaagggctaacatccagaatctacaatgaactccaacaaatttacaagaaaaaaacaaacaaccccatcaaaaagtgggccaagcatatgaacaaacacttctcaaaagaagacatttatgcagccaaaaaacacatgaaaaaatgctcatcaccactggccatcagagaaatgcaaatcaaagccacaatgagataccatctcacatcagttagaatggcaatcattaaaaagtcaggaaacaatagtgtgtccgacatttctctagcttggctaaattgtgacatgatccaagttactggtctggcagcagggagaaaagag

SEQ ID NO: 119194 - DNA, 430 bp, Homo sapiens
gggggagtcttcttcctgcggacccccacagactgctgcgggatgttgcagggtgcagccggaagcactgggttctacgcatctgaagcgagacccagagggccagcctgctctctggataggggctcgagttctctcctctcttggggtctgcatcaggaccctctttttccagcagcaaagcaacacaggagggaggctggacgcgctgaccagaactctcctcgccctcgtctgagcacaggctgacagacaccgaccctctagcgtagaccggcagcggccacgggtagacggcgggctcagcccccacgggcgacttcagtctcagctccagcttctcccccatgtccgcgcgcgcggccgccgcaccatgctcggcctcccagagtgctggcatgtcagccgtgagccaccgcgcccggcccat

SEQ ID NO: 119195 - DNA, 478 bp, Homo sapiens; identical to SEQ ID NO: 117934
  misc_feature (1)...(478): n = a,t,c or g

SEQ ID NO: 119196 - DNA, 1336 bp, Homo sapiens
tgttggaagttctggccagggcaattaggcaggagaaggaaataaagggtattcaattaggaaaagaggaagtcaaattgtccgtgtctgcagatgacatgattgtatatctagaaaaccccattgtctcagcccaaaatctccttaagctgataagcaacttcagcaaagtctcaggatacaaaatcaatgtgcaaaaatcacaagcattcctatacaccaacaacagacagagagccaaatcaataaaatacctaggaatccaacttacaagggatgtgaaggacctcttcaaggagaactacaaaccactgctcaaggaaataaaagaggatacaaacaaatggaagaacattccatgctcatgggtaggaagaatcaatatcgtgaaaatggccatactgcccaaggtaatttacagattcaatgccatccccatcaagctaccaatgcctttcttcacagaattggaaaaaactactttaaagttcatatggaaccaaaaaagagcccgcatcgccaagtcaatcctaagccaaaagaacaaagctggaggcatcacactacctgacttcaaactatactacaaggctacaataaccaaaacagcgtggtactggtaccaaaacagagatatagatcaatggaacagaacagagccctcagaaataacaccgcatatctacaactatctgatctttgacaaacctgagaaaaacaagcaatggggaaaggattccctatttaataaatggtgctgggaaaactggctagccgtatgtagaaagctgaaactggatcccttccttacaccttatacaaaaatcaattcaagatggattaaagacttaaatgttagacctaaaaccataaaaaccctagaagaaaacctaggcattaccattcaggacataggcatgggcaaggacttcatgtctaaaacaccaaaagcaatggcaacaaaagccaaaattgacaaatgggatctaattaaactaaagagcttctgcacagcaaaagaaactaccatcagagtgaacaggcaacctacaaaatgggagaaaattttcgcaacctactcatctgacaaagcactaatatccagaatctacaatgaactcaaacaaatttacaagaaaaaaacaaacaaccccatcaaaaagagggcgaaggacatgaacagacacttctcaaaagaagacatttatgcagccagaaaacacatgaaaaaatgctcaccgtcactggccatcagagaaatgcaaatcaaaaccacaatgagataccatctcacaccagttagaatggcaatcattaaaaagtcaggaaacaacag

SEQ ID NO: 119197 - DNA, 528 bp, Homo sapiens
atgaacatcgatgcaaaaatcctcaataaaatactggcaaaccgaatccagcagcacatcgaaaagcttatccaccaagatcaagatggcttcatccctgggatgcaagagaataaaatacctaggaatccaacttacaagggatgtgaaggacctcttcaaggagaactacaaaccactgctcaaggaaataaaagaggatacaaacaaatggaagaacattccatgctcatgggtaggaagaatcaatatcgtgaaaatggccatactgcccaaggagtgaagctgcagacattcgtggtgagtgttacagctcataaagacagtgtggacccaaagagtgagcagcagcaagatttattgcaaaaagtgaaagaaaaatgcttccacagtgtggaaggggacatgagtgggttgcagctgctggctctggcagcctgcctttattccctcatctggcctcacgcacatcctgctgattggtccattttacagagagctgattggtccattttgacagggtgctga

SEQ ID NO: 119198 - DNA, 1371 bp, Homo sapiens
atggtgagcattttttcatgtgttttttcagcaccacaccacaccaattccaaaattgaccacatacttggaagtaaagctgtcctcagcaaatgtaaaagaacagaaattataacaaactatctctcagaccacagtgcaatcaaactacaactcaggattaagaatctcactcaaaaccattcaactacatggaaactgaacaacctgctcctgaatgactactgggtacataacgaaatgaaggcagaaataaagatgttctttgaaaccaaggagaacaaagacacaacataccagaatctctgggacgcattcaaagcagtgtgtagagggaaatttatagcactaaatgcccacaagagaaagcaggaaagatccaaaattgacaccctaacatcacaattaaaagaactagagaagcaagagcaaacacattcaaaagctagcagaaggcaagaaataattaaaatcagagcagaactgaaggaaatagagacacaaaaaacccttcaaaaaattaatgaatccaggagctggttttttgaaaggatcaacaaaattgataaaccactagcaagagtaataaagaaaaaaagagagaagaatcaaatagacacaataaaaaatgataaaggggatatcaccaccattcccacagaaatacaaactaccatcagagaatactacaaacacctctacgcaaataaactacaaaatctagaagaaatggataaattccccgacacatacactctcccaagactaaaccaaccaataacaggatctgaaattgtggcaataatcaatagcttaccaaccaaaaagagtccaggaccagatggattcacagccgaattccaccagaggtacaaggaggaactgagaataaaatacctaggaatccaacttacaagggatgtgaaggacctcttcaaggagaactacaaaccactgctcaaggaaataaaagaggagacaaacaaatggaagaacattccatgctcatgggtaggaagaatcaatatcgtgaaaatggccatactgcccaaggtaatttacagattcaatgccatccccatcaagctaccaatgactttcttcacagaattggaaaaaactactttaaagttcatatggaaccaaaaaagagcccgcatcgccaagtcaatcctaagccaaaagaacaaagctggaggcatcacgctacctgatttcaaattatactacaaggctacagtaaccaaaacagcatggtactggtaccaaaacagagatatagatcaatggaacagaacagagccctcagaaataacgccacatatctacaactatctgatctttgacaaacctgagaaaaacaagcaatag

SEQ ID NO: 119199 - DNA, 1071 bp, Homo sapiens
atgagtgaactcccattcacaattgcttccaagagaataaaatacctaggaatccaacttacaagggatgtgaaggacctcttcaaggagaactacaaaccactgctcaaggaaataaaagaggatacaaacaaatggaagaacattccatgctcatgggtaggaagaatcaatatcgtgaaaatggccatactgcccaaggtaatttacagattcaatgccatccccataaagctaccaatgactttcttcacagaattggaaaaaactactttaaagttcatatggaaccaaaaaagagcctgcatcgccaaggcaatcctaagccaaaagaacaaagctggaggcatcacactacctgacttcaaactgtactacaaggctacagtaacgaaaacagcatgtttgttaaacagaagggctctccccctggcaaaccggggaagaaaaaaccctgtttttggggggcccccaaaaacggtgccgatatccccagccaaagttggcggccatccggaaacccgggaacaaccccccctctcccgaaaccccccagttttttccctggggcccccagaatggggcaatcccaagcttggggccacaaaggcttttggttcaaaaagggcaagccaaccgaaccccccggaaaaaaggcccgggttaaaaagccccccgggggccaatcccccaaggccattggacccacccgtggcccgggaaaaccaccaaaacccgatatgcgggcccccaagccccccacagattccggtcaccaaacccagaagccctcatgaccggcagacagcgctttcacaccgcacatcaacgtttcacggtccgaccccagaaccaccgctcgctcatccagcgccgaccgtgtcaacgccagcgagtacccaacatccagcgaggagacatcaggtcgctcgtccagataggtcatcaacgccgttgcctgcgcggatagcgcttcgggtgttttgcccgacaccatccacggcaccaccggaacatccacgacagaacccgaacccggccccgcagactgactcggcactcccgggggct

SEQ ID NO: 119200 - DNA, 1208 bp, Homo sapiens
atggataaattcctcaacacatacactctcccaagactaaaccaggaagaagttgaaactctgaagagaccaataacaggagctgaaattgaggcaataatcaataacttaccaaccaaaaacagtccaggaccagatggattcacagccgaattctaccagaggtacaaggaggaaatggtaccattccttctgaaattattccaatcaatagaaaaagagggaatcctccctatctcattttatgaggccagcatcattctgataccaaagcctggcagagacacaaccaaaaaagagaattttagaccaatatccttgacgaacatagatgtaccggaagtcctagctggagcaatcagaccagagaaagaaataaagggcattcacatcgataaagaggaagtcaaactgtccctgtttgctgacaatacgattgtttaccttgaaaaccctaaggactcctccagaaagttcctaaaactgatcaaagaattcagcaaagtttctggatacaagattaatagagcgacctggcagctctgcagcactagtaaagggaaccccactacagcaagtggactggcatgggaaacctatttgaccctgtgggctgaggactcttttccccaacttgggaaaaccaggaagccccgactttggaagctctttctgtctcctcagcaaatcctggttcaaacagaaactgcgacctaccagggctgtcagctgaagacgttgcaagcttaccttgtacatgctttgagtctcaccaagctcctgtgcattagaataaaatacctaggaatccaacttacaagggatgtgaaggagctcttcaaggagaactacaaaccactgctcaatgaaataaaagaggatacaaacaaatggaagaacattccatgctcatgggtaggaagaatcaatatcgtgaaaatggccatactgcccaaggagtgaagctgcagacattcgtggtgagtgttacagctcataaagacagtgtggacccaaagagtgagcagcagcaagatttattgcaaaaagtgaaagaaaaatgcttccacagtgtggaaggggacatgagtgggttgcagctgctggctctggcagcctgcctttattccctcatctggcctcacgcacatcctgctgattggtccattttacagagagctgattggtccattttgacagggtgctga

SEQ ID NO: 119201 - DNA, 504 bp, Homo sapiens
ttttttttttttacatgaaaatcgttttatttatttaacaaacacaaacaattgaacaaacaaacaatggaagcaagtccttttgcctaaaggaacacagagggtcatgcggatgttgctcctccaaggatttcggtgttccccaacggctagttttgggtctagttcttctggaagatcttattcttggggagctacaggttctggcgtttggggctctttcaggttctatctccattttcccctcaattcctccccattctgctataataaaaaaaaattctcacctccggaagatcccgcctgtgcctccccgccagcctttcaggaggtctggacgtctggtccaccgctccccggcttctttccccgcttttgcttttcccctcccctgctcccgccctccggcctcaggacccgaccaccgcccagctgagcccccgcggctccacagagcagaaggtgcactggaggccctgcccgttgccgccccgcggggtgcca

SEQ ID NO: 119202 - DNA, 878 bp, Homo sapiens
atgacaagtcatgaagtaaaaggaccaggtgataaaatgaggtctccaaaatccaaagcatcaaagttctcagttagtggatttaaaaatgaagaagagtttgctccaatgtatgtttcaatatctcattgttttacaataatatttgaaataatacctaggaacccaacttacaagggatgtgaaggacctattcaaggagaactacaaaccactgctcaaggaaataaaagaggacacaaacaaatggaagaacattccatgctcatggataggaagaatcaatatcgtgaaaatggccatactgcccaaggacccgaccaccgcccagctgagcccccgcggctccacggcgcagaaggggcactggaggccctgcccgttgccgccccgcggggtgccaagaagtccacggggacccacgagccaccctcaccacgatccctgccctggtggagcccccgtgcggaacacaggatccgaaagatggcagcggaagctccgcagcggccccaaaagcgactgggcagggagggcacaggctccctcactgggtgaaggcggcgcaaagaacgggaagagccatcccgggagccaccgggcgttcagcctccctagggcccccaggcggctcgggccggggtctcaaccggggcgtttccgggggtttctgaagcaggcgaggggcagggcgggcgaaggccattcggctatccttctggctccagaatctcccaacgcgcaggtgtccaacgtgaccagcgcgacttaccgctccaatctctccggtcttccaaggccttgctcagtcgtcctgctgggagggccctgaggatgcaagggacggaggaagtttcgtgcgtgcgcccttcctatag

SEQ ID NO: 119203 - DNA, 2234 bp, Homo sapiens
atgaaggcagaaataaagacgttctttgaaaccaacgagaacaaagacacaacataccagaatctctgggacgcattcaaagcagtgtgtagagggaaatttacagcactaaatgcccacaagagaaagcaggaaagatccaaaattgacaccctaacatcacaattaaaagaactagaaaagcaagagcaaacacattcaaaagctagcagaaggcaagaaataactaaaatcagagcagaactgaaggaaatagagacacaaaaagcccttcaaaaaattaatgaatccaggagctggtgttttgaaaagatccacaaaatagatagaccgctagcaagactaataaagaaaaaaagagagaagaatcaaatagacgcaataaaaaatgataaaggggatatcaccaccgatcccacagaaatacaaactaccatcagagaatactacaaacacctctacgcaaataaactagaaaatctagaagaaatggataaattcctcgacacatacactctcccaagactaaaccaggaagaagttgaatctctgaatagaccaataacaggatctgaaattgtggcaataatcaatagcttaccaaccaaaaacagtccaggaccagatggattcacagccgaattctaccagaggtacaaggaggagctgagaataaaatacctaggaatccaacttacaagggatgtgaaggaccttcttcaaggagaactacaaaccactgctcaacgaaataaaaagaggacacaaacaaatggaagaacattccatgctcatgggtaggaagaatcaatatcgtgaaaatggccatacttgcccaaggtaatttgtagatttataaattcaatgctatttccattaaactaccatttactttcttcataggattgggaaaaatcttacttttaagttcatatgggaaccaaaaaaggagcctgcattgccaagtcaatcctaagccaaaagaacaaagctgggaggcatcacactacctgactttcaaactattacttacaaggctacagtaaccaaaacagcatcggtactggtaccaaaacagagatatagatcaatggaacagaacagagccttcagaaataacaccgcatatctacactattctgatcctttggacaaacctgagaaaaacaagcatgggggaaaggcatccctaatttataaaatggctgctggggaaaactggctagcccatatgtaggaagctgaaactggatcccttccttacaccttatacaacaattaattcaagatggattaaagacttaaatcttagatgccaaatcataaaaaccctagaagaaaacctagacaataccattcaggacacagacatcggcaaggacttcatgactaaaacaccaaaagcaatggcaacaaaagccaaaatagacaaatgggatctaattaaactaaagagcttctgcacagcaaaagaaactaccatcagagtgaacaggcagcctatagaacgggagaaaatttttgcaatctacccatctgacaaagggctaatatccaaaatctacaaagaacttaaacaaatttacaagaaaaaaaacaaacaaccccatcaaaaagtgggcgaaggatatgaacagatacttctcaaaagaagacatttatgtagccaacagacacatgagagcatggctcatcatcactggccatgcagggagatgcaaatcaataccactatgagatatcatctcacaccagttagaatggcaatcattaaaaagtcaggaaacaacaggtgctggagaggatgtggagaaataggaacacttttacactgttggtgggactgtaaactagttcaaccattgtggaagtcagtgtggcgattcctcagggatctagaactagaaataccatttgacccagccatcccattactgggtatatacccaaatgactataaatcatgctgctataaagacacatgcacacgtatgtttattgcggcattattcacaatagcaaagacttggaaccaacccaaatgtccaacaatgatagactggattaagaaaatgtggcacatatacaccatggaatactatgcagccataaaaattgatgagttcatgtcctttgtagggacatggatgaaattggaaatcatcattctcagtaaactatcgcaagaacaaaaaaccaaacaccgcatattctcactcataggtgggaattga

SEQ ID NO: 119204 - DNA, 4604 bp, Homo sapiens
ggaacagcttgtccacccgccggccggaccagaagcctttgggtctgaagtgtctgtgagacctcacagaagagcacccctgggctccacttacctgccccctgctccttcagggatggaggcaatggcggccagcacttccctgcctgaccctggagactttgaccggaacgtgccccggatctgtggggtgtgtggagaccgagccactggctttcacttcaatgctatgacctgtgaaggctgcaaaggcttcttcaggcgaagcatgaagcggaaggcactattcacctgccccttcaacggggactgccgcatcaccaaggacaaccgacgccactgccaggcctgccggctcaaacgctgtgtggacatcggcatgatgaaggagttcattctgacagatgaggaagtgcagaggaagcgggagatgatcctgaagcggaaggaggaggaggccttgaaggacagtctgcggcccaagctgtctgaggagcagcagcgcatcattgccatactgctggacgcccaccataagacctacgaccccacctactccgacttctgccagttccggcctccagttcgtgtgaatgatggtggagggagccatccttccaggcccaactccagacacactcccagcttctctggggactcctcctcctcctgctcagatcactgtatcacctcttcagacatgatggactcgtccagcttctccaatctggatctgagtgaagaagattcagatgacccttctgtgaccctagagctgtcccagctctccatgctgccccacctggctgacctggtcagttacagcatccaaaaggtcattggctttgctaagatgataccaggattcagagacctcacctctgaggaccagatcgtactgctgaagtcaagtgccattgaggtcatcatgttgcgctccaatgagtccttcaccatggacgacatgtcctggacctgtggcaaccaagactacaagtaccgcgtcagtgacgtgaccaaagccggacacagcctggagctgattgagcccctcatcaagttccaggtgggactgaagaagctgaacttgcatgaggaggagcatgtcctgctcatggccatctgcatcgtctccccagatcgtcctggggtgcaggacgccgcgctgattgaggccatccaggaccgcctgtccaacacactgcagacgtacatccgctgccgccacccgcccccgggcagccacctgctctatgccaagatgatccagaagctagccgacctgcgcagcctcaatgaggagcactccaagcagtaccgctgcctctccttccagcctgagtgcagcatgaagctaacgccccttgtgctcgaagtgtttggcaatgagatctcctgactaggacagcctgtgcggtgcctgggtggggctgctcctccagggccacgtgccaggcccggggctggcggctactcagcagccctcctcacccgtctggggttcagcccctcctctgccacctcccctatccacccagcccattctctctcctgtccaacctaacccctttcctgcgggcttttccccggtcccttgagacctcagccatgaggagttgctgtttgtttgacaaagaaacccaagtgggggcagagggcagaggctggaggcaggccttgcccagagatgcctccaccgctgcctaagtggctgctgactgatgttgagggaacagacaggagaaatgcatccattcctcagggacagagacacctgcacctccccccactgcaggccccgcttgtccagcgcctagtggggtctccctctcctgccttactcacgataaataatcggcccacagctcccaccccacccccttcagtgcccaccaacatcccattgccctggttatattctcacgggcagtagctgtggtgaggtgggttttcttcccatcactggagcaccaggcacgaacccacctgctgagagacccaaggaggaaaaacagacaaaaacagcctcacagaagaatatgacagctgtccctgtcaccaagctcacagttcctcgccctgggtctaaggggttggttgaggtggaagccctccttccacggatccatgtagcaggactgaattgtccccagtttgcagaaaagcacctgccgacctcgtcctccccctgccagtgccttacctcctgcccaggagagccagccctccctgtcctcctcggatcaccgagagtagccgagagcctgctcccccaccccctccccaggggagagggtctggagaagcagtgagccgcatcttctccatctggcagggtgggatggaggagaagaattttcagaccccagcggctgagtcatgatctccctgccgcctcaatgtggttgcaaggccgctgttcaccacagggctaagagctaggctgccgcaccccagagtgtgggaagggagagcggggcagtctcgggtggctagtcagagagagtgtttgggggttccgtgatgtagggtaaggtgccttcttattctcactccaccacccaaaagtcaaaaggtgcctgtgaggcaggggcggagtgatacaacttcaagtgcatgctctctgcaggtcgagcccagcccagctggtgggaagcgtctgtccgtttactccaaggtgggtctttgtgagagtgagctgtaggtgtgcgggaccggtacagaaaggcgttcttcgaggtggatcacagaggcttcttcagatcaatgcttgagtttggaatcggccgcattccctgagtcaccaggaatgttaaagtcagtgggaacgtgactgccccaactcctggaagctgtgtccttgcacctgcatccgtagttccctgaaaacccagagaggaatcagacttcacactgcaagagccttggtgtccacctggccccatgtctctcagaattcttcaggtggaaaaacatctgaaagccacgttccttactgcagaatagcatatatatcgcttaatcttaaatttattagatatgagttgttttcagactcagactccatttgtattatagtctaatatacagggtagcaggtaccactgatttggagatatttatggggggagaacttacattgtgaaacttctgtacattaattattattgctgttgttattttacaagggtctagggagagacccttgtttgattttagctgcagaactgtattggtccagcttgctcttcagtgggagaaaaacacttgtaagttgctaaacgagtcaatcccctcattcaggaaaactgacagaggagggcgtgactcacccaagccatatataactagctagaagtgggccaggacaggccgggcgcggtggctcacgcctgtaatcccagcagtttgggaggtcgaggtaggtggatcacctgaggtcgggagttcgagaccaacctgaccaacatggagaaaccctgtctctattaaaaatacaaaaaaaaaaaaaaaaaaaaatagccgggcatggtggcgcaagcctgtaatcccagctactcaggaggctgaggcagaagaattgaacccaggaggtggaggttgcagtgagctgagatcgtgccgttactctccaacctggacaacaagagcgaaactccgtcttagaagtggaccaggacaggaccagattttggagtcatggtccggtgtccttttcactacaccatgtttgagctcagacccccactctcattccccaggtggctgacccagtccctgggggaagccctggatttcagaaagagccaagtctggatctgggaccctttccttccttccctggcttgtaactccaccaagcccatcagaaggagaaggaaggagactcacctctgcctcaatgtgaatcagaccctaccccaccacgatgtgccctggctgctgggctctccacctcaggccttggataatgctgttgcctcatctataacatgcatttgtctttgtaatgtcaccaccttcccagctctccctctggccctgcttcttcggggaactcctgaaatatcagttactcagccctgggccccaccacctaggccactcctccaaaggaagtctaggagctgggaggaaaagaaaagaggggaaaatgagtttttatggggctgaacggggagaaaaggtcatcatcgattctactttagaatgagagtgtgaaatagacatttgtaaatgtaaaacttttaaggtatatcattataactgaaggagaaggtgccccaaaatgcaagattttccacaagattcccagagacaggaaaatcctctggctggctaactggaagcatgtaggagaatccaagcgaggtcaacagagaaggcaggaatgtgtggcagatttagtgaaagctagagatatggcagcgaaaggatgtaaacagtgcctgctgaatgatttccaaagagaaaaaaagtttgccagaagtttgtcaagtcaaccaatgtagaaagctttgcttatggtaataaaaatggctcatacttatatagcacttactttgtttgcaagtactgctgtaaataaatgctttatgcaaacc

SEQ ID NO: 119205 - DNA, 604 bp, Homo sapiens
tgtaaccttttctcgctctctgtgtgactgagatatggaaaggcttctgtggggcatttttgcccttgcattgttgccttttgggtcaacaaccttgacacttaaacaaacagcagactgggaatcctctttgtaccagtgtgttgctgggtgctgctgataaaagggactagagagtaaaggccttctggtcagcaggtcacttagtcaacagctcttgtgtgtatgtgggggtgtgggttctgccttgctgtcagcactagggtgtgttccctcttaagcctggaattaggagttccagattcctagtacttaactaaaatttggccaggcgcggtggctcacacctgtaatcccagcactttgggaggccgaggcgggtggatcacctgaggtcaggagttcgagaccagcctggccaacatggtgaaaccccatctctactaaaaatacaaaaattagccaggtacggtggcgggtgcctgtaatcccagctactcgggaggctgaggcaggagaatcacttgaaccttgggggcggaggttgaagtgagccaagatggtgccactgcactccagcctgggcgacagagcaagctcgtgc

SEQ ID NO: 119206 - DNA, 1134 bp, Homo sapiens
atggggtttcgccatgttggtcaggctggtctcgaactcctgacctcaggtgatccacccacctcgggctcccaaactgctggaattacaggaaccaccaaggtggatccacgacttaaaccaggacactccctctgctctgtgtcagcatgtcctttagtgctgcagatgggaggtcccccaggtgccataggaaacaccagaaactgcacagcagtccagctggtggtggatcccagccatccccagggaaattcaaccccaagaggagaagactcaccctggatgagaaccactatgagcaggaccaagaaggaagagggcaagaacactaggagaggaagaaggaaatcaccagagtgcctagagggcacccaggtagctttgggaagtgcagcttccaagagacagaggagtaccttggtaggaaggggcaggatgcctccgaatcagtggctggggaaggaccagggaagctctgggcttgttgaaacccacccaagaaatacaaatgttacagatatagctgaagcctattataaactccccccgaacccaagatgccactgtcctgaaattgatggctactttggtgaagcacgcttttatgctattactgcttggggtcccggcgcccctccgagcggcggtagggcggcagggccgggaaggagggaaaggagactggaggccgtgacaccagtcttggttcctccgccccctgcttccccgccaccgccgctctccaaattggcgcggaaccggcttctccacagcatttcgcctccacaaccccctctccccgctggtccaggagggaggcgggacgtggtgggcgctgcccaagccccactcccggtgtacgggggagagggtggaggacccagaaaaacccgtttgaggaagatgtgcctccctgcgcgttcaaggtgtcaggagtgcttggtaaatttttggacactcgcgttccagctgtacattcagttgaggaaatgcaggcttgtatccaaaatgaattaccatgagctagctaacatagcacagaagatggcagggtcacagggcccaggccccttcggagggactgagctttcacctgcgaatcagcgtcttactggcacttggagaatgtga

SEQ ID NO: 119207 - DNA, 430 bp, Homo sapiens
  misc_feature (1)...(430): n = a,t,c or g
ggtctcgctcttgttgcccaggctggagtgcagtggcatgatctcagctcactggcaaccttgcgncctcccaggctcaagcgattctcctgccccaagcctccctgagtagctgggaccacaggtgcacaccaccacacccagcccaatttttgtatttttagtagagatggggtttcaccatgttggtccaggctggtcttgaactcctgacctcaggtgatccacccaccttggcctcccaaagtgctggaattacaggcgtgacacccggcgcccggccaacatctatctttttaaaccaacagaattgccttgcttaatttaaggaaacagaagttctggaattgagaataatctgacttaatttataatttgtgaaattcaattgaaaaattccaagaataaaaagtacatcttcttttttcta

SEQ ID NO: 119208 - DNA, 3287 bp, Homo sapiens
  misc_feature (1)...(3287): n = a,t,c or g
gggcaaactgggcagtacctaccngtaanagtcatgtcttcatgnttgcagcattggcacttccatggatgtgtcaagaccggaaaagccacacttgacctgtcagctggtccttgaacagctgtaggtttttttttttttggagacagagtctccctctgtggtccaggctggagtgcagtagcgcaacctcgactcactgcaacctctgcctccaggttcaagtgattctcctcctcagactcctgagtagctgggattacaggcacatgccaccatgcccggctgatttttatatttttagtagagatggggtttcaccatgttggccaggctggtcttgaactcctgacctcaagtgatccacccacctcggcctcccaaagtgctgggattacaggcgtgagccaccacacccggcctgtaggttttaactaataattagggtattactctatcattctctatcattcaaattctccaggtactgacctggtttttattttatttatttatttatttacttatttatttttgagacagagtcttaggctctgtctcccaggctagagtacagtagtggcacaatcttggctcactgcagtctccacctcctggggttctattgattcctgtgcctcagcctccccaagtagctgggattacaggcacgtgccaccacgcctggctaatttttttgtatttttagtagagacggggttgcttttctattcccaagtccaaaagcctatgaagagggccagcgcaatggctcatacctgtaatcctagcactttgggtggccaagacaggaggactgcttgaggcctcacgtcaagttcaacatcagcgtggccaacaaagtgagaccctgtctctacataaaagtaaaatcaaaagtctctggagagaattgtgttggtccagctcgggttagttgtccattcaaccggtgatacaggcagagttggggagtcatggcttctgaagcccacagtatcgactgggagcaggtctcagagaagcaagaatcactgtgagcaaggagttgcttcaaattaatagccttacaaatctattagaatacatcgatggcagagagcttctagggtagaagtttgtacatgcaggccaaggggaactagagaggctgacaagacatatctctggggagagtaccgtagctttcaccagtgttaaaggggaccccaaaccttgcattaacaacctttaagccagcacatgtgcgtgcatgcgtgcacacacacacgtaactcgttttttataatacacaaccatcctattaacatgagctaaacaatctaaaccatttagttgttgggtagtacagagttatagaggactgtctgatataacaaaatgtggttaaagaagaactgagaaatctaacctttcataataaacagccatgaatccagctctaagtacattatattttataagacctgatgatttaaacagattaaattataaaaaacaacaattgccaaactcagagaaaacttaaagaaaaatttattcttagaatttgggaatgtttgttccatatagattgtttaattaaaatgtatttgtttcttgattctgttacagattgtttaattaaaatttgtttcttgattctgttatatacatggagaaaccatgtgaaaagggatgctaggatctgagtaaaagacaagggtttatagtaaaaactaatcttttatataacttttgggaccaccttgaaccctactgaaatgttatagttcttcaacaattctaaatttcataaagaatgtcaggccaggtgcagtggctcacgcctgtaatcccagcactttgggaggccgaggtgggtagatcacctgaggtcaggagctcgagatcagcctgaccaacatggtgaaaccctgtctctactaaaaatacaaaaaattagctgggcgtggtggcgcacacctgtaatcccagctactcaggaggctgaggcaggagaatcacctgaacctgggaggcagaggttgcagtgagctgagattgcaccattgcactccaggttgggcaacaagaacgaaactccatctcaaaaaaataaaacaaaataaatgccagtttttctgtgtgtattatatttaatatgcattgcattttgaaatatttttttaattgtacaggtaacacatgctgattggtaaaatatcttgcaatctgcaagacacataggcataatctttcacatcataatctcctctccaaaggagctactttaaaagtttagttacatctttttcttctaaaacttttttagaaaaagtaaatggctttactaaaaagccatttttagtaaagatctatcatatgatttataaacaattttaaaaattcatccattacattttcaggctttagcataattttcaattcctcaaaaacatgtcagtgtgattttattttatctatgtctcatttacttttctgtaagtagatataacttttcaaaaagacagtcaattccccaacttttatgtcgttcttcaaaagcatcaaccttctcaagacaacgtatattgcatattttaccaaacaacctttcaatttcagcatgtggaacataaaatggtggacctggatgtttagttggatcataagaaagaacacacaggagatactgaaacttctttcccaggagggaaaacattgtatctgcatagcatttgcgatcacctggattaatggcaactaatgctcctctatcccaaatcatgtcaaatttgccaatatttgtcctgggaagatcaaaaatactgcaacagtacaatgaaatgttccccgaagaactcttaaatactttggttccaggaatttcggtgattggttcttctgagtaagaaagattctgctctgtaaaaaattcttgtatcccaagttcactgatttccacaccaactacactgtgtccccggtctgcaaaccatttcatctcaaccgcttttccgcaaagaggaaaaaataccctcagtccactcttgcctttaaggaaagtatctaaatgcttctttaatagctgatgtccttgttcctgatgaaaagcagtcttgccgttcacccacttgtcttgccattcttccagagttagtacttggtttttctgtacctcagtatccgagtactcttcaatgtcaagtgaagttcttgtaccatccatagtttcagagacacctttgtctcacaagcatatgtcttccgtgcctcgcttacagctggttgccggccattgcctc

SEQ ID NO: 119209 - DNA, 617 bp, Homo sapiens
attttcaaaaacataatgattaatgttccaattatgcatcacttccccccagtataaatcaggaaatgtttgtgagaaacccattgggaactatactctttttatttttattttttaattttttttattatttttttttttggggacggaagtgtcccctccttgttgcccccaggctggaagtgcaaatggccgtgatcttggctcactgcaagccttcgcctcccgggttcaaagtgattctccctgcctcagccctccccgagtagctgggattacaggcatgctcccacccatgcccagcctaattttgtatttttagtagaaacggggtttcaccatattggtcaggctggtctcgaactccagacctcaggtgatccgcccacctcggcctcccaaactgctgggattacaggcgtgagccaccgcgcctggccagggactatactctttttaaaatagacatttgtggggctcacacaatatatgaaatagtaccctctaaaaaagagaaaaaaaaaatcaggcggtcaaacttagagcaacattgtcttattaaagcatagttatttcactagaaaaatttaatatcaaggactattacatacttcatt

SEQ ID NO: 119210 - DNA, 4651 bp, Homo sapiens
tttttttttttttctgaaaagatacaaagttttattaaataaacctggaatcaacagtattattacataaattagacagcagtaaaattttcctagggcatatgtacaaatcacagtgatttccattgtgcaacaaacagacaggattaaaaataggcactcccctccccgaccccccatgagaaggggtcaccccgcggggttcccagttctggctcgccaaggggtgcacaaacctgccaaggcactctgcctgtgtgcgcggcatccagcggcagtgacaggggccccagaagcacgttggcaacatggtgaggctgcccagtgttcagcgcaaagaaagaattcagctacgacagttgagcagagctcaacagccatctcagagcacaaggactgtggaaaggcttcaagtctcatctgctaaaacacaattgtaatgccttttacatacagaacagacgtgtccaccatggaagatcaaactaagcctcaacagaacttcccaacacacgataatttacagaaaaaccatgacagagcatccctgctattaggaagggactgttctgcggggtgcaaggccataaggtttgcaaagcaaacttgattatgaaaaggcttggtgaaaatacagcccctcaccttcaccaagacacacacacacacacacacacacacacacacacacacaccccgcaaagaaactatccaaatgcattaagacacctgttcgtgtgcttttcttcttgcttttcttaagtgaatcccatccgtttaacttagactaattagaaggcctgcttgcctccatcagcaacagaaaaacagtgcatacgactcctccaatgtgtgtaaaatgcatgctaggtagcttgaaggaaaaacgagagcaacccgggcaccccatttcaaatctctacaactggagaaatcaaaggctgcaaggactgtgtagacctgatgcaaagttaactggctgcaaaaatacaacccaagccagtgctgtcttgcaccctgttcactcagtagctggagcaatgaatgattgtgacattctggtggggtatttgtgcagcctgaggtgcacctggctacagagtggagccttggggtctttaacagtattaagccatagttcacagttacaatggtccaaagaattacaggccatgtaggtcaaacacagaaatggcgaacacatcccaaaccactcaactgtttagttccactggtgattttttttaatggacagtgatttcaaatgatttggtgtttttgttcttgtttttgctttttcttcaaagcaaacaaatgatttggtctttaagtatggacagaaagaaacaaaacgctgaatgggaaattcagtaacaagtgattgtgcagttgtttgatgggcatggagagggagtggggctgagctgcattttgaggggatgaagcgcgcaatcttaccccactgctggggggtttctgcttcttattctatcatgctgacagcaaatataatttgcccatcgctggctatagatatgtttaggctaagcaggatttagacttctgttgcgaaggaattagaagaattcagtagagacagtgtatactatttggttgtgactttatttccttcctggctttatcaatgcctatgaaagcaggccggtggcatttcccttcagaaaaacaagacttgccccaatacacttcttcttgtaacatatccatgtcctattctcttagagtattccaatttaagaaaatattgccaactcgtaaaattacatgaagcaaagtaaatttgtaatgtttttctgatacaaatgttgtgattatggtaatgaattttcctccacattttgcgcagtgattgtttgtcatgatcatccatacggacattccgcaccgtgattgtttcgtgatcatccatgcggacatttcgcaccgtgattgtttcgtgatcgtccatgcggacattttggaatgcccacccgggtcagctatttgtattttttttatttttatgttttgagacggagtcttgctctgtggcccaggctggagtgcagtggcacgatctcggctcactgcagcctctgcctcccgggttcaagcgattctcctgcctcagcctcccgagtagccaggattacaggtgcccgccaccacacctaatttttgtattttagtagagacgggggttttgccatgttggccaggctggtctcgaactcctgacctcaggtgatccacctgcctcggcctcccaaagtgctgggattacaggcgtgagccaccatgcctggccaggtaaactattttaaaattatacagtgattgctccatgtttatagctcattttgattaaattaacctctacatgacattgggccatttaaactatgaccccgccatgggcagttaccaggtagcttgtgtcacttcaaatgctgaaatgtgtgtgatggtccaaagtgggtttcacaccatcacacgttctaggaatcgcttctaatttctcatttgttctgtatggctggaggctgatcacgacgtctgtaaagaacaaggtcaccaatgtgcttgcatatttcattttcctgcatatcagttcacaattaaggcatttcaggctttcctgatgctaattctcatctgagtatgaaatcctggataataaaacagacaacctaaaaataggcatatggactcatggatttatgtactttttaaagtgtgctcaagtgtttcatttatggttttattaataatttttaaagtagaatgttcaatattattactatgatttatttttatagtcagcaaacatgagacttaaaagcttttccttctagctccacatgtcggtgcacagtgtaaccttttcttaaaaaaatatggaatgctgcatgaatctgcagatcttcctcgcgcagggggccatgctaatctcctctgtgtcattccaattttagtatacctgctgccgaagtcagcaccagtttcaccttttcacattcacggtaaaactgatgggaaaccgcacgctaaatgtttaggcagcgatggccctcaactgttaatcccaacaggatggtgagtgagaagcacaggctgaaaatagagttgtctaaaacatttccacatttcaccatctgaacatcattttccactgagttattaattgtaaagagtttattctgctgaacctactaattattctcacctactgagttgacctccacgtgaagaaaaggtcactgatgaaaaagggtggctatgttctgtttctgtaatttcactgttttaacatctttttttttatatagagatggggtctcgctatgctgcccaggtcagtctcgaactcctaggctcaatcttcctgcctcagcttcccaaagtcccagggttacaggagtgcaccaccgcacccagcttcactgtcttttaaagccttaaggtggacgttctcttcaatccatcttcaaaagcacaaagccattgccttcttttttttttttttttttttggacagggtctcactcttgttgcccaggctgcagtgcagtggtgcgatctttgtggctcactgcaaacctgcaacctccgcctcctgagttcaccccaggtctcctgcctcagccttcccgagtagctgggattataggcatgtgcaccaccacgccctggctaatttctttgtgtattttttttagtagagacaggggtttcaccatgttgggtcaggctggtcttgaactcctgacctcaggtgatccaccctcctcggcctcccaaagtgctgggattacaggcgtgagcaacccggcgcctggcccagtgtaatatttttgaaagaggagggacaattgtgaaatcagtaggttatctttaatctttacactacatgcagatccatagtatcctttgtagtgttgtaaatacttttgctttgaaaactttttcattgtcctaaatcaccctgactctgaccagtctttcagttctccaaaagcccaatttaattgtatagttttgtcatggcttcatataataaagagcctattttaagttgaaagtagtagtcagaaaattgttaatttcctaaagctcaggaaactagggtgtcactttttttgcactgcagcatatacactaactagcttattaaaatttacaaaatgtctttttgaatgtatcaaggatatatttagtttgagtggaatttgtcagcagatatcagtaacttattgccgcttatattgtacaatgttaaacttcaattcctgtaacctggttagtattaatgtcagtgactaaaaaacttagagttagttttagggcactttttattttgagagcatgaagtgtggaatgtgtcactacgattgttgataaagctgaggccacttgcaacttgattttttaaatgaaatagataaagtctttttgaataatatagtatgcactgctatttgcttgattatgtaatgtcaaaagtttaactatattccaagtacaaaaacatactggattacattgaggatgttgaatagcattcatgatggctttgttttggtttggggcagctgtcaccagctaaagcaatgttgttaaaattagctcaataaaaatgtctttaaaatgt

SEQ ID NO: 119211 - DNA, 252 bp, Homo sapiens
ctagctagcatcatcattattgtcagcatcaccatcatcatcatcatcatcaccatcaccatcatcatctcccagccccttgtaggaatctacgtgtttgacccgtttgttttcgctataaactttgttttcactatggaaaacaacatctgctgtttcttgactttttattaagtcattctgaatggtgtgagatggtatctcattgtggttttgatttgcatttctctgatgattagtgatgttgagcat

SEQ ID NO: 119212 - DNA, 387 bp, Homo sapiens
tcacagatacaaagccattgtcgtgcagctcatgccctcctcgggggaagaagccagtaagtcacagagatcagtaacgcaggtggggacgaaggtgtagaggagagccaggcacggaggcctgttggagtgcgggtgctttgcaattttagaagccgaggtccaggggaggccggacttcaaagatgacgtctgggccaagtgcagagaaaggtggcggatgagctggaaggaagcctgggagaaggcactttgggcgtagggttttgagacacagctgtgttttgcccgtggcacgggagctctggggccggcatggcccgtgtggctggaggcagaagaatgtcccctggaagtggtctgagctgcttcctgtggtggccccat

SEQ ID NO: 119213 - DNA, 349 bp, Homo sapiens
atgccccctcccccgccgccctccgagagcccagggcccggccctgttggctcccggctccccccggggccagcagtgactggaaacgagaaggaactgaggggaaatccctgagtcggcctggccccgccgcgtccgcggttccgcgcgtcacgccgggaaggagttaccgggaaagtacaccggcccaaccggctgcagctccgtgctccaccaaaaggctgatctgaccaaagaggccaaaacgtgcctcctagcgaggcgaagtcgctatgctgatgggataccagaaggacctcctcgatccaggaaggtgtttccgctctaccgggagatggccctcgtctag

SEQ ID NO: 119214 - DNA, 3285 bp, Homo sapiens
cggacgcgtgggttggattttttccgtggatctatcaattcacaattcgaatttggaagaaagaaggaaaacatgacgtctccagccaaattcaaaaaggataaggagatcatagcagagtacgatactcaggtcaaagagatccgtgctcagctcacagagcagatgaaatgcctggaccagcagtgtgagcttcgggtgcaactgttgcaggacctccaggacttcttccgaaagaaggcagagattgagatggactactcccgcaacctggagaagctggcagaacgcttcctggccaagacacgcagcaccaaggaccagcaattcaagaaggatcagaatgttctctctccagtcaactgctggaatctcctcttaaaccaggtgaagcgggaaagcagggaccataccaccctgagtgacatctacctgaataatatcattcctcgatttgtacaagtcagcgaggactcaggaagactctttaaaaagagtaaagaagtcggccagcagctccaagatgatttgatgaaggtcctgaacgagctctactcggtgatgaagacatatcacatgtacaatgccgacagcatcagtgctcagagcaaactaaaggaggcggagaagcaggaggagaagcaaattggtaaatcggtaaagcaggaggaccggcagaccccacgctcccctgactccacggccaacgttcgcattgaggagaaacatgtccggaggagctcagtgaagaagattgagaagatgaaggagaagcgtcaagccaagtacacggagaataagctgaaggccatcaaagcccggaatgagtacttgctggctttggaggcaaccaatgcatctgtcttcaagtactacatccatgacctatctgaccttattgatcagtgttgtgacttaggctaccatgcaagtctgaaccgggctctacgcaccttcctctctgctgagttaaacctggaacagtcgaagcatgagggtctggatgccatcgagaatgcagtagaaaacctggatgccaccagtgacaagcagcgcctcatggagatgtacaacaacgtcttctgcccccctatgaagtttgagtttcagccccacatgggggatatggcttcccagctctgtgcccagcagcctgtccagagtgagctggtacagagatgccaacaactgcagtctcgcttatccactctaaagattgaaaacgaagaggtaaagaagacaatggaggccaccctgcaaaccatccaggacattgtgactgtcgaggactttgatgtgtctgactgcttccagtacagcaactccatggagtccgtcaagtccacggtctctgaaaccttcatgagcaagcccagcattgctaagaggagagccaaccagcaagagacagagcagttttatttcacaaaaatgaaagagtacctggagggcaggaacctcatcaccaagttacaagccaagcatgaccttctgcagaaaaccctgggagaaagtcagcggacagattgcagtctagccaggcgcagctcaactgtgaggaaacaggactccagccaggcaattcctctggtggtggaaagctgtatccggtttatcagcagacacggactacagcatgaaggaattttccgggtgtcaggatcccaggtggaagtgaatgacatcaaaaatgcctttgagagaggagaggaccccctggctggggaccagaacgaccatgacatggattccatagctggtgtcctgaagctttacttccgggggctggaacaccctctcttccccaaggacatctttcatgacctgatggcctgcgtcacaatggacaacctgcaggagagagctctgcacatccggaaagtcctcctagtcctgcccaaaaccactctgattatcatgagatacctctttgccttcctcaatcatttatcacagttcagtgaagagaacatgatggacccctacaacctcgccatctgcttcgggccctcgctaatgtcagtgccagagggccacgaccaggtgtcctgccaagcccacgtgaatgagctgatcaaaaccatcatcatccagcatgagaacatcttcccaagccccagggagctggagggccctgtctacagcagaggaggaagcatggaggattactgtgatagccctcatggagagactaccccggttgaagactcaacccaggatgtgaccgcagagcaccacacgagcgatgacgaatgtgagcccatcgaggccattgccaagtttgactacgtgggccggacagcccgagagctgtcctttaagaagggagcatccctgctgctttaccagcgggcttccgacgactggtgggaaggccggcacaatggcatcgacggactcatcccccatcagtacatcgtggtccaagacaccgaggacggtgtcgtggagaggtccagccccaagtctgagattgaggtcatttctgagccacctgaagaaaaggtgacagccagagcgggggccagctgtcccagtgggggtcatgtagccgatatttatcttgcaaacatcaacaagcaaaggaagcgtccagaatctgggagcatccggaaaacttttcggagtgacagccatgggctgagcagttccctgactgactcctcctccccaggggtgggggctagctgccgcccatcctcccagcccatcatgagccagagcctccccaaagaagggccagataagtgttccatcagtgggcacgggagcctcaactccatcagccgccactcatccctgaagaatcggctggatagtccacagatccggaagactgccacagcgggaaggtcaaaaagcttcaataaccatcggcccatggaccctgaggtcattgctcaggatattgaggcaacaatgaactcggccctgaatgagctacgggaactagaacggcagagcagtgtcaaacacacccctgacgtggttctggacaccttggagcccctcaaaacctccccagtggtggcccccacgtcagagccctccagccctctgcacacccagctcctcaaggaccccgagcccgccttccagcgcagcgccagtactgctggggacatcgcctgcgccttccggcctgtcaagtctgtcaagatggctgccccggtcaaaccaccagccacacggcccaagcccactgtcttccccaaaacaaatgccactagccctggtgtcaactcatcaacttccccacagtctactgacaagtcttgtactgtc

SEQ ID NO: 119215 - DNA, 456 bp, Homo sapiens
tcattcctctttccttgcagagtaaagaagtcggccagcagctccaagatgatttgatgaaggtcctgaacgagctctactcggtaaatcagatgggttgcttggctctttaacaagcagagggaagcagcatttggcagcttgcagccatagtacatcagcaacagaactgaactccctcatggggtcagtagggccactgtatggctttaagccagggaaggacaggagaggtttctgtaactgtggctgtaatgatggaagcgtctggaggcggagaggaggctccagccggtgcagccagccggcgccggcgtgcgtgtccttgaggcggaagaggcggcggttccggagtgcggcccacgtaccacagcatgcccgcggtcgaacggcccaggccagcagcagcagcagccccgccacgaacacgatcagcccatactggctgctcagcat

SEQ ID NO: 119216 - DNA, 844 bp, Homo sapiens
atgaggaactgggcggtgccgggcagccacctgctccggcccaccccagctgccacaccctcgaatcctgatctgcagcaggagaaagcacaagcctctgctgaggtgagtacaagggaggtagaagtgagagaggatggagaacctaccctggaagacttcctggaggaggacatagtccacgctggagcgctgagcatcagactcaagaaaagcttgcgtggatttgcagacccaccaacaagggctccaggttctggagttgtggaggcaaactgcctaaaagacactcgcaattgcacggaggcccgcctgggtaacccatgctactctcgagcctcagctcaaattccataatgtcatcgaaactgcaaagtccttttgccgcgtaagccggcccctcacgcgactctcatctcagtctccaggacctgatgaagaaaggcatccttcaagcagctgcacctcagtgacgggtgagactctatctcaaaaaccaaaaaaggaatctgcgcctgagttcaagcccctggaaaatgccatgctcaaatgccagctcctgcagctcctgtacctctcggtcgtagcaggaaccccgggaggctggcatcagctgttcctgtgtcttcattacttagattccttcctttccttcaacccatacccccttcagatattctacctctcagctttgaagctgtcccttcctctccagctgcagagtctggccttcatccctgcacaagacgaagaaaaagagccaggccatcctgttaagttcctggcctcctgctctctcctcagccccaccctcctccgcacgtctggagaaaaggcattttag

SEQ ID NO: 119217 - DNA, 794 bp, Homo sapiens
tttcgtggatttttagaccgtggagactgcgctgccctgccctgcacctaccctcactctccgtgttctcactaaggtggaaattgccttccctcactactgacgagaccatgtgtaaaagcgtgaccacagatgagtggaagaaagtcttctatgagaagatggaggaggcaaagccggctgacagctgggacctcatcatagaccccaacctcaagcacaatgtgctgagccctggttggaagcagtacctggaattgcatgcttcaggcaggttccactgctcctggtgctggcacacctggcagtcgccctacgtggtcatcctcttccacatgttcctggaccgcgcccagcgggcgggctcggtgcgcatgcgcgtcttcaagcagctgtgctatgagtgcggcacggcgcggctggacgagtccagcatgctggaggagaacatcgagggcctggtggacaacctcatcaccagcctgcgcgagcagtgctacggcgagcgtggcggccagtaccgcatccacgtggccagccgccaggacaaccggcggcaccgcggagagttctgcgaggcctgccaggagggcatcgtgcactggaagcccagcgagaagctgctggaggaggaggcgaccacctacaccttctcccgggcgcccagccccaccaagtcgcaggaccagacgggctcaggctggaacttctgctctatcccctggtgcttgttttgggccacggtcctgctgctgatcatctacctgcagttctctttccgtagctccgtataa

SEQ ID NO: 119218 - DNA, 432 bp, Homo sapiens
caagaatcggtcaaggtgttcctgtggtgcactcataagtggaaggaggacccaatgtgatctcgattgttttggagtaccttcgagacacccctcccgtgccagtggttgtctgtgatgggagtggacgggcatcggacatcctggcctttgggcataaatactcagaagaaggcgggtaggtaactttccaggccccatggaagaaccctaaagcctgtttggaaacgagggtatgagtggattatgttttcagtagctcaaccaagacctcaaatcaaaacaagctatggaacaaattgtctaaaaaatgtctgtcatgggagggctgtggtgaagaacagagaaacatattctaaatgtcctgtgaagtgggaaattctatgaaagctacacggataataaaaagggtgaggaaaagagaggaaaaaa

SEQ ID NO: 119219 - DNA, 1329 bp, Homo sapiens
atggatcaggaacaaagtaagcccactccactaggaactgtgttgaaaaatttcaagaaaggatttaagggagattacagtgttactatgacaccaggaaaacttagaacattgtgtgaaatagactggccagcattagagatgggttggccatcagaaggaagcctggacaggtctcttgtttcaaagcacaatgctaggcaaggtctaactgttccacctggcatacaggcttatggagcagccccctttgaagaactccaagtagacttcactgagatgcacaaatgtggagatctcatccctaggtttagactgcccttacaaatcagcttggacaatgagccagcatttgtggctgacttggtacagaaaacagcaaagggtattccaacagacctgcagctgagggtcctgtctgttagaaggaaaactaacaaccagaaaggacatctacaccgaaaacccatctgtacatcaccatcatcaaagaccaaaagcaaagaagttgaaaactttgaaaaaaatttagaagaatgtataactagaataaccaatacagagaagtgcttaaaggagctgatggagctgaaaacccaggctcgagaactacgtgaagaatgcagaagcctcaggagccgatgcgatcaactggaagaaagggtatcagtgatggaagatcaaatgaatgaaatgaagcgagaagggaagtttagagaaaaaagaataaaaagaaatgcgcaaagcctccaagaaatatgggactatgtgaaaagaccaaatctacgtctgattggtgtacctgaaagtgatgtggagaatggaaccaagttggaaaacactctgcaggatattatccaggagaacttccccaatctagcaaggcaggccaacgttcagattcaggaaatacagagaacgccacaaagatactcctcgagaagagcaactccaagacacataattgtcagattcaccaaagttgaaatgaaggaaaaaatgttaagggcagccagagagaaaggtcgggttaccctcaaaggaaagcccatcagactaacagcggatctctcggcagaaaccctacaagccagaagagagtgggggccaatattcaacattcttaaagaaaagaattttcaacccagaatttcatatccagccaaactaagcttcataagtgaaggagaaataaaatactttatagacaagcaaatgctgagagattttgtcaccaccaggcctgccctaaaagagctcctgaaggaagcgctaaacttggaaaggaacaaccggtaccagctgctgcaaaatcatgccaaaatgtaa

SEQ ID NO: 119220 - DNA, 618 bp, Homo sapiens
ttacagtgttactatgacaccaggaaaacttagaactttgtgtgaaatagactggccagcattagaggtgggttggtcatcagaaggaagcctggacaggtcccttgtttgaaaggtattgtgtccagaattggttccttccggtgggttcttggtctcgctgacttcaagaatgaagccgcagaccctcacgggcagtgttaaagttcttaaagatggtatgtctggagtttgttccttcaggtgttcagatgtgtctagagtttcttccttctggtgggttcgtggtctcgctggctggtcaactacattactcagaaagctctgcgttgaatgaatgccgtcagagccaatgagggctcggaaagaagcatttccgtgtgtgcgcctaatgtagggccgagacttccggggtcctcttgtagcggccacgttgatctgcgatacgcgtgtttgcccagtgagtggccccggactgctacgtgggaccggcgtagggacactgaggcgctggcaggaggggtccctgtgtaaacgtccagtggattcaccttgccagctgcctgagctaggtccctcagtgtggctgctgccatcaactgtgggtggagtaggcat

SEQ ID NO: 119221 - DNA, 751 bp, Homo sapiens
agataaccattccttttttttttttttaaagcaaactttctttatgcctttggactagactgtctaaggccacaagattagaagttaccataatacatgttatactgttaatttttagcaaacttcacttttgttgaaaaccttgtaagtttgggatttcaattatcctttgctattaataagaccttgtttagtctaaattaacttagaattggtatagatggcctttttttctctctgctggtctttccttgcctctgccagctgcttatgctgctgttctctcaaccaccgtgggggtacggaggtggtctaaaaccagctgtaaccaagtgtctatgtatggaaactggtctgggtgccttggcttacgggttaccttgtgtcatacctttgaaacaagggacctgtccaggcttccttctgatggccaacccacctctaatgctgggcagtctatttcacacaaagttctaagttttcccgggtgtcacagtaacactggtaaatctcccttaaattctttcttgaatttttttttaacatagttcctagtgaagtgggcttactttgtgcctgacccatgcttctttgagacaaaacaccacgctcacaccacacgcacaccacaaaacaaagaacaggtaaaaagggcacacatacacttttaccgtttacaccaaaccagaatcaaaacccaaatcagagtatccagaaatccaagccaggtcaaaaccaaaacgaaagtatg

SEQ ID NO: 119222 - DNA, 459 bp, Homo sapiens
tcagccaggcttttctcccagcggccagtcggcgggagcgaccaccagagcctgtcgaccccaaggccacagacccgcgttccggtactcgccggctgccaccgcggcttccctgccagtggacaacccctgaacactcccacacttcgcagctgaacctgagccgtgcctttcccaaagagccgaacccggcggccacacagtaaaacccaagcggagcttccccacgcgaaagacctcatgcacgcgctcaggaagaccggaacggcgaatgctgagaaggtaacgggagccgacctgacttggaagaggaagcatcgactccacgagcctccccgactccttcggattagcctttgtggttgcacccgccgcggccacttgttctggaaacaccactgctacaactctgacttcaataagttctccattccattgaccccacctgttatctgccat

SEQ ID NO: 119223 - DNA, 771 bp, Homo sapiens
tttttttgcattcaacacatatttactgggcgcattctatgcacgagttattgaagacagctgttgtaagcatttcaggacaatgcacctcccttaacaccgagtccgggatttggggcggggtgccggaaaacgccaggtcccgccagcagagggcacggtcccggcctcgctgcagcctcgggacccaccgaggcttccaggctcccacgctcgctcccgagcgcgtccccgccctcgcgtcacgtgacgtggccgccggaacctgagctgcggggcctaagccgagctaaattcgttgcaggtggccgccggcgggtgcaaccacaaaggctaatccgaaggagtcggggaggctcgtggagtcgatgcttcctcttccaaagtcaaggtcggctcccgttaccttctcagcattcgcctgttccggtcttcctgagcgcgtgcatgaggtctttcgcgtggggaagctccggtgaccatgtaggggacaagagtgaggaagctcctggtgcttgggacgaggtcagcgctgtcggcgcgctgctccagcgcccacatacaccctggtgctgggccgacgggccctgggccctggtgggagctccggcctccggtcaaggcctgaccgggagcgccacgaattctcgcgtcgtctcgcgagagtccaagttaaagaacatggcgacgtctaatctgttaaagaataaaggttctcttcagtttgaagacaaatgggattttatgcgcccgattggtttgaagctttac

SEQ ID NO: 119224 - DNA, 366 bp, Homo sapiens
tcaactcttgccagagcctctggagatttcggcttcctcgctgtgggagtggaaggcatttacatctttggactctctgacagtcagtatcttccccatcatggttcccacagtttcctgttcaggttcagaaagtaccttgttaccaagtctatcgtggagatctggtggtttgaaagcatgtagcacctcccccttcactcccttcctccttctctggccatgtaagacatgactgcttcccttttgccttccatgatgatcgtaagtttcctgaggcctccccagccatgcttcctgtaagctctttgggtccgcactacctttaatagctgtaacacttgccgcgaaggtccgcagcttcat

SEQ ID NO: 119225 - DNA, 801 bp, Homo sapiens
ctaaagcttgtactgccttgtggagttccaatttgagacacaacgagtaagaatgagaacagggccttcatggagctcctgttctggactagactgtgaggattccagctctttctccctttggctgtaagcttttttgtgcttcacttttctcatctgtaaaatgggaattacagcagtaacttcctttgctgggttgctgtgagggcttacacttggctgtattccctctagcacgatagacttggtaacaagggactttctgaacctgaacaggaaactctgggaaccatgttggggaagatactgactgtcagagagtccaaagatgtaaatgccttccactcccacagcgaggaagccggaatctccagaggctctggcaagagttgagtcaattgcatgcctgcctagtccagctccgtccacatgaatgctctccacaagcttcagaggaaacaggataaaatggactcccaaatatttagggtggtgaaaatactctgcatgatactagaattgtggatacaggtgattatatatgtgtccaaacctacagaaggtacaacaccaagggtgaaccctcaggtaaactacagaggctgggtgaccatgatgtttcaatgtcggttcattagttgtgacaaatgcaccactccaccactctggtggggatgctgccagtgggggaggctatgtatgtgtggggacagagcgtatgtgggaagctctgtactttctgctcaaatttgctgtgaacctaaaactgctctaaacattaaagcctaatcaaaaaaatga

SEQ ID NO: 119226 - DNA, 2427 bp, Homo sapiens
cttcaggcccagctgaaagaactgcagagagagaatgacctcctccggaaagagctagacatcaaggacagcaaattgggatcttccatgaacagtattaagactttctggagtcctgagcttaagaaggagagagtcttgaggaaagaagaggcagcgcggatgtctgtcctcaaggagcagatgagggtttcccatgaagaaaatcagcacctacagttgacaatccaggcccttcaagatgagctgcgaacccagagagacctcaaccacctcctccagcaagagagtggcaaccgaggagcggagcacttcaccatcgagctgaccgaggagaactttaggcggctccaagccgagcatgacaggcaggctaaggagctgttccttttgaggaagacattagaggaaatggagctgagaattgaaacgcagaaacaaaccctcaatgcccgagatgagtcaattaaaaaacttcttgagatgttgcaaagtaaaggcttgccatccaaaagcctggaggatgacaatgagcgaacgcggcggatggcagaggctgagtctcaggtcagccacttggaagtgattttagatcagaaagagaaggaaaacatacatcttagagaggaattgcaccgaagaagccaacttcagccggagccagccaagacgaaggctctccagactgtcatcgaaatgaaggacacaaaaatcgcttcattggaacgaaacataagggatcttgaggatgagatccagatgttaaaagccaatggtgtgctgaacactgaggaccgcgaagaagagatcaaacaaattgaggtttacaaaagtcactccaagtttatgaagaccaagattgatcagctgaagcaggaactttcaaagaaagagtcggaacttcttgccttacaaacaaagcttgaaaccctcagcaatcaaaattcagattgcaagcaacacattgaagtgctcaaagagtcacttactgccaaagaacagagggctgccatccttcagactgaggtagatgcgctgagattacgactggaagaaaaagaatctttcctcaataaaaaaacaaaacagctacaggacctcacagaagagaaggggacactggccggtgaaattcgtgacatgaaagatatgttagaagtgaaggaaagaaaaatcaatgttcttcagaaaaagattgaaaacttgcaagaacaacttagggataaagacaagcaactgaccaacctgaaagacagagtgaagtccttgcagacggattccagtaatacagatactgcactggcgacgctagaggaagctctgtcagagaaggagagaataattgagcgcttgaaagaacagcgagaaagagatgatcgggaaagactagaagagatagaatccttccgaaaagagaacaaagacctgaaagagaaggtcaatgctttacaggctgaactgactgagaaagagtctagtttaattgacctcaaagaacatgcatcttcattagcctctgcggggctgaaaagggattccaaattaaaatctctagaaatagccattgaacaaaagaaagaggaatgtagcaaattggaagcacagttaaaaaaggcacataatattgaagatgactccaggatgaaccctgagtttgcagaccaaataaaacagctcgataaagaggcgtcttactaccgcgacgagtgtggcaaggcccaagcggaagtggaccggttgctggagatcctcaaggaggtggagaatgagaagaatgacaaggacaagaagatcgcagaactggagagcttgactctcaggcatatgaaagatcagaataagaaggtggccaacctcaagcacaatcaacagttggaaaagaagaaaaatgctcagttactagaagaagtgcgcaggcgagaagacagcatggctgacaactcacagcatttgcagatagaggaactgatgaatgcactggagaagaccagacaggaactggatgccaccaaagcacgcctcgcctccacacaacagtccctggccgaaaaagaagcgcacttggccaacctccggattgagaggaggaaacagctggaggagatcctggagatgaaacaggaagcactacttgcagccatcagtgaaaaagatgcaaacattgccttgctggaattgtctgcctccaaaaagaaaaagacgcaggaagaagtcatggccctcaagcgggaaaaagaccgactagtacatcaattaaagcagcagacccagaacagaatgaagttgatggcagacaactatgatgatgaccatcaccattaccaccaccaccaccatcaccaccaccatcgatctcctgggaggtcgcaacattccaatcacaggccctctccggaccaggatgacgaggagggcatatgggcatag

SEQ ID NO: 119227 - DNA, 495 bp, Homo sapiens
atgtcttacaaagaacaccagtgcaacaagagaaaagcaagtcacggaattgcaccgaagaagcaaacttcagccggagccagccaagacgaaggctctccagactgtcatcgaatgaaaggacataaccttgtgctaagtcaaggagcatctgtatattgtggcctgttgggccctgagactgcacttggtatttctccccaccaaggctgggatttccccagccttaatgaaagtctcatatcctgggaaacccctcactctcaagcaactgggacggttggtcatcctacaggagcaatgacatccacgtgggcagcacctggagatatggttatgcacagtcccttgggaaatataactgaattcaaagcactaactcaagcagactgcttttcctcaccctctgatatcatcaccactagcaccagtgagtgtagtacggccaatgaaaacagcagagaggggaagaagccagcccagttgagattctaa

SEQ ID NO: 119228 - DNA, 654 bp, Homo sapiens
atgccccgctacgtcccccttctgctgctcctgcttctcctgaggtgttcagaacggggtggaggagttaattttggtgagaaggatgcaaaagtccccgggacctggagagatggagtcagggtccctggagaaggagcctcttgggactcagacagggccagtcccgagcgaaggtacggaatagacccagggaccaccaaggactccatcactgcagacccaaggaccacagaggactccgtcactgcagacccagggaccaccaaacactccatcactgtagacccagggaccactgaggactctgtcactgcagacccagggaccaccaaacactccatcactgcagacccagggaccaccgaggactccgtcactgcagacccagggaccacagaagatgaaaccactaaacatgtcacagcagtgaaacccaccaggctcctgacacccatgggaattatcctcatatccctggctgcaaccacagtcactgttgtgctctttgttggattgggcttcattgtgaggacatataagcctgtgcatggctatgagaacacagtggagagccatgtaaatagcttttgccttcaaggtgcctggcagaagcgaatgaatattgctgtcatgtacatgcaaacgttgtga

SEQ ID NO: 119229 - DNA, 384 bp, Homo sapiens
tccgagctttgttttagacctgtttacacataaaagagaagctggatgataatcaacttaatttgatccagaaagtgtgtgagctcatcggtgaagtgagaacagaagggattgacaatatgaaggacctaaagaaaaaatggtgctctgccagccccgatgaaggaatgaaagaaaacccagccaaagaatctattcaaagtaaaaaagagtatttgcgcatcaagctgatggcagagcgagaagtgggtttatttcgtcagcaggtcctggctctcaggcaggccctggccagggcacaggctgacagcgcgaggatgtggaagcagcaggacagccaggctcaactgctgaaggagttagaacatagagtgacccaggaag

SEQ ID NO: 119230 - DNA, 822 bp, Homo sapiens
atggaaatcaccactctgagagcccaactcacagacttggaagaagtgaatctgaatctcaagaagcagattagaaaagaagtccaagaagaatatgaagcattagtccgagctttgtttgagacctgtttacacataaaagagaagctggatgataatcagcttaatttgatccagaaagtgtgtgagctcatcggtgaagtgagaacagaagggattgacaatatgaaggacctaaagaaaaaatggtgctctgccagccccgatgaaggaatgaaagaaaacccagccaaagaacagctgtgggccttggagcaggacaactgcagcctggccaacctggtgtgcaaagtgaggagcctgggccgctggaggctggctgtgcagcaggcgtgcttccaggcccagctgagcaggacagagaaggaatctattcaaagtaaaaaagagtatttgcgcatcaagctgatggcagagcgagaagtgggtttatttcgtcagcaggtcctggctctcaggcaggccctggccagggcacaggctgacagcgcgaggatgtggaagcagcaggacagccaggctcaactgctgaaggagttagaacatagagtgacccaggaagctctcacccagcagcagctgcattttatgaaaacatccaggatggagaagctcttggaagatgtggggcaaaaagaacagcaactgcagctccttagcaaagaggctgagagggcttctaagctgggccaactgcagcagaaaaaaatgaagagggacctccaccagtgttctcattgttcaattcccatctatgagtga

SEQ ID NO: 119231 - DNA, 436 bp, Homo sapiens
ctacccattgcagacaagggctctgattggaaaccctctgactcctccgtgcttcttggcctttgacaagtttatcacagatgggagaaggacattctgtttcttcagtgttatgggctgactcacttccctcttctctgcaataagcacaaaggccaaagtcagtccactctgttcagccagggcctgcagcccctcgcctgccgccagagcagctctcggttctcccggatttacctgttgaggcgctggcgtcgctcccacgccggtcccggtggccgcgcccgcccctgccacagccccggctaccgcggtggccgcagccgctaccacaaccgtcgtcagtgcggccatgtttacccgccgagctactcgggccgcggcggccaccggtgcctggggattcgtggcaggcgcaccctggcctctgcagaca

SEQ ID NO: 119232 - DNA, 1341 bp, Homo sapiens
atgggtggctctgccctagatgaggcgatgtgtggctgctcccctggcccacagatggtagcagaagctggggttgccaggctgcaccccgacggtgtgttcgttcctttctcctcagccacctccccgtgcaagatcctcaagtgcaactctgagttctggagcgccacgtcgggcagccacgccccagcctcagacgacacccccgagttctgtgcagccttgcgcagctacgccctgtgcacgcggcggacggcccgcacctgccggggtgacctggcctaccactcggccgtccatggcatagaggacctcatgagccagcacaactgctccaaggatggccccacctcgcagccacgcctgcgcacgctcccaccggccggagacagccaggagcgctcggacagccccgagatctgccattacgagaagagctttcacaagcactcggccacccccaactacacgcactgtggcctcttcggggacccacacctcaggactttcaccgaccgcttccagacttgcaaggtgcagggcgcctggccgctcatcgacaataattacctgaacgtgcaggtcaccaacacgcctgtgctgcccggctcagcggccactgccaccagcaagctcaccatcatcttcaagaacttccaggagtgtgtggaccagaaggtgtaccaggctgagatggacgagctcccggccgccttcgtggatggctctaagaacggtggggacaagcacggggccaacagcctgaagatcactgagaaggtgtcaggccagcacgtggagatccaggccaagtacatcggcaccaccatcgtggtgcgccaggtgggccgctacctgacctttgccgtccgcatgccagaggaagtggtcaatgctgtggaggactgggacagccagggtctctacctctgcctgcggggctgccccctcaaccagcagatcgacttccaggccttccacaccaatgctgagggcaccggtgcccgcaggctggcagccgccagccctgcacccacagcccccgagaccttcccatacgagacagccgtggccaagtgcaaggagaagctgccggtggaggacctgtactaccaggcctgcgtcttcgacctcctcaccacgggcgacgtgaacttcacactggccgcctactacgcgttggaggatgtcaagatgctccactccaacaaagacaaactgcacctgtatgagaggactcgggacctgccaggcagggcggctgcggggctgcccctggccccccggcccctcctgggcgccctggtcccgctcctggccctgctccctgtgttctgctag

SEQ ID NO: 119233 - DNA, 603 bp, Homo sapiens
ttagagcaacttaactttaaaaaagacaatgtgtgcataaaaatgagctagtggaccggcatcaattgtggtattacggcaacagtttattaaatttttcctagatgaaatctgttctttagaggaaagggtttggtgtcgtaagttatgtctcttgtatatcctatggaaagaaccgcgcgccgtacaggccaaatcccggtgctcggacatacgaagggaactgtacagacctgtttccttggcagggctttctggggatttcctgcgtgctgggagatactctgcccacacggtcaacggggcttggtcagcctggacgtcgtggtcacagtgggcttgatgatcaagaggactgttattggctttgcacaacatgttgaagatcatcattgccttttgttctttgcaggtggctactcgcatccagtcaactttcatatcatcttggcatctgagtccttctcttctaggatcaagatccttttctctgtatatgtccttcggttctgttctgtgcccactgtttattagccacgatacatcttcatacagtacaaagtctttccagtctttttcttgcttaggggtttggtaacccat

SEQ ID NO: 119234 - DNA, 690 bp, Homo sapiens
gtaccggccggaatcccggtcgacgatttcgtagcagccttcgggaagtcctgcaggagccgcgttccatgagggcatttggcagccgccccaggcccccgggccgcctgcaggtgattaggctaatgagctgccccgggggcgcggagaccggcctggcgagcggattacccggcgcccagctgctgccggcggagactcccaggagctccggagaggaacccttcgaaggtgacttcagaactggagttacctggctgagcagtgctggaatggcggctttatctacctgatcatgctgcgtcgctttaagcacaaagcccactccacttataatggcaacagtagcaacagctctgaaccaggagaaacacctaccttgtagctgggtgaccgaactgcgaaaaaggggaaacgaaccagaaagtttggggtcatctccaggcctcctgccaacaaggcccctgaagaatccaagggcagcgctggctgtgaggtgtccagtgaccccagcactgagctggagaacggccctgaccctgaacttggaaacggccatgtctttcagctagaaaatggcccagattctctcaaggaggtggctggaccccatctagagaggtcagaagtggacagagggacagagcatagaattccaaagacagatgctcctctgaccacaagcaatgg

SEQ ID NO: 119235 - DNA, 480 bp, Homo sapiens
atggccattctgggctatggttcagcgaccctcatctgccatcctctgcgggccggcaactcttcctccaaactgccggggcgcatgctgtgcgcgctgccgggccactggcgccctgtccgcttacccagctatccatcggccagccacccggccacccgcacctcccgctccagggcctctgacatcccctccacccctctccgtgcagaattcgaaccccgatcctctcccttccgctcgccccagcccgggtcccgcagccccgcggcacgcccggcactcaccctcagagctcccggcactcaccctcagcgctcgcggctcctccgcgctctgcacgaaactgaaagtagaagccgccgcctagagctgctccgccagtgcatggaactggcggctgctgccgagaaatcacgtggattcgaggtgccagcccgagccagatggggctcgggcgcgggatgggcgggggcctaa

SEQ ID NO: 119236 - DNA, 153 bp, Homo sapiens
agcctggtcctgtgaaggcccagcgtatggaagcaatagctcgccgcctgcagctcagcccatgggagagcagcgttgttaacagactcctgacgcccacacattcgttcctggccagaagtaaaagcacagctgccttgtctggagaagcag

SEQ ID NO: 119237 - DNA, 239 bp, Homo sapiens
ctcgccgcctgcagctcagcccatgggagagcagcgttgttaacagactcctgacgcccacacattcgttcctggccagaagtaaaagcacagctgccttgtctggagaagcagcatcttgcagccccatcatcatgccctacaaagctgcacactctagaaattcgatggatcgaccaaaactctttgtaacaccacctgagggctcttctcgcaggaggatcattcatggcacagcg

SEQ ID NO: 119238 - DNA, 394 bp, Homo sapiens
aagccaaaacagaagcataaccgttggtcgtggggaggctctctccatgggagccctagcatccacagtgcagatccagacaggcggtcagtttccaccatgaatctttcgaaatatgttgatcccgtcattagcaagcggctctcctcttcatctgcaactttactaaattctccagatagagctcgccgcctgcagctcagcccatgggagagcagcgttgttaacagactcctgacgcccacacattcgttcctggccagaagtaaaagcacagctgccttgtctggagaagcagttatccccatttgtcctcgttcagcatcttgcagccccatcatcatgccctacaaagctgcacactctagaaattcgatggatcgaccaatgtatt

SEQ ID NO: 119239 - DNA, 435 bp, Homo sapiens
cggtcgattcggacacccagaccgacatcctccttgccacccggctcagtcaaagctgctcctgctcaggtccggcccccatcccccggcaacatccgccctgtcaagagggaagtcaaagtggagcctgagaagaaagatcctgagaaggaacctcagaaagttgccaatgagccctcactaaagggcagagcacctttagtgaaggtagaagaagccacagttgaagagcggacacctgctgaaccagaagttggccctgctgctccagccatggccccagctccagcctcggccccagctccagcctcggccccagctccagccccggtccccaccccagccatggtctcagccccgtcatccactgtgaatgccagtgcttctgttaagacttctgcaggcaccaccgacccagaggaggccacaaggctt

SEQ ID NO: 119240 - DNA, 2115 bp, Homo sapiens
taggtgcctgccccattgataagagtttctagtttagatttagagccatccctttctttcgtcagtgtcgtctgtccctgcagacatcatcagcaccttcaccagtttttcattgtctcttgtatcacagaaggagcagcttcagctttcagctcttctcaggtactccctggcacaacagcttcctgattctggctttgaagtgggcatggagttggccaggaagtgttcttccacccttttgctccactactttattgcctatccagagaaggtgctagagaaggactcttctatttttagtgttgccatctggctgaaggaaggtttttgttttacttatttacttattttttagataaaagcctttttggttgaatttaaagtgtgttaaattttaaccattttttactacataaaaggctatttcatgtggttcaacctctagttctgtgttctaggtcactcccccaaagctgtgtccatacttaaatgtttctgaagaaattttaagaaactaaatgtgtcttttctcttttgtctcatttctgtagcacccgacagctacaaagtgcaagataagtgtgttttttctttttctttttttttttaatccactcttcatctcatgttttttttaatctcgctttcagaccctccgaactattcaagtttgcaacctgcctatatttgatttccctctttttttttttttttaaccctccccaaagctgcaagagaaatagtgtggttagaaagagaagagcgagccaggcagcactacgagaagcacctggaagagcggaagaagaggttggaggagcactgccttaaattgaagaagcttcaaacaaccagctggaatctaatcctcagctcttctattccatctaaggaacgccacgaagctgttgtacggcgcacaatggaaaggagccagaagtgtgtgaatctgataaccttttttttttaaatttgctttgaaaaatcattgttttacattctgtctccaggtggttttgttgaatcaccatcagtgaactaggaaattgcaatcctacatgttggctgtcaattagcattatctccatttgttttagatccagacaggcggtcagtttccaccatgaatctttcgaaaggtggaataactgctccctctggacaggggtcctgttgctacgatgtattatgccctcttgactctgaaaagaatgcttctaacatcttgcttatgtggtgacgtttagctcgccgcctgcagctcagcccatgggagagcagcgttgttaacgctcctctggcactcttgtgtgtaaaaccaatcacctgcaccctagttatccccatttgtcctcgttcagcatcttgcagccccatcatcatgccctacaaagctgcacactctagaaattcgatctgttgagtattgtgagtgtgtttgcctcgcttgtggaaaaatctaactattgagtttctctgaacttagagctataaaaaagaaagagagagagaaaatgtactcttcctcacgtgttctaggttctggcaagcctgttctcatgtgtccccttttgtctgccttgtttgtttgtggcccaggcttccgtccaagtctcttcctcatttgcctggcacacccagaccgacatcctccttgccacccggctcagtcaaagctgctcctgctcaggtccggcccccatcccccggcaacatccgccctgtcaagagggaagtcaaagtggagcctgagaagaaagatcctgagaaggaacctcagaaagttgccaatgagccctcactaaagggcagaaagaccaaagcccatatcctccttggactcctcagactctcttttctttgcttctatttcttctcctcagctggaacagcattggtggagggggcaggaccttctgctggtgcaggtccacgagctcctccattgcagatgaggctccccatgtcaacattggccaaggcttttgcaaacaagccagtccaaaaaggttcaacatttacaccagctgctttaatgagggcattgatcttatcctccttgacggtcacctcaccctcatgcagaatgagggccgagccttatgcagaatg

SEQ ID NO: 119241 - DNA, 1350 bp, Homo sapiens
atgtcgacaccatatagtgcgtgtacacatgtcctcttacatctttcaacgcttactaatataagtgctcagagtaaacatgaaagaagacgaacaaatcattacgagaaaacagcagatttacctgcaatgattacggacgcgctgagacgcaggcctttcctggcgcgaagcgactcgccccggagctcccctgcaccgtcctgggtgtcaggacgcgtcaacccagatgacccgacccggagatcctggatcctctgccctcttccccctaccaagtccttaaccggagagggaggagctaccaatgtcctccagacgttctccaaagcccgagctgccgggagaagcttgctcaaggcggccgcccacgaggccccgtccccgcactgcaacgagaggtccgcctctgaacggccggctgcccagggcacggctccccgtcagcgcaggggcgggcgccctgggaggggggcgctgccgccgccgtgtagcccctcgacgggtaacgccgcgcctcgcgactcggccgtccggtgtggccccccgggggtccgggtaagcggcgacgaccaaattgagtttggcgtttggggtcactcccctcgcgctaacgccttggagtcggaccccctttcggaaaagggaagagaggccccccttttgatatccccgccccgctacgccagaggcttcccccgcccacgtggaaaatttccgttcaaaccagacacgctatacgtctgcggaataatccgggcagcagctagagcgaccgagcattgcagaaatcagcgcacaagcgactgtcgagccacggtcaactatatagagctgtccgagacggctagagcactggcaacagtattatacttcgcagttccccagatgggaggattcttctggaatgaaggttcttatgaggtacttcaacagagaagggagaactatagtgctcgggtaccctttgcgttcagctggatagcacgtcccgtctatacatccccggcggtacggttgtggttccacaaatcctcgagaccgctgtgtttcctacaggcccaattgaaatacccgacgggcatggaaaggcaggttcgggtactaaatgtgaaacgtccattttgtggcacaagtgagttactcagtgagtgccctcaacccaatgaaacccaggtctttcctggcgtacagtcatcggatctctatttttctgggcttagtttgtgttttgttgcacatgccaatgggaatccacagcagcagcattttagaagctggaaagccgatgcagtagtgggtactgactcagtaaacctgagaatgccaaatcctaaactgacgctatga

SEQ ID NO: 119242 - DNA, 312 bp, Homo sapiens
atgttttcgtttctcttggaaatcgaagccataaaactggctgagcagaagcacagggaggagcggaggcggagggccacggtggtggtgggggacctgcaccctctcagggatgccctgcccgagctgctggggctcgaggctggcagccggcgccaagcccgcagaagcccatcacccagtgacacaaccccgccacccagtgacgcaacccccagtgacacaaccctgccacccggtgacgcaacccccagtgacacaacccccagtgacgcaaccccgccacccaatgaagataccaccacccggtga

SEQ ID NO: 119243 - DNA, 549 bp, Homo sapiens
tcacgtgcatgtgacccaggcacaaagagcctgaaagccaagctcctgggagacgggcgccacaggcagcagcttatcagcaggctgcatcccctgcgaggtgacagggagggtcatgcagccgctgccctcctggttgagccgtcgaggcagctcccgccccatgaggacaagctctgggatgtgtgtcccagggccctgcatgagtgggtcccacacgctcaccacacccgacagcaggcctgagccgtcctcacgggccaccctctgtgcggagcaccggctggagccccagctctcggcctctgcaggctcaggaagcaccgtggcccgtggctcccactcatatccctccacctctggacccgggtcagccccacagctgcgggcttggcgccggctgccagcctcgagccccagcagctcgggcagggcatccctgagagggtgcaggtcccccaccaccaccgtggccctccgcctccgctcctccctgtgcttctgctcagccagttttatggcttcgatttccaagagaaacgaaaacat

SEQ ID NO: 119244 - DNA, 2448 bp, Homo sapiens
atggcgggagggcactgcggcagcttccccgcggcggcggccggcagcggcgagatcgtccaactgaacgtaggggggaccagatttagtacctcaagacaaactcttatgtggattccagattcttttttttccagtttgctgagtgggagaatttcaacacttcgagatgaaactggtgctatatttattgatagagatccagcagcatttgcacccattttaaattttcttcggacaaaagaactagacttaaggggagtgagtattaatgttctcaggcatgaagcagaattttacgggatcactccattagtaagaaggcttctcttatgtgaagaattggagcgttcctcttgtggcagtgtcctttttcatggttacttgcccccaccaggtattcctagtcgtaaaataaacaacacagtcagatctgctgattctaggaatggtctaaattctacagaaggtgaagcccggggaaatggtacacagcctgttctctctggaacgggagaagaaactgttaggctaggatttcctgtggatccacgaaaggtgctaatagtagctggccatcacaactggattgtagctgcatatgcccattttgctgtgtggtacagaatcaaagaatcttcaggatggcagcaagtgtttacgagcccatatttggattggactatcgaacgagtagctttaaatgcaaaggtggttggagggccacatggagacaaagacaaaatggttgctgttgcctcagagagtagcatcatcttgtggagtgttcaggatgggggaagtggaagtgaaattggagtgttcagcctgggtgttcctgtagatgctctcttctttattggtaaccagttggtggccacgagtcatacagggaaagtgggagtgtggaatgctgtcactcagcactggcaggttcaagatgttgttcctataactagttatgacactgctggatcattccttctgcttggatgtaacaatggatcaatatattacatagatatgcagaagttccccttgcgaatgaaagataatgatcttcttgtaactgaactgtatcatgatccttcaaatgatgctattactgctctgagtgtttacctcacacccaaaacaagtgtcagtggtaactggatcgagatcgcctatggtacgagctctggagcagtacgagtgattgtacaacacccagagacagttgggtcaggtcctcagctttttcagactttcacagttcaccgaagtcccgtaacaaaaatcatgctatcagagaagcatcttgtatcagtctgtgcagataataatcatgtccggacgtggacagtaacacgattcagaggaatgatctctactcagccaggttctactcctttagcgtcattcaagatactatccctggaggagacagaaagtcatggtagctattcctctggaaatgacataggaccttttggagagcgagacgatcaacaggtgtttatccagaaagttgttcccatcaccaacaaactatttgtaagactctcatcgactggaaaaagaatatgtgagatccaggctgttgactgtactacaatatcctcatttacagtgagggaatgtgagggatccagtaggatgggctcaagaccaaggcgctacttgttcacaggccatacaaatggcagtattcaaatgtgggatctgaccactgctatggatatggttaacaaaagtgaagataaggatgtaggtggtccaaccgaagaagagctactcaaattactcgatcaatgtgatttgagcacatctcgctgtgctactcctaacatcagtccagcaacttccgtagttcagcatagccacttacgagaatcaaattctagccttcagcttcagcaccatgataccacccatgaagcagctacttacggttccatgaggccttacagagaaagtcctttattagcaagggcaagaaggactgagagctttcacagttatagggacttccagactattaatttgaacagaaatgtagaaagagctgtccctgaaaatggtaacttgggtccaatacaagctgaagtgaaaggggcaacaggggaatgtaatatatctgagagaaagtctcctggagtagaaataaaaagtttgagagaattggatagtggattggaagtgcataaaatagctgaaggtttttcagaatccaagaaaaggtcatcagaagatgaaaatgaaaataaaatagagtttaggaagaaaggaggatttgaagggggaggattccttggaagaaagaaagttccctatctggcatcatcaccaagtacttccgatggaggaactgactcacctggtactgcgtccccatctcctacaaagactactccatctcctcggcataaaaaaagtgattcttcaggtcaggagtacagcttgtga

SEQ ID NO: 119245 - DNA, 711 bp, Homo sapiens
ttctccgaagggcggaatcgctttctgaacgtagggccgaccagatttagtacctcaagacaaactcttatgtggattccagattcttttttttccagtttgctgagtgggagaatttcaacacttcgagatgaaactggcgctatatttattgatagagatccagcagcatttgcacccattttaaattttcttcggacaaaagaactagacttaaggggagtgagtattaatgttctcaggcatgaagcagaattttacgggatcactccattagagaaaataaaaatggagtactgtttttctgtttgcatgtactcttgacaagtttgctttgaaatgtttttagtaagaaggcttctcttatgtgaagaattggagcgttcctcttgtggcagcgtcctttttcatggttacttgcccccaccaggtattcctagtcgtaaaataaacaacacagtcagatctgctgattctaggaatggtctaaattctacagaaggtgaagcccggggaaatggtacacagcctgttctctctggaacgggagaagaaactgttaggctagcaaatactattgatagcaagtatgtagccaatgatgattggcttatttttcagtatgtggatgaagaggacctgatgaacgccatcaaggatttcagctcagtgactaaggaacgcaccacattcacagacacccacctgtaa

SEQ ID NO: 119246 - DNA, 405 bp, Homo sapiens
caacagaaagaaatcccttagatgtgttgatatgggggtactgcaacagtgcagagatgggctgagtctagacatgttccttttccaccctctcaagaacaaaacgccaataagatctgttctgtctgccaggaagagaaagatagtgccgacagctatggggagattccctggtggcaaggccctgaacgctgctggccagtgagactgatgctggcaaccctaggggactacaaatgggtcctgacaggtataggcactgactcttaactgggttttactatcccaacagaccatgcaaatgctttcagtgctaaagaaataccacaatagacccatttaaaaatttccaccttcctggagtgagccgtttgactctccccttccccattcttttgttaatta

SEQ ID NO: 119247 - DNA, 905 bp, Homo sapiens
atgatcagcgaagttatagtgattcaaatgctgtttctgcatgcattttccaaggtatttagcgctttaattaaaaacaacaaaaaacccctgcaagatgcacaaataaaatgtaaggccatctctggtttgtcaggagggatgaggcgatctgaatgcaacagggagagggaccaggtgacacgcacgcagtgccgggacattagtcaaaaagcgaggacctggggactgagggatggctaccagcaagaatggtgcaatggcgtgacagctcggccctggttgccaaggagatgcgagtaccggaaatgcggaattcggggagagcgcgcatgcctggtccggtggagggagggtgccgggcgtcacaggtcctgacagggaagaagttggcaggtcctggcaggggacgagctgcggcggtggcacctccgggtgtggaaggctccagtgagatggagtcgcgagtcgcggacgctgggaccggcgagaccgcgcgagcagcgggcgggagtccggcagttggctgcaccactcgggggcccgtagtctcggcgcccctgggagccgcccggtggaagctcctgcggcaggtatttattcgcgataagctcatggagcggcgtaaccgtcgcacaggaaggacagagaaagcgcggatctgggaagtgacggacagaacggtcaggacctggattggggaggcggttgccgccgctgctgctgacggtgtgacgttctctgttccggtcacaccacatacgttccgccattcctatgcgatgcacatgctgtatgccggtataccgctgaaagttctgcaaagcctgatgggacataagtccatcagttcaacggaagtctacacgaaagtttttgcgctggatgtggctgcccggcaccgg

SEQ ID NO: 119248 - DNA, 888 bp, Homo sapiens
atgagggacagcgttccagtagccctgccacagctctctcatcctctggtccgccctcactcaagatggctaccagcaaaaatggtgcaatggcgtgacagctcggccctggttgccaaggagatgcgagtaccggaaatgcggaattcggggagagcgcgcatgcctggtccggtggagggagggtgccgggcgtcacaggtcctgacagggaagaagttggcaggtcctggcaggggacgagctgcggcggtggcacctccgggtgtggaaggctccagtgagatggagtcgcgagtcgcggacgctgggaccggcgagaccgcgcgagcagcgggcgggagtccggcagttggctgcaccactcgggggcccgtagtctcggcgcccctgggagccgcccggtggaagctcctgcggcaggttctgaagcaaaaacacctggatgattgcctgcgacatgtatctgtaagaagatttgaatcatttaatctgttttcagtaacagaaggcaaagaaagggaaactgaagaggaggttggtgcatgggtccaatatacaagcatcttctgtcctgaatacagtatctccttaagatcctataggtggcagcagttcctacagtttcagagcataacaatggctcgatttgtgggtctaagaataaagctgtcacgaactcatggaatctttatactgcataatagtggatccttgaatgttgaagatgtccttaccagctttgacaatacaggaaatgtttatgaacacttccaaagaatgtccagtactgcttcctcaaatcctttgattgggcacttcctgcaaaacttcaacaagtcagagagcacagagagttggaaaacaataggcaaagcacatttttaa

SEQ ID NO: 119249 - DNA, 1055 bp, Homo sapiens
cttgggcagtatggccgttttcacgatattgattcttcctatccatgagcatggaatgttcttccatttgtttgtgtcctcttttatttcgttgagcagtggtttgtagttctccttgaagaggtccttcacatcccttgtaagttgaattcctaggtattttattctcaacagggacaatttgacttcctcttttcctaattgaataccctttatttctttctcttgcctgactgccctggccagaacttccaacactatgttgaataagagtggtgagagagggcatccctgtcttgtgccagttttcaaagggaatgcttccagtttttgcccattcagtatgatattggctgtaggtttgtcataaataggtcttattattttgagatacgttccatcaatacctaatttattgagaggttttagcatgaagggctgttgaattttgtcgaaggcctcttctgcatctattgagataatcatgtggtttttgtctttggttctgttaatatgatgatttatgtttatcgattcgcatatgttgaaccagcctggcatcccagggatgaagccaacttgtttgtggtggataagctttttgatgtactgttggatttgctttgccagtattttattgaggattttcgcattgatgttcatcagggatattggtctaaaattctcgttttttgttgtgtctctgccaggctttggtatcaggatgatgctggcctcataaaatgagttagggaggattccctcttcttctattgactggaatagtttcagaaggaatggtaccagcttctctttgtatctctggtagaattcagctgtgaattcacctggtcctggactttttttttgggttggtaggctattgattactgcctcaatttcagagcctgttattggtctattcagcaattcaaattcttcccagtttagtcttgggagggtatatgtgtccaggaatttatccatttcttctagattttctagtttatttgcatagaggtgtttatagtattctctgatggtagtttgtattt

SEQ ID NO: 119250 - DNA, 930 bp, Homo sapiens
tcaaagatcagatagttgtagatatgcggcattatttctgttccattgatctatatctctgttttggtaccagtaccatgctgttttggttactgtagccttgtagtatagtttgaagtcaggtagtgtgatgcctccagctttgttcttttggcttaggattgacttggcaatgcgggctcttttttggttccatatgaactttaaagtagttttttccaattcttgggcagtatggccattttcacgatattgattcttcctacccatgagcatggaatgttcttccatttgtttgtgtcctcttttatttccttgagcagtggtttgtagttctccttgaagaggtccttcacatcccttgtaagttggattcctaggtattttattctctgaagcaattgtgaatgggagtttacccatgatttggctctctgtttgtctgttgttggtgtataagaatgcttgtgatttttgtacattgattttgtatcctgagactttgctgaagttgcttatcagcttaaggagattttgggctgagacgatggggttttctagataaacaatcatgtcatctgcaaacagggacaatttgacttcctcttttcctaattgaataccctttatttccttctcctgcctgattgccctggccagaacttccaacactatgttgaataggagcggtgagagagggcatccctgtcttgtgccagttttcaaagggaatgcttccagtttttgcccattcagtatgatattggctgtgggtttgtcatagatagctcttattattttgaaatacgtcccatcaatacctaatttattgagagtttttagcatgaagggttgttgaattttgtcaaaggctttttctgcatctattgagataatcatgtggtttttgtctttggctctgtttatatg

SEQ ID NO: 119251 - DNA, 819 bp, Homo sapiens
atgaacattgatgcagaaatcctcgataaaatactggcaaaccgaatccagcaggacatcaaaaagcttatccaccatgatcaagtgggcttcatccctgggatgcaaggctggttcaatatatgcaaatcaataaacgtaatccagcatataaacagaaccaacgacgaaaaccacatgactatctcaatagatgcagaaaaggcctttgacaaaattcaacaacgcttcatgctaaaaactctcaataaattagtgttggaagttctggccagggcaatcaggcaggagaaggaaataaagggtattcaattaggcaaagaggaagtcaaattgtccctgtttgcggatgacatgattgtatatctagaaaaccccatcgtctcagcccaaaatctccttaagctgataagcaacttcagcaaagtctcaggatacaaaatcagtgtgcaaaaatcacaagcattcttatacaccaacaacagacaaacagagagccaaatcatgagtaaactcccattcacaattgcttcaaagcaaataaaatacctaggaatccaacttacaagggatgtgaaggacctcttcaaggagaactacaaaccactgctcaatgaaataaaagaggatacaaacaaatggaagaacattccatgctcatgggtaggaagaatcaatatcatgaaaatggccatactgcccaagcagtttagggcctccttctccgttaatatgtccgatggccttcatgatgagaatgcactgtctgtaattagctgtgcagctgatgacgtgcctccagtagccaccagcatgtga

SEQ ID NO: 119252 - DNA, 1140 bp, Homo sapiens
atgattatctcaatagatgcagaaaaggcctttgacaaaattcaacagcccttcatgccaaaaactctcaataaattaggtattgatgggatgtatctcaaaataataagagctatctatgacaaacccacagccaatatcatactgaatggacaaaaactggaagcattccctttgaaaactggcacaagacagggatgccctctctcaccactcctattcaacataatgttggaagttctggccagggcaatcaggcaggagaaggaaataaagggcattcaattaggaaaagaggaagtcaaattgtccatgtttgcagatgacatgattgtatatttagaaaaccccatcgtctcagcccaaaatctccttaagctgataagcaacttcagcaaagtctcaggatacaaaaacagtgtgcaaaaatcacaagcattcttatacaccaataacagacaaacagagagccaaatcatgagtgaactcccatccacaattgcttcaaagagaataaaatatccaggaatccaacttacaagggatatgaaggacctcttcaaggagaactacaaaccactgctcaatgaaataaaagaggatacaaacaaagggaagaacattccatgctcatgggtaggaagaatcaatatcgtgaaaatggccatactgcccaaggttcatgggtacatgagctggtttgttacacaggtaaattacatgtcactggggtttggtgtacagattgtttcaccactcagaaccaacaacaaaaaccacatgattatgtcaatagatgcagaaaaggcctttgacaaaattcaacagcccttcatgctaaaacctctcaaaccagaaaataaaatacctaggaatccaacttacaagggatgtgaaggacccttcaaggagaactacgaaccactgctcaatgacataaaagaggatacaaacaaatggaagaacattccatgctcatgggtaggaagaatcaatatcatgaaaatggccatactgcccaagctgcatagcacggccgtctatgtggatgcatcacggcttattcgaccaccctcctatacatgtgcattcgggttattgccgatagtttgcacgtacagccaacgctgtgaaaaataa

SEQ ID NO: 119253 - DNA, 1035 bp, Homo sapiens
tcaggacccactgagtgtgggtaccccaaaaggctgtcccattgcccttttgcccttgccagcagagggcagctgccccacgcaatggggccaggggccgattgagctcccaagcaatgggtagcctgctcgatgttgacccacttctttgcattttctaacttctttagatgaatgtttaattaatttttcaagactatatgtttcatgcgtgtccgtgtgaagagaccaccaaacaggctttgtgtgagcaacatggctgtttatttcacctgggtgcaggcgggcctccactgtgagagttacccagagcatctgtgatggtcctgtaggcttccgaggcgattgggtggtgtcagactttagccgcttgaaggtgaggttaattaagttctgttgtggggtttgagggccagattctaatttttgaagttttttcctaatgtcaggagtggattgggtggtaaaatgcatattaagaataaggcggccttctggcccctctgtgtctagggtggtaaagcgtctaagggttgctgctaagcgggccatgacctgggctgggttttcgtcttcaccttgggtagtttctttaagcttgtcataattaacagccttgtaagctgcttttttaagcccttgggcagtatggtcattttcacgatattgattcttcctacccatgagcatggaatgttcttccatttgtttgtatcctcttttatttccttgagcagtggtttgtagttctccttgaagaggtccttcacatcccttgtaagttggattcctctggtagaattcggctgtgaatccatctggtcgtggactctttttggttggtaagctattgattattgccacaatttcagctcctgttattggtctattcagagattcaacttcttcctggtttagtttcatttcattcatttcatcttccattgctgataccctttcttccagttgatcgcatcggctcctgaggcttctgcattcttcacgtagttctcgagccttggttttcagctccat

SEQ ID NO: 119254 - DNA, 1200 bp, Homo sapiens
atggataaattcctcaacacatacactctcccaagactaaaccaggaagaagttgaatctctgaatagaccaattacaggatctgaaattgtggcaataatcaatagcttaccaactaaaaagagtccaggaccagatggattcacagctgaattctaccagaggtacaaggaggaactggtaccattccttctgaaactattccaatcaatagaaaaagaaggaatcctccctaactcattttatgaggccagcatcatcctgataccaaagccgggcagagacacaaccaaaaaagagaattttagaccaatatccttgatgaacattgatgcaaaaatcctcaataaaatactggccaaccgaatccagcagcacatcaaaaagcttatccaccacgatcaagtgggcttcatccctgggatgcaaggctggttcaacatacgcaaatcaataaatgtaatccagcatataaacagaaccaaagacaaaaaccacatgattatctcaatagatgcagaaaaggcctttgacaaaattcaacaactcttcgtgctaaaaactctcaataaattagcccaaaatctccttaagctgataagcaacttcagcaaagtctcaggatacaaaatcaatgtacaaaaatcacaagcattcttatacaccaataacagacaaacagagagccaaatcatgagtgaattcccattcacaattgcttcaaagagaataaaatacttaggaatccagcttacaagggacgtgaaggacctcttcaaggagaactacaaaccactgctcaatgaaataaaagaggatacaaacaaatggaagaacattccatgctcatgggtaggaagaatcaatatcgtgaaaatggccatactgcccaagccttttgctgaaggagctaagcctggagtccgtggggtcacggtcagtgtcatttctctttctcatactgcctcctccggccttgctggctgctgtccctggcctgctgctgtcctggggaagcaggggaaggaagtgcttgggacgagagaatgtaaacatcgacagaaacagcagccctatgaccacataagtactttcccatcagatggagacctttcagcagtggggtactccaatgttggtatcatctgggatcatgcacaagaagtcagcatgaagcaggtggtaaccaccttcaactag

SEQ ID NO: 119255 - DNA, 1023 bp, Homo sapiens
tcatgtgtcttttggctgcataaatatcttcttttgagaagtgtcgttcatatcctttgcccactttttgatggggttgtttgattttttcttgtaaatttgtttgagttcattgtagattctggatattagccctttgtcagatgagtagattgcaaaaattttctcccattctgtaggttgcctgttcactctgatggtagtttctttggctgtgcagaagctctttagtttaattatatcccatttgtcaattttggcttttgttgccattgcttttggtgttttagacgtgaagtccttgtccatgcctatgtcctgaatggtattgcctaggttttcttctagggtttttatggttttaggtctaacatttaagtctttaatccatcttgaattaatttttgtataaggtgtaaggaaggggtccagtttcagctttctacatatggcttgggcagtatggccattttcactatattgattcttcctacccatgagcatggaatgttcttccatttgtttgtatcctcttatttccttgagcagtggtttgtagttttccttgaagaggtccttcacatcccttgtaagttggattcccaggtattttattctctttgaagcaattgtgaatgggagttcactcatgatttggctctctgtttgtctgttattggtgtataagaatgcttgtgatttttgcacattgattttgtatcctgagactttgctgaagttgcttatcagcttaaggagatttggggctgagatgatggggtcttctagatacacaatcatgtcatctgcaaacagggacaatttgacttcctcttttcctacttgaataacctttatttccttctcttgcctgattgccctggccagaacttccaacactatgttgaataggagtagtgagagagggcatccctgtcttatgccagttttcaaagggaatgcttccagtttttgcccattcagtatgatattggctgtgggtttgtcataaatagctcccat

SEQ ID NO: 119256 - DNA, 1053 bp, Homo sapiens
atgaaggtggaaataaagacattctttgaaaccaatgagaacaaagacacaacataccagaatctctgggacacattcaaagcagtgtgtagagggaaatttatagccctaaatgcccacaagagaaagcaggaaagatctaaaattgacaccctaacatcacaattaaaagaactagaaaagcaagagcaaacacattcaaaagctagcagaagacaaatacaaactaccatcggagaatactataaacacctctacacaaataaactagaaaatctagaagaaatggataaattcctggacacatacacccttccaagactaaaccaggaagaaggtgaatccctgaagagaccaatggcaggttctgaaattgaggcaataattaatagcctaccaaccaaaaacagtccaggaccagacagattcacagctgaattctaccagaggtacaaagaggagctgctgataagcaacttcagcaaagtctcaggatacaaaatcaatgggaaaaaatcacaagcattcctatacatcaataacagacaaacagagagccaaatcatgagtgaactcccattcacaattgcttcaaagagaataaaatacctaggaatccaacttacaagggatgtgaaggacctcttcaaggagaactacaaaccactgctcagcgaaataaaagaggacacaaacaaatggaagaacattccatgctcatggataggaagaaccaatattgtgaaaatggccatactgcccaaggtttgggtgaatcttctacggcaaagagatcggcaaattatcaaaccagacaatgtcaagataggtgacccatcttcaggctctgctgaaggctacctgtctattggcacaggcggtgttatcacaatccaactggatctcaacgcaactgcctttgaaatctcttccaaagaagataccggaacttgccctttaggaatcccttacacagcagtgtctacagctttaaaaaggcaactctgcacaagcctggaggagcaggcttctggcttggctacagagatgtga

SEQ ID NO: 119257 - DNA, 873 bp, Homo sapiens
ctaccattctgtaggtttcctgttcactctgatggtagtttcttttgctgtgcagaagctctttagtttaattagatcccatttgtcaattttggcttttgttgccattgcttttggtgttttagacatgaagtccttgcccatgcctatgtcctgaatggtaatgtctaggttttcttctagggtttttatggttttaggtctaacatttaagtctttaatccatcttgaattaatctttgtataagcttgggcagtatggccattttcacgatattgattcttcctctccatgagcatggaatgttcttccatttgtttgtgtcctcttttatttcgtgaagcagtggtttgtagttctccttgaagaggtccttcacatcccttgtaagttggattcctaggtattttattgtttattgatttgtgtatgttgaaccagccttgcattccagggatgaagcccacttgatcatggtggataagctttttgatgtgctgctggattcggtttgccagtattttactgaggatttttgcatcaatgttcatcagggctattggtctaaagttcttcttttttgttgtgtctctgccaggctttggtatcaggatgatgctggcctcataaaatgagttagagaggattccttctttttctattgattggaatagtttcagaaggaatggtaccagctcctccttgtacctctggtagaattcggctgtgaatccatctggtcctggactttttttggttggtaagctattaattattgcctcaatttcagagcctgttattggtctattcagggattcaacttcttcctggtttagtcttgggagggtgtatgtgtccaggaatttatccat

SEQ ID NO: 119258 - DNA, 1260 bp, Homo sapiens
ttatgccctgattttttccctctcctcctcctcctcctcctcttcctcctcctcctcctcctcttcctcctcctcctcctccttcctctttgctgggtcctttacttcatcatggcaagcagcccaggtcttggggagtagggagcttttgcctctctttgagcttctggacttagatttctgacagctgcctttcccctgctgttctcgtgatagtgaataagtctcacgagatctgatgcgtttatcgggggtttccgcttttgcttcgtctctcattttctcttgctgccgcgatgtacgaagttccttttgcctgccgcgatgattttgaggcctccccagccatgtgaaactgtaagtccaattaaacccgtttttcttcccagtctcgggtatgtctttatcagcagcatgaaaacggactaatacagtaagttggtaccagtagagtggggtgttcctgaaaagatacctgaaaatgtggaagcgactttggaacttgggtagtatggccattttcacgatattgattcttcctatccatgggcatggaatgttcttccatttgtttgtgtcctcttttatttcgttgagcagtggtttgtagttctccttgaagaggtccttcacatctcttgtaagttggattcctaggtattttattctctttgaagcaattgtgaatgggaagtcatgcatgatttggctctctgtttgtctgttgttggtgtataagaatgcttgtgatttttgcacattgattttgtatcctgagactttgctgaagttgcttatcagcttaaggagattttgggctgagacgatggggttttctaaatatacagtcacgtcatctgcaaacagggacaatttgacttcctcttttcttaattgaataccctttatttctttctcctgcctgattaccctggctagaacttctaacagtagttctcgtgccatgtttttcagctctgtcaggtcatttaaggtcttctgtatgctgtttactccagttagccattcttctaatcttctttcaaggttttcagcttccttgcgatgggtttgaacatcctcctttagcttggagaagtttgttattactgatcttctgaagcatatttctgtcaacttgtgaaagtcattctccatccagctttgttccgttgctggcgaggagctgcaatcctttggaggataagaggggttctggtttttagaattttcagcttttctattgtggtttctccccat

SEQ ID NO: 119259 - DNA, 411 bp, Homo sapiens
tcaaacagttctggaggacagaagtccaagagcaaggtggattttttgaggatgatgagggaccatctgttccattcctatccctagtttctggtggttttctagcaatctttcgcattcctttgtttgtagatctccaccttcatcttctcctggtggtctccctatgtgcacgtgtgtgtccaaattcccttgggcagtatggccattttcacgatattgattcttcctatccatgagcatggaatgttctcccatttgtttgtatcctcttatttcattgagcagtggtttgtagttctccttgaagaggtccttcacatcccttgtaagttggattcctaggtattttattcttattgtctctatttcttcttgggtcattgctccgatttcaactttattcttcat

SEQ ID NO: 119260 - DNA, 824 bp, Homo sapiens
ctgggatctttgaggctgctgaccttcggatgggatttttgtggggtcttttgttgttgatgttgtttctttctttttgtttgtttttctttgacacagtcaagcccctcttcaattgggctgctgcagtttgctgggggaccactgcagaccttatttgcctcagtccctcctttacctggaggtgtcaccagtgattgcttgggcagtatggccattttcacgatattgattcttcctacccatgagcgtggaatgttcttccatttgtttgtatcctcttttatttccttgagcagtggtttgtagttctccttgaagaggtccttcacatcccttgtaagttggattcctaggtattttattctctttgaagcaattgtgaatgggagttcactcatgatttggctctctgtttgtctgttgttgatgtataagaatgcttgtgatttttgcacattgattttgtatcctgagactttgctgaagttgcttatcagcttaaggagattttgggctgagacgatggggttttctagatatacaatcatgtcatctgcaaacaaggacaatttgacttcctcttttcctaattgaatgccctttatttccttctcctgcctgattgccctggccagaacttccaacactatgttgaataggagtggtgagagagggcatccctgtcttgtgccagttttcaaagggaatgcttccagtttttgtccattcagtatgatattggctgtgggtttgtcatagatagctcttattattttgagatatgtcccatcaatacctaaattattgagagtttttagcat

SEQ ID NO: 119261 - DNA, 987 bp, Homo sapiens
tcattcagcagtggaagcagctagattagtttttctgagaaaaggcccatgatttcgcgcgcttggcttccatccatgccataaagactcttctgtagatgagctaattgcacaagcactagggtggccaagagcatgttggctggccctcagtgccaaagtcaccttatacatctggttgtttaatgtctcttctgtagtggatgctctcttgggcagtatggccattttcacgatattgattcttcctatccatgagcatggaatgttcttccatttgtttgtatcctcttttatttcgttgagcagtggtttgtagttctccttgaagaggtccttcacatcccttgtaagttggattcccaggtattttattctctttgaagcaattgtgaatgggagttcactcatgatttggctctctgtttgtctggtattggtgtataagaatgcttctgaattttggacattgattttggatcctgagactttgctgaagttgcttatcaactgggtatcagcagcggtgtctgcagaaccacggattttcatgaaccgcgaatgctgctgtctgatcgttcctctggaagttttgtcacaattattttctgtgtttttgtccttttcatctttgaaatgcctgtgaagtccacttgtccatgatgctttacaccaagctttccatcctgggaaaagtcggctgagatttttggggtctatggcctgctgtatgagcaaattcacttgtccaccaacactgagcacagtgccttcttccactcctttcagtttctcttgtagtctcattaagacacgttcagctactttgttgaaactctggtcaatatcactgagatttcgtttgcattcttggtcatctgcattcagagtagggtgaagctcagtttcatcttccggcctctgctgtaaatacaaagctttcaaaggattcatggtccagtcaaagagtggatcatatagaaggac

SEQ ID NO: 119262 - DNA, 669 bp, Homo sapiens
atggataaattcctcaacacatataccctcccaagactaaaccaggaagaatttgaatctctgaatagacaaataacaggctctgaaattgtggcaatgatcaatagcttatcaaccaaaaagagtccaggaccagatggattcacagccgaattctaccaaagacaaacagagagccaaatcatgagtgaactcccattcacaattgcttcaaagagaataaaatacctaggaatccaacttacaagggatatgaaggacctcttcaaggagaactacaaaccactgctcaatgaaataaaagaggatacaaacaaatggaagaacattccatgctcatgggtacgaagaatcaatatcgtgaaaatggccatactgcccaagacaaaatttaattcaagatggattaaagacttaaatgttagacctaaaaccataaaaaccctagaagaaaacctaggcaataccattcaggacataggcatgggcagggacttcatgtctaaaacaccaaaagcaatggcaacaaaagccaaaattgacaaatgggatctaattaaactaaagagcttctgcacagcaaaagaaactaccatcagagtgaacaggcaacctacaaaatgggagaaaattttcgcaacctactcatctgacaaagggctaatatga

SEQ ID NO: 119263 - DNA, 1992 bp, Homo sapiens
atggcagattataaaaaccagatgagccagcagatagccgctgtatggggcacctttaagaacctgggaaaattcgactactggcatgcatgcacgttgactctagaggatcccctacttcagtgtattgcgaaatgcaaagcgtttgaaaaagtagtgatggatgatgagaacgacagcgagagtcgctgcgtgtactgctgcagccccattgcaagcccacgagagccaaatatgagtgaactcccattcacaattgcttcaaagagaataaaatacttaggaatccaacttacaaggaatgtgaaggacctcttcaaggagaactacaaaccactgctcagcaaaataaaagaggacacaaacaaatggaagaacattccatgctcatggataggaagaatcaatatcgtgaaaatggccacactgcccaaggtatttattcgcgataagctcatggagcggcgtaaccgtcgcacaggaaggacagagaaagcgcggatctgggaagtgacggacagaacggtcaggacctggattggggaggcggttgccgccgctgctgctgaccgtgtgacgttctctgttccggtcacaccacatacgttccgccattcctatgcgatgcacatgctgtatgccgatcccaaccttagctcagccccaaaagaagaccgcagacagtttggagcaccccaagttcagaggaacattgagacactggaaaccttccagaaaggagccacaaagctgagttgcaggctgcgagggctgagcagtggagagagggtcaacagcattaaaccactgaacaaaggccataaataccttgtattcgaagccaacacgggaacagaaaacggataccaaggcgaagaatctttatttaacaaagcgtactacggcggcggcacgaacttcttccgtaaagaaagccagaagcttcagcagagcgctaaaaaacgcgatgctgagttagcgaacggcgccctcggtatcatagagttaaataatgattacacattgaaaaaagtaatgaagccgctgatcacttcaaacacgctgctccaagtaacaatcctgttagtggaccagaaagctgctttctctcagaccattgatttcaaagctggaaaacagcagccccattgcaagcccacggtgcagacattcagcaggatccagacagcctctgctctagaaggctcagcagagaagtgtgacaatctaaaaacttgtcacacttcacatggatctgtcatggcggaaacagcggttatcaatcacaagaaacgtaaaaatagcccgcgaatcgtccagtcaaacgacctcactgaggcggcatatagtctctcccgggatcaaaaacgtatgctgtatctgttcgttgaccagatcagaaaatctgatggcaccctacaggaacatgacggtatctgcgagatccatgttgctaaatatgctgaaatattcggattgacctctgcggaagccacgaattttctggaagccctgccgaggctacccccaccccatgaacgcatccaatgcttttgggaacctgtgctaatctgtcgggtttctgcatatctctttgcccaaccaaagggaccccagaccctgccacctttgtccggaagagctggcctcggagggacagagactctgagcctgcgtcccaggaagaaagtcacaggaggagcgactcaagccttcgcgaaagaaaataaccaaaaagcatacaaagaaacgtacggcgtctctcatattacacgccatgatatgctgcagatccctaaacagcagcaaaacgaaaaataccaagtgcctcaattcgatcaatcaacgattaaaaatattgagtctgcaaaaggacttgatgtgtgggacagctggccgctgcaaaacgctgacggaacagtagctgaatacaacggctatcacccagtagtgctcgccgcagttgagcgacagggcgaagccctcgagtga

SEQ ID NO: 119264 - DNA, 1488 bp, Homo sapiens
atgtccgcgccattgctggtgttacctgaaagtggcggcgcgtggctaaaaacctgttatgacgcgcaaaacgatgccatgctggatgacgattccacgttgcaaaaagcccgtacgaaattccttcaggcttacgaaggcaacatgatggtgcgtggcgaaggtgatgatatctgtcatggacctgcaggcacgaaagctttttaccgcgttgccagtacccacaatgacgaagtaagccagcagaatgtagaacagccccagctgcggcatcacatctttaaagaatgggaccaccagctgcgttgcgggcgtgtctttgccggcaaggtacagggcgaaggcgacacccagcgcaatgaccgacatccagaaatacttccaacgagcgatcaaccctttggtgtctttacgcaccactttgcgataatcatcaacaaagccaataacaccgtaacctaccagcaccaccaacacgcaccagacgtacggattggacgggctggtgtccccacaacgggacccatggaccacacagttcagggtttcagccgcacaaccggagtgggctacgtgttaataagggggcaggccaaaatcctattgtataaatctcgctctaaaggccgaaaaaatcagcgctcgacacggactcattgtcaccacccgtcacctaaaatctactcagcgtcggcaaaggagccatgggttctagcaactaacttacctgttgaaattcgaacacccaaacaacttgttaatatctattcgaagcgaatgcagattgaagaaaccttccgagacttgaaaagtcctgcctacggactaggcctacgccatagccgaacgagcagctcagagcgttttgatatcatgctgctaatcgccctgatgcttcaactaacatgttggcttgcgggcgttcatgctcagaaacaaggttgggacaagcacttccaggctaacacagtcagaaatcgaaacatggaaatgaccgatattctcagcggtgcaattgtcgcggcgattgccatcgcagcagggatggtcgccgtatggtgcttaccacgtatgcacgcgatgatgcatcaaatgggaaatccggtgctcgtgctgggtattggcggatttattctcggtattctgggggttattggtggaccagtttcgctgtttaaagggctggatgagatgcagcagatggtggcaaatcaggtttcagcaccagcgattactttttgctggcgtggttttcgcggtgggcgaatcttcctggcagtgtttgtcggcgtggcattagggttgatgctgcatgagcacgttcccgccgtaccagcggcaataaccgtttcttgcgctattctcggcatcgtgctggtggtaacacgcgatggctggttaagtctttttatggcggcagtcgttgtacccaataccacattgtaccgctgctctgtatcgtcatgcttccggcatggctgttattag

SEQ ID NO: 119265 - DNA, 1209 bp, Homo sapiens
tcattggccatgatggcgggtctctgtctctttctcgcttcccctcttttcctcttggttgtcccggatgagctccctctgggctaccagactgcctgagctaggtgctgcaaagtcccatggccagtgccagtgagaggtgaagctggctgggcttctgggatgggtggggtcttggagaacttttctgtctagccgcgccagcagcagtaacttgttcaggtcttcttccacgcagtggtagctttgttgttttgctcttcgcaataaatcttgctgctgctcactttttgggtctgcgctgcctttatgagctgtaacattcactgtgaaggtctgaagcttcactcctgaagccagcaacagcaggaacgcactgggagggacgaataactccggctgggaggaacgaacaactccagacgtgctgcgtttaagagctgtaacactcactgcgaaggtctgcagcttcactcccaaaccatagctcagtgaaggatgagggtcatatgatgaggaacacagccacatcttgggcagtatggccattttcatgatattgattcttcctatccatgagcatggaatgttcttccatttgtttgtgtcttcttttatttcgttgagcagtggcttgtagttctccttgaagaggtccttcacatcccttgtaagtcggattcctaggtattttactctctttgaagcaattgtgaatgggagttcactcatgatttggctctctgtttgtctgttattggtgtataagaatgcttgtgatttttgcacattgattttgtatcctgagactttgctgaagttgcttatcagcttaaggagatttggggctgagatgatggggttttctaaatatacaatcatgtcatctgcaaatagggacaatttgacttcctcttttcctaattgaataccctttatttctttttcctgcccgattgccctggccagaacttccaacactatgttgaataggatttgtgagagagggcatccctgtcttgtgccagttttcaaagggaatgcttccagtttttgcccattcagtatgatattggctgtgggtttgtcataaatagcacttattattttgagatatgtcccatcgatactgaatttatttagagtttttagcatgaagggctgttgaactttgtcaaaggccttttctgtatctattgagataatcat

SEQ ID NO: 119266 - DNA, 680 bp, Homo sapiens
cctgtggagtgtacttttcgttttcaatacatctctgcttttgtggcttcattgcttcattgctttgtttctgtgttttgtccaattctttgttcaaaacgccaggaacctggacaccctcgtccggtaacacttgggcagtatggccattttcacaatattggttcttcctatccatgagcatggaatgttcttccatttgtttgtgtcctcttttatttcgctgagcagtggtttgtagttctccttgaagaggtccttcacatcccttgtaagttggattcctaggtattttattctctttgaagcaattgtgaatgggagttcactcatgatttggctctctgtttgtctgttattgatgtataggaatgcttgtgattttttcccattgattttgtatcctgagactttgctgaagttgcttatcagcagctcctctttgtacctctggtagaattcagctgtgaatctgtctggtcctggactgtttttggttggtaggctattaattattgcctcaatttcagaacctgccattggtctcttcagggattcaccttcttcctggtttagtcttggaagggtgtatgtgtccaggaatttatccatttcttctagattttctagtttatttgtgtagaggtgtttatagtattctccgatggtagtttgtattt

SEQ ID NO: 119267 - DNA, 885 bp, Homo sapiens
ctaattatccattactgttcccagcgagtttatcttgatgctctcagtggattgcaaactcaggggatccaaagtgtgatgaggatatgcttcatcacagtaatgcaaagttgaaccttgggcagtatggccattttcatgatattgattcttcctatccacgagcatggaatgttcttccatttgtttgtgtcctcttttatttccttgagcagtggtttgtagttctccttgaagaggtccttcacatcccttgtaagttggattcctagctattttattctctttctctctggctgcccttaacattttttccttcatttcaactttggtgaatctgacaattatgtgtcttggagttgctcttctcgaggagtatctttgtggcgttctctgtatttcctgaatctgaatgttggcctgccttgctagattgggggagttctcctggataatatcctgcagagtgtttttcaacttggttccattctccccgtcattcatttcattcatctcatcttccatcgctgataccctttcttctaggtgatcgcatcggctcctgaggcttctgcatacttcacacagttctcgagccttggttttcagatccatcagctcctttaagcacttctctgtattggttattctaattatacattcttctaaatgtttttcaaagttttcaacttctttgcctttggtttgaatgtcctcccgtagctcggagtaatttgatcgtctgaagccttcttctctcagctcttcaaagtcattctccgtccagctttgttccgttgctggtgaggaactccgttcctttggaggaggagaggcgctctgcgtttcagagtttccagtttttctgctctgttttttccccat

SEQ ID NO: 119268 - DNA, 1583 bp, Homo sapiens
tttggactggcaggactgctggttgcgaccttgctgtcggggatctttttgattctgatgggtctggcacgctttgtcgcctgattgagtatattccggtttccgtcaccttagtttcacctcgggtatcgggatcaccatcgggggatcctctagaatggggtgcgccacttaatattcgaatggggggaaaaatcccccgggttatacgaaatttgttcggcaacggctgccggaactctgggattaccccaggattcacccctctggatcatcggtgtattaacgctaacggccagggtcatgccggaccagaccccgcctgtgaaccgctgatcggcgcaccggttccgccctctgcgctacctggacttatcgtagcattaattctcggtcttgctggcggcgtcagcctggggccggaacatccgatcatgaccgtcaatatcgcccttgcggttgccattggcgctcgtctgttaccgcgcgtcaaccgaatggagtggactattttagcctctgccggaaccatcggcgcactgtttggcactcctgttgcggcggcgttgatattttcgcaaaccttaaatggcagtagtgaagttccgctatgggatcgtctctttgcgccgttaatggcggcagcagctggtgcacttactaccggattatttttccatcctcatttttcactgcccattgctcattacggacagatggaaatgaccgatattctcagcggtgcaattgtcgcggcgattgccatcgcagcagggattgttccgccgtatggtgcttcccacggttggcccgcgataatgcatcaaatgaaaaatcccggtgctcgtgctgggtatgggcggatttattctcggtattttgggggttattggtggaccagtttcgctgtttaaagggctggatgagatgcagcagatggtggcaaatcaggctttcagcaccagcgattactttttgctggcggtaattaaacttgccgccctggtcgttgctgccgccagtggctttcgcggtgggcgaatcttcccggcagtgtttgtcggcgtggcattagggttgatgctgcatgagcacgttcccgccgtaccagcggcaataaccgtttcttgcgctattctcggcatcgtgctggtggtaacacgcgatggctggttaagtctttttatggcggcagtcgttgtacccaataccacattgctaccgctgctctgtatcgtcatgcttccggcatggctgttattagcaggtaagccgatgatgatggtcaatcgtccgaagcaacagccaccccacgataacgtttagcaaaaaatgctctcctttatgatttaagagttatggcgatgatacggggctttacctccccgtaatattgcgttaacaggccgctgacggcttcgagcgtgaaggagaataacaatgttcaggtcactgtttctggcgtccgccctgatggcatttaccccgcttgcagcaaacgcaggtgaaatcgccctgctgccttcaatcaaattacaaattggcgatccccgggttccgagttgtaattggtttttacgaca

SEQ ID NO: 119269 - DNA, 1221 bp, Homo sapiens
atggacagtatgtctggagggggacagtataggaagattaatgggaatccaacatcagtgaagtgccctttgctgctgctgccagccattctgactccagagccggtgaataggtggagacaaagctgcaaagcatttgcacggcattctccgcttgctttcagagtgacaatttcaacaagcaccttttttgacggcttgctggtgacaggactatacacatctacaagtgttcaggcatcacagagcattggaggttccagtgctttcggatttgtgttggaagttctggccagggcaattaggcaggagaaggaaataaagggtattcaattaggaaaagaggaaatcaaattgtccctgtttgcaggcgacatgattgtatatctagaaaaccccattgtctcagcccaaaatctccttaagctgataagcaacttcagcaaagtctcaggatacaaaatcaatgtacaaaaatcacaagcattcttatacaccaacaacagacaaacagagagccaaatcatgagtgaactcccattcacaattgcttcaaagagaataaaatacctaggaatccaacttacaagggatgtgaaggacctcttcaaggagaactacaaaccactgctcaaggaaataaaagaggatacaaacaaatggaagaacattccatgctcatgggtaggaagaatcaatatcgtgaaaatggccatactgcccaaggtcttaaagatggtgtgtccggagtttgttctttctgatgttcggatgtgttcagagtttcttccttctggtgggttcgtggtcttgctggcttcaggagtgaaggtgcagaccttcgtggtgagtgttacagctcttaagctggcatgtttggagttgttcgttcttccagtccggagttgtccattcttcctgtccggagttgttcattcttcccggtgggctcctggtctcgctggcctcaggagtgaacctgcagacctttgcgggccggcggtgctggctggctgctccgagtgtggagcctgcagagactgtgcacacccagaacttgcactggcctgcgagcgcacagccctggttcccgcccgtgcctctccctccacacctccacgcaagcagagggagccggctccagccttggcaagcccagagaggggctcccacagtgcagtgtcaatttccccggagaagactcctcaacctcctttctga

SEQ ID NO: 119270 - DNA, 3321 bp, Homo sapiens
atgcttcaaagcaaccgaaccgccgccagccattcaccatccatccagccagccatccagccagccatccagccagccaaccaactatccatccacaatttgtggacacaattccggcattcaaccaaaattccagttgaatgggtgaatggtgaatggctgaatggacgaatgccaggggatcatcatgaatggcaatgcaactatcagccagccatccagccagccatccagccagccaaccaactatccatccacaatttgtggacacaattccggcattcaaccaaaattccagttgaatgggtgaatggtgaatggctgaatggacgaatgccaggggatcatcatgaatggcaatgcaactatcagactaatcatgttcacttatatgcatactcctctcctgatgaacgtacatgcatgcgccgccgtgtgtggggcgaagaaggaggtagttttataacatttcggcaaagcgacaaaaggtcttggcgccattcaccatccatccagccagccatccagccagccatccagccagccaaccaactatccatccacaatttgtggacacaattccggcattcaaccaaaattccagttgaatgggtgaatggtgaatggctgaatggacgaatgccaggggatcatcatgaatggcaatgcaactatcagccagccatccagccagccatccagccagccaaccaactatccatccacaatttgtggacacaattccggcattcaaccaaaattccagttgaatgggtgaatggtgaatggctgaatggacgaatgccaggggatcatcatgaatggcaatgcaactatcagccagccatccagccagccatccagccagccaaccaactatccatccacaatttgtggacacaattccggcattcaaccaaaattccagttgaatgggtgaatggtgaatggctgaatggacgaatgccaggggatcatcatgaatggcaatgcaactatcagagtaaaataattgtgtttagaaaccctctggggaccggcctagaagggttacgcaaggtggaacctcagaagatattggtgcgctctatgtgccaaatctccacaagccctctggtagatggcacacagctgataagcaacttcagcaaagtctcaggatacaaaatcaatgtgcaaaaatcacaagcattcttatacaccaataacagccaaccagagagccaaatcatgagtgaactcccattcacaattgcttcaaagagaataaaatacttaggaatccaaattacaagggacgtgaaggacctcttcaaggagaactacaaaccactgctcaatgaaataaaagaggatacaaacaaatggaagaacattccatgctcatgggtaggaagaatcaatatcgtgaaaatggccatactgcccaagaaacacaactcctcgccagcaaggaaacataactggacagagaatgagtttgacaaattgacagaagtaggctttagaaggtgggtaataacaaactccttcaagctaaaggagcatgttataacccaatggaaggaagctaagaacttggaaaaaaggttagaggaattgctgactagaataaccagtatagagaagaagataaatgacctgatggagctgaaaaccaaggctcgagaactacgtgaagaatgcagaagcctcaggagccgatgcaatcaactggaagaaagggtatcagtgatggaagatgaaatgaatgaaatgaagatcaacaaaattgatagaccgctagcaagactaataaagaaaaaaagagagaagaatcaaatagacgcaataaaaaatgataaaggggatatcaccaccaatcccacagaaatacaaactaccatcagagaatactacaaacacctctacgcaaataaactagaaaatctagaagaaatggatacattcctcgacacatacactctcccaagactaaacaaggaagaagttgaatctctgaatagaccaataacaggatctcaaattgtggcaataatcaatagcttaccaacgaaaaagagtccaggaccagatggattcacagccgaattctaccagaggtacaaggaggaactgggatgtgaaggacctcttcaaggagaactacaaaccactgctcaaggaaataaaagaggatacaaacaaatggaagaacattccatgctcatgggtaggaacaatcaatatcgtgaaaatggccatactgcccaagagtgtctgggggagaacactggaattcagcaaaaaagtgatgaagaccctttgaggcacagagactcaggatggcagcatagagaggaaagcaaagcaccagctcagattgactcagagccaagagagactcacactgtgagggaaaagcacgctttgaaaggattaaagcctgttatcactcgcctgttacagcatggcgttttaaagcctataaactccccttaccattcccccattttacctgtcctaaaaccagacaaggcttacaggttaattcaggatctgcgccttatcaaccaaattgttttgcctatccaccctgtagtgcccaacccgtacactcttttgtcctcaataccttcctccacaactaactgttccgttcttgatcttaaagatgcttttttcactattgccctgcacccctcgtcccaacctctctttgcttccacttggactaaccctgacacccatcagtcccagcagcttacctgggctgtgctgctgcaaggtttcagggacagccctcattacttcagccaagctctttctcatgatttagtttctttccacccctctgcttctcaccttattcaatatactgatgaccttcttctttgtagcccctcctttgaatcttctcaacaagacacacttctgctccttcagcatttactctccaaaggatttcagggtccaataggtcctgtatctccacatcctgggaccccaccaacatcccactacattcatccaaagggctaccgtgtcacaatcctagctcgatccagcagtgcagccatgactctggcacttcccacattgcatactacatacaatactacaggatggcttcactcaccagccatcgtggctgtccttaggcagctccagatatctcccccactggatgctgctactggcgaccgctacacagtattattgccacctcttctgatgagccctgaaaaagagaatctagagaggcttgggctcctgctgtcaagattcttaatccttctctcctggactaccttagatatggccgttggctttcctgtctga

SEQ ID NO: 119271 - DNA, 800 bp, Homo sapiens
atgaaggacctcttcaaggagaactacaaaccactgctcagcgaaaagaggacacaaacaaatggaagaacattccatgctcatggggataggaagaataaatatcgtgaaaatggccatactgcccaagcaaaagagacttcgcagcaattcaatcaagggttttgcgatggagagattatcctggattatctggtggcagtttctcatcaacattacaagaaacgacgttacttggacttactgtacgtcatttcgcttaaagttgcagtttctaagaacctaatgaggacattaattgagaatttactgcagttgcaactgaaaccctatggtccataaagctcaaaatatttactctctggacctttacagaaaaagtttgctgatgcctgtttccggttcattatccacggttgcacgcgatgatgcatcaaatgaaaaatccggtgctcgtgctgggtattggcggatttattctcggtattctgggggttattggtggaccagtttcgctgtttaaagggtcttgaaagctcttgggtctcatcgagactggaaagatctccctggaccaccctgttccaggcggtactcccacaaagatggcactttatgaacattttatgaacactaaggagtttggcatagagtagttgcccagtaaacacttgggcagtatggccattttcacgatatttattcttcctatccccatgagcatggaatgttcttccatttgtttgtgtcctcttttcgctgagcagtggtttgtagttctccttgaagaggtccttcat

SEQ ID NO: 119272 - DNA, 1689 bp, Homo sapiens
ttattttcttcttctttcttccttcttccttccttcttcttcctccttccttcctcctccttctcctccttctccttcttctccttctcctcctcctcctcccccctcctctctccctcctccctctcttttccctccttctcctcccttcttctccttctccttcttcttcttcttcttcttcttcttcttgggcagtatggccattttcacgatattgattcttcctacccatgagcatggaatgttcttccctttgtttgtatcctcttttatttcattgagcagtggtttgtagttctccttgaagaggtccttcatatcccttgtaagttggattcctggatattttattctctttgaagcaattgtggatgggagttcactcatgatttggctctctgtttgtctgttattggtgtataagaatgcttgtgatttttgcacactgtttttgtatcctgagactttgctgaagttgcttatcagcttaaggagattttgggctgagacgatggggttttctaaatatacaatcatgtcatctgcaaacatggacaatttgacttcctcttttcctaattgaatgccctttatttccttctcctgcctgattgccctggccagaacttccaacattatgttgaataggagtggtgagagagggcatccctgtcttgtgccagttttcaaagggaatgcttccagtttgtgcccattcagtatgatgctggctgtggggtggtcataaatatctcctattattctgagatacgttccattaatacctagtttattcagagtttttagcatgaaggggtgttgaattttgttgaaggccttttctgcatctattgagataatcatgtgatttttgtcattggttctgtttatgtggtggattacgtttattgatttgcatatgttgaaccagcgttgcatcccagggatgaagcagacttgatcgtggtggataagctttttgatatgcttctggattcggttttccagtattttattgaggattttcgcattgatgtccatcagggatattggcctgtaatttcctttttttgttgtgtctctgccaggttttggtatcaggatgatgccagcctcataaaatgagttagggaggattccctctttttctctgatagaatctggttgtgactttgtctggtcctggacttttttggttggtaagctattaattacttcctcaatttcactacttgttattggtctattcagagattcgacttcctcctggtttagacttaggagggtgtatgtttccaggaatttatcaatttcttctagattttctagtttatttgtgtagaagtgtttatagtattctcttatggtagtttttattttttgggcagtatggccattttcacgatattgattcttcctatccatgagcatggaatgtttttccatttgtttgtgtcctttcttatttccttgagcagtggtttgtagttctccttgaagaggtccttcacatcccttgtaagctgtattcttaggtattttattctctttgtagcaattgcaaatgggagttcgctcatgttttggctctctgtttgttattggtgtataggagtgcttgtgatttttgcacattgatttttcatcctgagaccttgctgaaggtctgctactccttctgtacat

SEQ ID NO: 119273 - DNA, 2184 bp, Homo sapiens
ctatgcttgtccaatctctggtacaggctggataagctctccctggtgttttagaggaagagctagtaaataaccagcatttggtggagtaaggggatcctgtgttttggagcaattgctgagctttttctcataacaggaaatcaggatggcagtgtgctgtgggttttctgacaacaagacttggtagtttagcagtctgttgtcagtgatccattgcggtctttttatatccaataaggggcctattagttggaatgtcaggagcctgaccgactgtcccattgtgattttgagggcctccttgggtaaaagggctgctgcagccactacctttaggcagtgtggccacccttgcactactgggtctaggttctttaaaaagtaaccttgggcagtatggccattttcacgatattgattcttcctatccatgagcatggaatgttcttctatttgtttgtgtcctcttttatttcgttgagcagtggtttgtagttctccttgaagaggtccttcacaacccttgtaagttggattcctaggtattttattctcagctcctctttgtacctctggtagaattcggctgtgaatctgtctggtcctggactgttttttggttggtaaactattgattattgccacaatttcagagcctgttattggtcgattcagagattcaacttcttcctggtttagtcttgggagagtgtatgtgtcgaggaatgtatccatttcttctagattttctagtttatttgcatagaggtgtttgtagtattctctgatggtagtttgtatttctgtgggatcggtggtgatatcccctttatcattttttattgtgtctatttgattcttctctctttttttctttattagtcttgctagcggtctatcaattttgttgatcctttcaaaaaaccagctcctggattcattgattttttgaagggttttttgtgtctctatttccttcagttctgctctgattttagttatttcttgccttctgctagcttttgaatgtgtttgctcttgcttttctagttcttttaattgtgatgttagggtgtcaattttggatctttcctgctttctcttgtaggcatttagtgctataaatttccctctacacactgctttagctgtgtcccagagattctggtacattgtgtgtttgttctcattggcttcaaagaacatctttatttctgccttcatttcattatttacccagtagccattcaggaccacgttgttcagtttccatgtagttgtgcgattctggatgagtttcttaatcctcagttctagtttgattgcacttctgaggcctacttctgtcaactcagcaaagtcattctccatccagctttgttctgttggctggcgaggagctgcgatcctgggattcgtgtgaaagtccacctgagggtctgccaaagggggggggaccccaaccaagggaaagtcaaagccaaagatgatgaaacctgaacaacgaaaatgccacacttgggcagtatggcgattttcacgatattgattcttcctacccatgagcatggaatgttcttccatttgtttgtatcctcttatttcattgagcagtgatttgtagttctccttgaagaggtccttcacatcccttgtaagttggattcctaggtatttaattctcttgaattccctgtctgaaatgccatgtatcactgtcactctgggattggtcacaggtgccttatttagttcatttggggagactgttttcctagatgttcttgatgtttgtggatgtttgttgttgtttccttcagtgctcatttctactggccttcctccctcctggaccatccgatagtccctgaaggggactgtttcaagcccaagatttgaggcctgttccatcaggaccaaaacctcatccattatgctatttacagggtttattaaccacatactcctatgtattcttcgatcaacactaatattcagactatgcggttgttccagcatgagccacttcttcctgcttacttccatgaacgggcaggtagcaaaagtatgaaagccagtaggctcattttggtagcaaaagcagcaggagccaatggcccaaccccaggaagtccatgaattattctctacgtttaactccataacagcatccaccgtcat

SEQ ID NO: 119274 - DNA, 2480 bp, Homo sapiens
tcagctattgatacttgtgtatgcttcacgaagttctcgtgctgtgtttttcagttccatcaggtcacttttctttttctctaaactagctattctagttggcagttcctgtaaccttttatcaaggttcttagcttccttgcacaagcctgagcatcccaggtcgacttcagacagctgtgctggcagcaagaatttcaagccagtgggtcttagcttgctgggctccatggaagtgggatccactgagcaagaccacttggctcctggcttcagctccctttccaggagagtgaatggttctgtctctctggagttccaggtgccactgttgtttcctgactttttaatgatcgccattctaactggtgtgagatggtatctcattgtggttttgatttgcatttctctgatggccagtgatgatgagcatttttttcatgtgtctgttggctgcataaatgtcttcttttgagaagtgtctgttcatatcctttgcccactttctgatggggttgtttgtttttttcttgtaagtttctttgagttctttgtagattctggatattagccatttgtcagatgagtagattgcaaaaatgttctcccattctttaggttgcctgttcactctgatggtagtttcttttgctgtgcagaagctctttagtttaattagatcccatttgtcaattttggcttttgttgccattgcttttggtgttttagacatgaagtccttgcccatgcctatgtcctgaatggtattgcctaggttttcttctagggtttttatggttttaggtcttacgtttaagtctttaatccatcttgaattaatttttgtataaggtgtaaggaagggatccagtttcagctttctacatatgtctagccagctttcccagcaccatttattaaatagggaatgctttccccatttcttgtttttgtcaggtttgtcaaagatcagatggttgtagatgtgtggtattatttctgagggctctgttctgttccattggtttatatctctgtgttgataccagtaccatgctgttttggttagtgtagccttgtagtatagtttgaagtcaggtagcgtgatgcctccagctttgttcttttggcttaggattgacttggtgatgcgggctcttttttggttccatatgaactttaaagtagcttttttccaattcttgggcagtatggccattttcacgatattgattcttcctacccatgagcatggaatgttcttccatttgtttgtatcctcttttatttcgttgagcagtggtttgtagttctccttgaagaggtccttcacatcccttgtaagttggattcctaggtattttattctctttgaagcaattgtgagtgggagtgcactcatgatttggctctctgtttgtctgttgatggtgtataagaatgcttgtagattcttgtacattgattttgtatcctgagactttgctgaagttgcttatcagctgaaggagattttgggctgagacaatggggttttctagatatacaatcatgtcatctgcaaacagggacaatttgacttcctcttttcctaattgaataccctttatttccttctcctgcctaattgccctggctagaacttccaacactatgttgaataggagtggtgagagagggcatccctgtcttgtgccagttttcaaagggaatgcttccagtttttgcccattcagtatgatattggctgtgggtttgtcatagatagctcttattattttgagatacgtcccatcaatacctaatttattgagagtttttagcatgaagggctgttgaattttgtcaaaggccttttctgcatctattgagataatcatgtggtttttgtctttggttctgtttatatgctggattacattgattgatttgcatatattgaaccagccttgcatcccagggatgaagcccactcgatcatggtggataagctttttgatgcgctgctggattcggtttgccagtattttattgaggatttttgcatcaatgttcatcaaggatattggtctaaaattctcttttttggttgtgtctctgtccagctttggtatcaggatgatgctggcctcataaaacgagttagggaggatttcctctttttctattgattggaatagtttcagaaggaatggtaccagttccgccttgtacctctggtagaattcggctgtgaatccatctggtcctggactctttttgcttggtaagctattgattattgccacaatttcagatcctgttattggtctattcagagattcaaattcttcctggtttagtctgttttggttactgcagcctatactacaaggaagatctgatggtttcataagaggctcttcccccttcgctctgctcttcccttctttaagctgccatgcgaagaaggtctttgctttcccttcatcttctgccat

SEQ ID NO: 119275 - DNA, 508 bp, Homo sapiens
atgcagagcgcaatggctctagacaaggggtgggcgctggggctggggaccatgaagtgttgcagttattaccagacaagtggaaacagaagattctgtgtccagtccagctcctgcgtggggcctggagcaactactactcccctgatgctaataggcagccttaagtgcaaggaaatgctcacttgtttgcagaatgttggccccatggagaagactcacaaccaactgtgcctacttctcagggaagaatgctggcggggccagcacggcatcttcctcatccccatgtccccagcccatccggttcactgcgaggctcagactcggaggacacgcattgagggactgtggcaggatctggctgtctccactgtcttgctccaggccacctccaccctggctggcccccctccagggtactgcctatcccagataggtcagtgcaccagggacccggccgcaaagcaccgccgacccctcccagagtgacgcccttgttcactga

SEQ ID NO: 119276 - DNA, 1052 bp, Homo sapiens
ctgggtttggggacctccaggggactgctacccatcctgaaaaagttatcagaatggtttgaggaagaggagctggaagacctggcttccgccagcccctgctgggaaggcaagcggtcctctgagggttgtggccggttccagaggacactctgtggagaggatgagtggctcttcctccaagctgcctgagttggcgctcctgctgggaccagctccacggcctcataggtgaagctcccagtggctcctggggaactctccatgaccagggagaagtcgctgccaaggctggtggtgctgccacggtcctttcgtctcagcatgcagatgtcttccagggtgaagcctccatcccgggctggcaaactcttcctcccgaagaggaaccagtcataggccacagtgaggtagaggatctcagtgggcttcagggacgtgtggatgagcccatcctggctctgttcttgggccttcttggttccataagccaatgcatttccacttgtttgagcaagtgcacctcctacagaagtcctgattgctaccagggatttagagtccgtctgcccatcactgttaactaaggaaagcagcagcttcaggtagttttgtgtttgttgcaccagatcccaacactgatactggctccagtcaatgttcagagagtgagtcaggaagtcggggatgctcaatggggcatcaacgtagtctccagcatcattatcatcatcatcatcatcaccatcatcaacatcatcaccaccatcatcatcatctggatacgggatggagaggagagtgaagtcggcatagcgctgggctttgtccaccttctcagaggaggttacattcatgccaaacttcaccttcttgttctccaccatcaggtcacagatgtatttgactgacaggtatcgaagcagcttgatgtcatagcctctgaccttatcaaaaagatgcgtgtcaccacttcgaagagcacagtcctcctccgtgacgtcctccacatctgcccaggcatcatctgcacccccaaccttcttccccat

SEQ ID NO: 119277 - DNA, 2559 bp, Homo sapiens
ctagcctagatccatcgcggccgccgccgctgccgcccttctgccgcagcccggcgctttgccccgggcccgccgtggcgccaccgagtcgaaggtgacgttgagcgcgccgcgcactctcgggcggcgaagggcaggcaggtcgggcgggcagtggagcacgccgccgcctccttgccaggcatctagccagctggcgcccgtcgggcacgtgaccttcattccaccgcccagcgccccagcgcccccgccccccggccccaacagaagccctgccaagagctgcatccaggcgcagatcttgtagaccgtagccgtgttgcagaagaagaaaagcgaaaagcaggtgatgcagccgaggatcagcaccatggagagcagcacgaagaaggcggccgccttgaaggcgctggacgggatggtgctgaagtcggtgaaggagccccggcaggtgagctcgcggcccgccagcccgctgcccacgcagtagtggaagaggccgaagtagccaggcttgggggtgctcacgctgtcgcccacccagtagggctggatgaagaccaccacgttgatgatggcgaagcagatggtgaagatggcccacagcacgccgatggcccgcgagttccgcatgtagtgctcgtggtagagcttggaggcctcctgcgagggcagcatggtgcccggaggcggggccggcggcggcggcggctggcgggggccgccggcccgggacggagcgccgggctgccgggcgggagctggggacgcacgcgagaagcggccctgagtcaaggaacccgcgagggcggggcctggggcagagctgggggcgtctgggagctgctccacagtagggcccccgatgtaggggactcccttcttccagcctgagctaaggggctgtgaggccccacaaagcctgggtttggggacctccaggggactgctacccatcctgaaaaagttatcagaatggtttgaggaagaggagctggaagacctggcttccgccagcccctgctgggaaggcaagcggtcctctgagggttgtggccggttccagaggacactctgtggagaggatgagtggctcttcctccaagctgcctgagttggcgctcctgctgggaccagctccacggcctcataggtgaagctcccagtggctcctggggaactctccatgaccagggagaagtcgctgccaaggctggtggtgctgccacggtcctttcgtctcagcatgcagatgtcttccagggtgaagcctccatcccgggctggcaaactcttcctcctctgggtcttcagagcagagaactcctcggaggtaatatgcttcaaaaaattgaagcagaagaagaaaatctcctcccctttgctgagccgatctaccaacatgtgcccgaagaggaaccagtcataggccacagtgaggtagaggatctcagtgggcttcagggacgtgtggatgagcccatcctggctctgttcttgggccttcttggttccataagccaatgcatttccacttgtttgagcaagtgcaactcctacagaagtcctgattgctaccagggatttagagtccgtctgcccatcactgttaactaaggaaagcagcagcttcaggtagttttgtgtttgttgcaccagatcccaacactgatactggctccagtcaatgttcagagagtgagtcaggaagtcggggatgctcaatggggcatcaacgtagtctccagcatcattatcatcatcatcatcatcaccatcatcaacatcatcaccaccatcatcatcatctggatacgggatggagaggagagtgaagtcggcatagcgctgggctttgtccaccttctcagaggaggttacattcatgccaaacttcaccttcttgttctccaccatcaggtcacagatgtatttgactgacaggtatcgaagcagcttgatgtcatagcctctgaccttatcaaaaagatgcgtgtcaccacttcgaagagcacagtcctcctccgtgacgtcctccacatctgcccaggcatcatctgcaccccctgagaaaaaatagttgtagcctgagcgtccatacagctctccccatccagccagtgtggccgacctgcaaatgtgcttgcccttgaacaggattactgggcagacaaaccgtcctctgcaccgggccatcttgctgcggtggatgaggtcttgcaacttgctcacctgtacggtactctcaaacgtgtctttctccttctcagaactctcatactccaggaacacgatgtgccggggatagtggccacagatatccccattcgtgtttggaatcacgctgaaacagtagtctcggccaaacagctccagacatctcttctcaatgcgctcaaccttagagccgccggtcccgctgccatccttggcccggtactgagtccgggagaactcctccagcagctccccaagccccagctcctgaggcggctggttgcctgaagaggccgaggaccccgccgaggcagcggcggcggcggcccgagcgccggccat

SEQ ID NO: 119278 - DNA, 681 bp, Homo sapiens
tcagtgtgggtctgatactgccaagctcactccagcatcattatcatcatcatcatcatcaccatcatcaacatcatcaccaccatcatcatcatctgcatcagcgcaaacttgctcctcccctttgctgagccgatctaccaacatgtgcaccacatcagggtatacgtccgtttggaggctttcctcaaacgtctggcagccctggactgcctgtgtatgctgaagaacagggcacagaaaggctgagtctgcagggcactggctgtggctgccaggctgggctcctttgttgggggcctccagttgccagcacatctgtgggattttccctagagtcttcagtctctccagagcaggtgcctctgagccctggcccagcaggtacagacgctgaagcccaatagccggtcttccgggaggtggtctttggaaggtccataaatttaagtttaaagttggaatttgggtgtgcccccttgctggatatcctggttgggtggtggtgcttgggaaatggccatcccatatcagctgcatatcctcatcgtggatctggtggatgttcacccatttgactgtgaatcctaaagattcatctgcagtcacgggtgttgctttcacacagggccagccaagaaattcaagtttgcaggtcaggaatgttcgagggagcagcat

SEQ ID NO: 119279 - DNA, 1290 bp, Homo sapiens
aaaaggaatctctttgcgttgtttgacatggcctaccaaggctttgccagtggtgatggtgataaggatgcctgggctgtgcgccacttcatcgaacagggcattaatgtttgtctctgccaatcatatgccaagaacatgggcttatatgagtgttttggcgtcgtggtacctgaaagcggtatttggagtcggtgtagccagccggcgatctatagcctgtcggagacagcatggaaacatggggaggacgggagggaaggcagcaaacggaccgcgccctatgaggctcgcacgggactgacgctcatcttaatgcagcgtctgcagggggtgctcattcgccactccgagcgcagcgccgataggaagcagcatgggttgttccatagtcgagtatccgccagcggtatcaagcggtatctgaagcatgagggtttcgcccggcaacagcaaattttaggcaaagtcttgagaaagaagaaattgggtccagaaagggaagtgaggagaatcagatcccagacctttggggagaaggagcaaccgcatctggcacagcccatcagggagaaagagcaggttggttttttaactcttggggtaaaaccattcctcccacgcgggccttccaaagaatatcgtctgatgctacgcgaagataatgcggatctgcgtttgactgaaatcggtcgtgaactgggcctggtggatgacgaacgttgggcgcgctttaacgagaaacttgagaatatcgagcgtgagcgtcagcgtctgaaatcgacgtgggatgctgattggtgcatttacaatccggaagtctatatgcaggaagaaacccttgtggatgtgaccagcagtatgagtatgggctggaattttcctttatataaacaggttacaaccggcccggtcgcggcattacattacgatggcacaaccacctcgatgtataacgagtttggagacagtactaccacgctgaccgatccgttatggcatgccagcgtgagtaccttaggctggcgtgttgactcccggcttggcgatctccgaccctgggcgcaaatcagctataaccagcaatttggcgagaatatctggaaggcgcaatcaggcctgagccggatgacggcgacaaaccagaacggcaactggctggatgtcaccgtaggcgctgatatgttgctcaatcaaaatattgccgcctatgccgcgctaactcaggcagaaaataccactaataatagcgactatctgtatacgatgggggttagcgccagattttaa

SEQ ID NO: 119280 - DNA, 1316 bp, Homo sapiens
ggtccaccatggccctgctgcactccggccgcgtcctccccgggatcgccgccgccttccacccgggcctcgccgccgcggcctctgccagagccagctcctggtggacccatgtggaaatgggacctccagatcccattctgggagtcactgaagcctttaagagggacaccaatagcaaaaagatgaatctgggagttggtgcctaccgggatgataatggaaagccttacgttctgcctagcgtccgcaaggcagaggcccagattgccgcaaaaaatttggacaaggaatacctgcccattgggggactggctgaattttgcaaggcatctgcagaactagccctgggtgagaacagcgaagtcttgaagagtggccggtttgtcactgtgcagaccatttctggaactggagccttaaggatcggagccagttttctgcaaagattttttaagttcagccgagatgtctttctgcccaaaccaacctggggaaaccacacacccatcttcagggatgctggcatgcagctacaaggttatcggtattatgaccccaagacttgcggttttgacttcacaggcgctgtggaggatatttcaaaaataccagagcagagtgttcttcttctgcatgcctgcgcccacaatcccacgggagtggacccgcgtccggaacagtggaaggaaatagcaacagtggtgaagaaaaggaatctctttgcgttctttgacatggcctaccaaggctttgccagtggtgatggtgataaggatgcctgggctgtgcgccacttcatcgaacagggcattaatgtttgcctctgccaatcatatgccaagaacatgggcttatatggtgagcgtgtaggagccttcactatggtctgcaaagatgcggatgaagccaaaagggtagagtcacagttgaagatcttgatccgtcccatgtattccaaccctcccctcaatggggcccggattgctgctgccattctgaacaccccagatttgcgaaaacaatggctgcaagaagtgaaaggcatggctgaccgcattcattgggcatgcgggacttcaactggtctccaaccttcaaggaagggagggtttccacccaccaattgggcaacacattcaccgaccaaattgggcatgttctgttttcacaggggttaaaagctggaacaggtggagcggctgatcaaggagttctccatctacatgacaaaagatggccgcatctctgtggcaggggtcacctccagcaacgtgggctaccttgcccatgccattcaccaggtcaccaagtaa

SEQ ID NO: 119281 - DNA, 428 bp, Homo sapiens
  misc_feature (1)...(428): n = a,t,c or g
cgcaatagtcgngacgagggcttggggagctgctggaggagttctcccggactcagtaccgggccaaggatggcttcgggaccggcggctctaaggttgagcgcattgagaagagatgtctggagctgtttggccgagactactgtttcagcgtgattccaaacacgaatggggatatctgtggccactatccccggcacatcgtgttcctggagtatgagagttctgagaaggagaaagacacaagtggtgacacgcatctttttgataaggtcagaggctatgacatcaagctgcttcgatacctgtcagtcaaatacatctgtgacctgatggtggagaacaagaaggtgaagtttggcatgaatgtaacctcctctgagaaggtggacaaagcccagcgctatgccgacttcactctcctctcn

SEQ ID NO: 119282 - DNA, 2250 bp, Homo sapiens
atgactgcccgttggcagatagaggatgacagcagaaacagggcgagaactaccacgcagaacaaaccagacaaaacaacgatagcagcagaacaacaaagggaaaaagaaacaaaaacaaccaacgacagaaaaagaacacaaaaacaaacaacaaacaaaaaaaaaaacgagaaaacaaacaacaaagaaagaaacacgttttgtgaagttcactctggagagaaaaagaggccaacgtgtgaagaaaaatcaagacaaggagagaggagggaagacagagaaagcaaatcctatgagtactacatctccagttccagtctccaagcccctaatctctgcgaagggcaagaactcaggcacctcgacactcaggtccagcgctgtgaggacatcctgcagcagctgcaggccgtggtaccccagatagacatggaaggggatcgcaacatctggatcgtgaagccaggagccaagtcccgcggacgaggcatcatgtgcatggaccacctggaggagatgctgaagctggtgaacggcaaccccgtggtgatgaaggacggcaagtgggtggtgcagaagtatattgagcggaccctcctcatctttggcaccaagtttgacctcagacagtggttcctggtaactgactggaacccacttaccgtgtggttctaccgcgacaagctatatccgcttttccaagcagccattctccaactgaagaacctggacaagagtagcaaagagctcctgttacaacctgtgaccatcagcaggaatgagaaggaaaaggttctgattgagggctccatcaactctgtccgggtcagcattgctgtgaaacaggttgagcgcattgagaagagatgtctggagctgtttggccgagactactgtttcagcgtgattccaaacacgaatggggatatctgtggccactatccccggcacatcgtgttcctggagtatgagagttctgagaaggagaaagacacgtttgagagtaccgtacaggtgagcaagttgcaagacctcatccaccgcagcaagatggcccggtgcagaggacggtttgtctgcccagtaatccctgttcaagggcaaggtttcccggtcctctggcgaggatcctccaaggcgtctcacatgaaccggctcagaaacgccaaaatctacgtggagagagctgtcaagcagaagaagatctttacaatccaaggctgctacccggtgatccggtgtctcttgcgccggaggggctgggtggagaagaagatggtccatcgctcaggccccaccctgctgccaccccagaaggatctggatagctcagcgatgggtgacagtgacaccactgaggatgaggatgaagatgaggacgaggagttccagccatcacagctgttcgacttcgatgatttactgaaatttgatgacctagatggaacacatgctctgatgtcccgcatggtccagaatgagatcccctacttcatctggaccactcggcgggatgtgctcgactgtcgcttcctctccaaggatcagatgataaaccactacgcccgggctggctcctttaccacaaagactacaagaaatcaggctggctgtggtgtcagcgcgactgtagtacacgctactccgccggcccacgacagacacacggagagaaaccgagcggccacaccaacacagcgacgagcaggcgacccgggaggagagccgggacaaacgagcgacaaaagaaacaagaaagaagaaagagaagagaagacaaagacaaagacaacagaagaaacagggacagagaggagagagaaaaaccagagagagaacagggagaagaaagtagaaaagaaaaagagaaaaggagatgagagagaggaggagaagagagtgtatgctatatatagaacaagaggacgaaaggaccgtggcagcaccaccagccttggcagcgacttctccctggtcatggagagttccccaggagccactgggagcttcacctatgaggccgtggagctggtcccagcaggagcgccaactcaggcagcttggaggaagagccactcatcctctccacagagtgtcctctggaaccggccacaaccctcagaggaccgcttgccttcccagcaggggctggcggaagccaggtcttccagctcctcttcctcaaaccattctgataactttttcaggatgggtagcagtcccctggaggtccccaaacccaggtga

SEQ ID NO: 119283 - DNA, 675 bp, Homo sapiens
ggtgcaggcaggtgcgatgggccagcttgaggcacactgaggggacgcggggctgggcagtggcgtgcgctcgggccgccgccgccgctgcctcggcgggtcctcggcctcttcaggcaaccagccgcctcaggagctggggcttggggagctgctggaggagttctcccggactcagtaccgggccaaggatggcagcgggaccggcggctctaaggttgagcgcattgagaagagatgtctggagctgtttggccgagactactgtttcagcgtgattccaaacacgaatggggatatctgtggccactatccccggcacatcgtgttcctggagtatgagagcctctgagaaggagaaagacacgtttgagagtaccgtacaggtgagcaagttgcaagacctcatccaccgcagcaagatggcccggtgcagaggacggtttgtctgcccagtaatcctgttcaagggcaagcacatttgcaggtcggccacactggctggatggggagagctgtatggacgctcaggctacaactattttttctcagggggtgcagatgatgcctgggcagatgtggaggacgtcacggaggaggactgtgctcttcgaagtggtgacacgcatctttttgataaggtcagaggctatgacatcaagctgcttcgatacc

SEQ ID NO: 119284 - DNA, 552 bp, Homo sapiens
atggccggcgctcgggccgccgccgccgctgcctcggcggggtcctcggcctcttcaggcaaccagccgcctcaggagctggggcttggggagctgctggaggagttctcccggactcagtaccgggccaaggatggcagcgggaccggcggctctaaggttgagcgcattgagaagagatgtctggagctgtttggccgagactactgtttcagcgtgattccaaacacgaatggggatatctgtggccactatccccggcacatcgtgttcctggagtatgagagttctgagaaggagaaagacaccccacagtcagctttggctttcgctacaccagtaattgtcaaacttgaatgtgcaggaatcacctgccctgcagatggaagttcagctatagggaagaaacaggcctcagtgggggcagaagattctgctgctgcaggggccctggaggacggctgtctcttctccctccatacgttctccttgggcaatttcatctatgctcagattcatacaatgatgcctcaaatcgccatccacagctga

SEQ ID NO: 119285 - DNA, 580 bp, Homo sapiens
ggcacgagtgagggccaaggggagctggaagggtctctcttgttagcccaggaagcccagggaccagtgggtccccccgaaagcccctgtgcttgcagcagtgtccaccccagtgtctaacagtcctcccgggctgccagccctgactgtcgggcccccaagtggtcacctccccgtgtatgaaaaggccttcagccctgactgcttcctgacactccctccttggcctccctgtggtgccaatcccagcatgtgctgattctacagcaggcagaaatgctggtccccggtgccccggaggaatcttaccaagtgccatcatccttcacctcagcagccccaaagggctacatcctacagcacagctcccctgacaaagtgagggagggcacgtgtccctgtgacagccaggataaaacatccctcaaggctgggtgtggaggctcacacctgtaatctcagcattttgggaggccaagtgcggacatcacttgagaccaggagttccaaaccagccctggcaacattgtgagacccatctctataaaaacaaaaaacagtccaaaaaaaaaaaaaaaaa

SEQ ID NO: 119286 - DNA, 1117 bp, Homo sapiens
ctactcccgatcccggccaagggtgcagtgaggggggcattgtccatgagacccgtcccagtcctcaaccactttgtcaggggagctgtgctgtaggatgtagccctttggggctgctgaggtgaaggatgatggcacttggtaagattcctccggggcaccggggaccagcatttctgcctgctgtagaatcagcacatgtggtccctgggcttcctgggctaacaagagagacccttccagctccccttggccctcaccggccaccacagccccctcaaggacccctgagcacggctcctcctgcgcctctggtgtctccactgggaccccatgtccctggacttcctggtccccctcctggctgcccttctcctcttcctctgcgcccctgccctccaccatcctggctccgtccccaccgcccagtgcagccctggtgggggacttgaggttctgggtggcggccaagatgtcggcctggagctgccgggaggaatccagggcttcctcgggcctgctgtcgggggctctgtcggggacctcactgaaggcccgggggcccccggcccggtcactctggtccacgtacttcttcttggggaaggacgatgggtaataggccgaggccttctgcttctgccgggtgatgaccgcggcacagacgatgaacatcagcagaaaggccagggagcccaccacagcaatcagcatcacgtactggcggaagaagtccactatcccatccaggaagttggtggggggtgatgggccccccagggttatgggctggggccccatcgatgtggggctgagggccggggtccagggtggcgggaggctcggggaggaggccgacgagccctcggcctccccactacccgccacatcctccaggaacgtggccttcaggggcacagagcgggcgtcggtagcaggcacagaccccaggagcagcaacagaaggatgaggaggctgggggctgccgccgaaaccatggtgcccccaggaccagttccttggcgtacaggactgggtgctcccgccgaatggagcgagagtggggggcacctgggcatggaagagagagtccgtgctggtgcccggggcacgaaa

SEQ ID NO: 119287 - DNA, 692 bp, Homo sapiens
  misc_feature (1)...(692): n = a,t,c or g
ctgagagatcctctaccgcagtcgtttgaggaggcggaactgaagttttttcttaattatcatgtgacgggttctggatttaacggggggaaaagggcggaaaaggacaaggatccaaactggcgaatttgctgatcttcgcgtccctctccgctttccggccggcagcgctgccaggggtatatttccttttttccgatcctgcaacagcctctttaaactgtttaaatgaggaatgtccttgggcttcagagagttactactcacctgggctttttcacactactctttcttgatccatgttgggtgttggaaactgggatggaggaaaggcaccttgggaactggttcctcatattcattccagtctgggatatttggatactatccttcttgtcctgctggattgtgaaaatgggctggggcngtgtaagttctgggctttggacccttcgacatgggatcacacaatatttaaaaaaaaagcctgggtacctcattggcaatgttactttaaattaggccttctgcctcggaattctgtgcttaaactgggaacagtttagcaccatggaatctatcctatgtcttcaattcctttatggggccttgctgggctgggggttttaacagaactcgggatataatgtcctttttggtgagagactgacttctaagtacatcatctccct

SEQ ID NO: 119288 - DNA, 975 bp, Homo sapiens
atgacagcggagtattacaagcttaaacaagtggtgactccaattgcagcagctgtaccagatgtggtttcgttgcttgagcaaattaacatatctctgtgtacctggtatgcagtcattgacttgggaaatgcctgtttctacattcctgtccataaggcccaccagaagcaatttgccatcagccggcatggtcagcaatatacctttactgtcctacttcagggagagaccttgatctcttttcgcttccacaagatatcacactgggtccattacgttgatggcattatgctgattggatccagtgagcaagaagtagcaagcacactggacttattggtgagacatttgcatgccagaggatgggaaataaatctgactaaaattcagggacttgctacctcagtaaaatttctaggagtccagtggtatggggcctgtagagatattccttctaaggtgaaggataagttgctgcatttggcccctcctacaaccaagaaagaggcacaacatctagctgccagttttgagtggggtccagaacagaagggtctgcaacaggtccaggttgctgtgcaagctgctctgccacttgggctgtatgacccagcagatccaatggtgcttgaggtgtcagtggcagatagggatgctgtttggagcctctggcaggcccccataggcgaatcacagtggaggcctctaggatttcagaacaaggccctgccatctgcagataactactctccttttgagagacagctcttggcctgttactgggctttggtggaaactgaagccacccctgtcatcacccaacgggcccatgagcaaagtggccatggtggcagggatggaggttatgcatgggctcagcaacatggacttccactcaacaaggctgacctggctgtggccactgctaagtgtccaatttcccagcagcagagaccaatactgagctcttga

SEQ ID NO: 119289 - DNA, 246 bp, Homo sapiens
gtgtgttactctggcccatttatccagtgacccaaagaactgccagttttgagtggggtccagaacaggagaaggctctgcaacaggtccaggcagctgtgcaagctgctctgccacttgggccatatgacccaacagatccaatggtgcttgaagtccgtaaagtgggtcgtgcacagcagcattccatcatcaagtggaagtggtacatacacgatcgggctcaagcaggtcctgaaggcacaa

SEQ ID NO: 119290 - DNA, 841 bp, Homo sapiens
tgcgtccagtgggtccccggactcatcctgtggtcatttccccagtgccagaatgcataattagcatagacatacttcgaagctggcagaacccccacattggcaccctgactggtagggtgagggctgttatggtgagaaaggccaaatggaagccattagagctgtctctacctagaaaaatagtaaaccaaaaacaatattgtgtccctggagggattgtggagattagtgccaccaccaaggacttgaaagatgcaaaggtggtgattcccaccatatccctgttcaactatcctatttggcttgtgcagaagaatgatggatcttggagaatggcagtggattatcataagcttacccaaggggtgactccaattgcagctgctgtaccaaatgtgatttcattgcttgagcaaattaacacatcttctggtacctggtatgcagccatttacttggtaaatgtctttttctccattcctgtccataaggccctcaagaaacaatttgccttcagctggcaaggtcaaccatatacctttaccattctaccttgggggcatatcaactctccgactttgtgttataatctcatttggagagaacttgatcacttttcgcttccacaagatatcacactggttcattacattgatgacattatgctaattggatccagtgagcaagaagtagcaaacacactggacttattggagaaggctctgcaacaggtccaggctgctgtgcaagctgctctaccacttgggccatatgacccagcagatccagtggtgcttgaggtgtcagtggcagatagggatactgtttggagcctatg

SEQ ID NO: 119291 - DNA, 748 bp, Homo sapiens
agagaccttgatctcttttcgcttccacaagatatcacactgggtccattacgttgatggcattatgctgattggatccagtgagcaagaagtagcaagcacactggacttattggtgagacatttgcatgccagaggatgggaaataaatctgactaaaattcagggacttgctacctcagtaaaatttctaggagtccagtggtatggggcctgtagagatattccttctaaggtgaaggataagttgctgcatttggcccctcctacaaccaagaaagaggcacaacatctagctgccagttttgagtggggtccagaacagaagggtctgcaacaggtccaggttgctgtgcaagctgctctgccacttgggctgtatgacccagcagatccaatggtgcttgaggtgtcagtggcagatagggatgctgtttggagcctctggcaggcccccataggcgaatcacagtggaggcctctaggatttcagaacaaggccctgccatctgcagataactactctccttttgagagacagctcttggcctgttactgggctttggtggaaactgaagccacccctgtcatcacccaacgggcccatgagcaaagtggccatggtggcagggatggaggttatgcatgggctcagcaacatggacttccactcaacaaggctgacctggctgtggccactgctaagtgtccaatttcccagcagcagagaccaatactgagctcttga

SEQ ID NO: 119292 - DNA, 486 bp, Homo sapiens
atggaagcttctgcttttgtggaagcctcaggaaacttacaatcatggcagaagtggggtccagaacaggaaaaggctctgcaactagtccaggctgctgtgcaagctgctctgccacttgggtcatatgacccagcagatccaatggtgcttgaggtgtcagtggcagatagggatgctgtttgcagcctttggcaggctcccataggtgaatcacaccataaagtgggtcgtgcacagcagcattccatcatcaaatggaagtggtatatatgtgatcgggctcgagcaagtcctgaaggcacaagtaagttacatgaggaagtggcccaaatgcccatggtctccactcctgccaccctgccttctctccccaagcctgcactgatggccttatggagagttccctatgatcagttgacagaggaagagaagactagggactggttcacagatggttctgcaggatatgcaggcaccacctga

SEQ ID NO: 119293 - DNA, 1911 bp, Homo sapiens
atgctcctgtcataccctatcagtcaagaagttttagaagttttagatctgtgccaggaacccaggcccctgcaggcacttaagtttgtgagtccgctgcagaatgatggagtcaagagaggagctgaaaacacagacctctggctgatatctgaacaatcagactttaagattcaaaaagtatcgaccatgagaagtgaaagcatagcatctgcatcaaaagccttgatttgtcatggcacctacacactgaggatggggtgtatgtgtatgtatctgtctgtctcccccagttccctggaaaatcctaaaggcaattccaaggtggtggtggacagcggggacaacagtcacatatactctgagggaaaggaaccttcctctctgatcagaggagctctgatctcaagatgtaggagcaaacatctgctgcttttttcctctgtctttctgcctcttggcccgaaatgcaagcagtcacaggaagtacgtcctattctaatgtctcatctctgtggctggaaaagtaaaaaggggaaccccagggaaggaggaagtcatggagaaatcgacttacacaaatataaccaattgattcttggtaaagacctctggccttttaccagggtaactgtgcactggggaaagggaaatgatcagacatttcagggactacaggatactggctctgagctgatgctgattccaggggacccaaaacgtcactgtagtcctccagttaaagtagggtcttatggaggtcaggtaattaatggagttttagctcaggtgcgacttacagtggctgctgtatcagatgtggtttcactgcttgagcaaattaacatatctcctggtacctggtatgcagccatagacgtggcaaatgcctttttctccattcctgtccatatggcccatctgaagcaatttgccttcagctggcaaggccagcaatatacatttactgtcctgcctcagagaggatgggaaataaatccaactaaaattcagggaccttccacttcagtaaaatttctagggatccagtggtatggggcctgtcaagatattccttctaaggtgaaggaaaagttgctgcatttggctcctcctacaaccaagaaagaggcacaacgcctagtggacctatttggatttcggaggcaacacattcctcatgtgggtgtgttactctggcccatttatcaagtgacccgaaaggctgccagttttgagtggggtccagaacaggagaaggctctgcaacaggtccaggctgctgtgcaagctgctctgccacttgggccatatgacccagcagatccactagtgcttgaagtggatgctgtttggagccctcagcaggcccccataggtgaatcacagaggaggcctctaggattttggagcaaggctctgccgccttctgcaggtaactactctccttttgagagacagctctttgtctgttactgggctttgctggaaactgaacatttgactatgggtcatcaagtcaccatgcaacctgaactgcctatcatgaattgggtgccttctaaccaatctagctataaagtgggtcatgcacagcagcattctatcatcaaatggaagtggtatatacgtgattgcgctcgagcacatcctgaaggcacaatcaggattcacaggtccaggaatcaaggggtggaagtggaagtggtaccactcaccatcacccctagtgatccactagcaaaagctttgcttcctgttcccgcaacattatgttctgctggcacaggggtcttagtgccagagggaggaacgctgccaccaggagacacaacgatgattccattaaactggaagttgagattgccacctggacactttgggctcctcctacctttaagtcaagactaa

SEQ ID NO: 119294 - DNA, 2718 bp, Homo sapiens
atggacatagagacagaaacaatagacagtgggaactaccggaagtggcagggaggaagaggaacaagggctgaacaactaccagttgggtattattctcactacctaggtgctggcatcaatcataccccaaacctcagtgtcacacaatatacccatgacaaaaacctgcacacttttccaagtagaaaatcaaagaagacatcaaaatgtgacatcatcattaagcagaaacggcataaatctccaaaggagaaggctctgcaacaggtccaggctgctgtgcaagctgttctgccacttgggccatatgatccagcagatccaatggtgcttgaggtgccagtagcagatagggatgctgtttggagcctttgccaggcccccatagccacccctgtcattgcccaatgggcccatgaacaaagtggccatggtggcagggatggaggttacacatgggctcagcaacatggacttccatcctccaaggctaaactggctacggccactgctgagtgcccaatttgccagcagcagagagcaacactgagccctcgatgtggcaccattcctcggggtgatcagccagctacctggtggcagaaagggaagaggtttgtcctcactggaatagacacttactgtggatatgggtctgcctattctgcacgcaatgcttctgccaagactaccatccacggactcacggaatgccttttccactgtcttggtattccacacagcattgcctctgaccgaggcactcactttatggataaagaagctccaagtgcttcagttttgggactcgcactggctctccttgctcctcagcttgcagacagcctattgtgggaccttgtgatcatatctaacatgggaactgcagtcactgaacttcaaaatttaaatacaatgggaatgattggatcccaaagtggcagtggccaagttgcagcactcaactgtcaaaagcaaggtgggcgtagctaccataatagacagcagaggcaaagcagcaatcagaatagtctgactcaggagacctctggctttttacctgagcacatttgcattggaaagggaaatgatcagacatttcggggactactagacactggctctgagctgatgttgattccagtggatgcaaaatatcattgtggtcccccagttaaaatccaacttacaatgggtccagtgggtccccagtctcctcctgtggtcatttatccagtgccagaatgcataattggcatagacatacttagcagctggcagaacccaccccccgttggcttcctgactgggagagtgagggctattatgatgggaaaggccaaatggaggccattagaggtgtctctacctagaaagatagtaaatcaaaaacaatatcacatccatggagggaccgtggagattagtgtcaccttcaaggagttgaaagatgcaggagtagtgattcccaccatattcctgtttaactctcccatttggcctgtgcagaagacagatggaacttgtggatcttggagaatgacagtggattattgtaagcttaaccaagtggtgactccgacagtagctgccgtattagatgtggtttcattgcttgagcaaatttacacatctcctggtacctggtatgtagccaatgacttgacaaatgcctttttctccattactgttcataaggcccaccagaagcaatctgccttcagctggcaaggccagcaatatacctttaccgtcctacctcaggggatgagtttggtgcatttggcgcctcctacgaccaagaaagaggcacaatgcctagtgggcctgtttggattttggggcaacacatttctcatttggaagaaggctctgcaactggtccaggctgctatgcaagctgctctgccacttgggccatatgacccagcagatccaatggtgtttgaagtatcagtggcagattgggatgctgtttggagcctttggcagggtcccatagccacaaagtgggtcatgcacagcaccattccttcatcacatggaagtggtatacacgtgattggtctcgagcaggtcctgaaggcacaaggagttccctatgatcagttgacagaggaagagaagactagggcctggttcacagatggttctgcacgatatgcaggcaccatccgaaggtggacagctgcagcactacagcccctttctaggacatccctgaaggagagcggtgaagggaaatcttcccagtgggcagaagttcgagcagtgcaccttgttgtgcattttacatggaaggagaaatggccagatctgatggtttggctggatgatcaaggacttggaagaagcatgattggaaaattggtgacaaataaatttggggaagagatgtgtggatggacctctctgagtgagtggccaaaaactgtgaaaatattggtatcccgtgtgagtgctcaccaacgggtgacctcagcagaggagaattttaataatcaggtggatgagataagccattctgtggacaccactcagcctctttccccagccacccctgtcattgcccaatgggcccatgaacaaagtggccatggtggcagagatagaggttacgaatgggctcagcaacatgtacttccactcaccaaggctgacctggctacagccactgctgatgcccaatttgccagcagcagagaccaacaatga

SEQ ID NO: 119295 - DNA, 693 bp, Homo sapiens
tcagcaacggaaaacaggtttgctctcgggtcctgatgctgactgatgagcactggattcctggagcactggcttcagaatgatgttgaggccaagtcctagctcagcagaaaggacggctgtgattagcgatgtggccgattgggcctgtctgccatgtagcttgccttctatattcctgtccaatgatggttcttcggcgccaggtgattttccatcactctgtgccataggaggctgttccccgactggggcctttatgcatacggctgtgcagccccagtgggctctggatgccagctggccagggctggctgccagcacaagcactggggctccaggctccgcattcatgcctgtggtgaccacctcacagggcgatggccaccccagctgcttctccctggccctccgcaagcccttgcctcctgctgcaccctctccctccagcatcccctgggccttgctcttaacagcagcagaagcctgggtgtcctgggggttgggacagagagaaataacttgacttcttccttgtgtttcttcagcaatttctgccaagaccctcatcttcagaaatctagatgctgccaggcttcccagcagcggcttatggaccagtggcagcagcggcggtggcggcagcaagaggatcaggtaggaaggtgtatgggacaggcgactcccaggcat

SEQ ID NO: 119296 - DNA, 456 bp, Homo sapiens
atggggagaaaccagagcagaaaagctgaaaattctaaacacgaaagcacctattctcctccaaaggatcacagctcctcacaagcaatggaacaaagctggacagagaatggctttgagaagctaggcttcagaaggaaagaagccctgtattacttagatttgactgcttcatgccagtctcaggagcttttccagaaatgggtctcactatgttgcccagattagtcttgaacttctggcctcaaaggatcctcccctctcagcctcccaagtagctggggactacaggcttcagcaactgcaactgtcagttccgactttccctgcctcagccttgttccctcttacctcacaaaggaaaaggacgggttgccagcaactctataaaaaactcagcgtgatcaaaacttcactaaagccaggtgcattcaagaacacaggactccctatttc

SEQ ID NO: 119297 - DNA, 1515 bp, Homo sapiens
ccatggatatccgcgcctgttccggtggacgtggtggagggtgcaatggactctgtgacggttcttagctttggtggtttaatgctctatttttgtgctggttggcctcctgccaggaggtggtgctttccagaaagcatcagctgtggtagtatggagagggaccagtggtgggggctccaagtagcgaagcgagcaggactggccggcggccaaagcggtcggacagtgctccgagaacgggtgcgcatagaaattgcatcaacgcatatagcgctagcagcacgccatagtgactggcgatgctgtcggaatggacgatatcccgcaagaggcccggcagctttgcagaactttcagcggtataccggcatacagcatgtgcatcgcataggaatggcggaacgtatgtggtgtgaccggaacagagaacgtcacaccgtcagcagcagcggcggcaaccgcctccccaatccaggtcctgaccgttcttgtgacaatctaaaaacttgtcacacttcacatggatctgtcatggcggaaacagcggttatcaatcacaagaaacgtaaaaatagcccgcgaatcgtccagtcaaacgacctcactgaggcggcatatagtctctcccgggatcaaaaacgtatgctgtatctgttcgttgaccagatcagaaaatctgatggcaccctacaggaacatgacggtatctgcgagatccatgttgctaaatatgctgaaatattcggattgacctctgcggaagccagtaaggatatacggcaggcattgaagagtttcgcggggaaggaagtggttttttatcgccctgaagaggatgccggcgatgaaaaaggctatgaatcttttccttggtttatcaaacgtgcgcacagtccatccagagggctttacagtgtacatatcaacccatatctcattcccttctttatcgggttacagaaccggtttacgcagtttcggcttagtgaaacaaaagaaatcaccgatccgtatgccatgcgtttatacaaataccctgtgtcagtatcgggctttcgtaaatggggggggagaagaaaaggctcgcggaaagcccatactttgccggtatggggtcgggatgtgaagttaactctgaaagtgctccggggtgatagtgttgagaagacttttcgggtagggtcaggtaatgaacgtgcccagaagctgcttactgaggacgcactggatgatctcatcccttcttttctactgactggtcaacagacaccggcgttcggtcgaagagtatctggtgtcatagaaattgccgatgggagtcgccgtcgtaaagctgctgcacttaccgaaagtgattatcgtgttctggttggcgagctggatgatgagcagatggctgcattatccagattgggtaacgattatcgcccaacaagtgcttatgaacgtggtcagcgttatgcaagccgattgcagaatgaatttgctggaaatactctctgcgctggctga

SEQ ID NO: 119298 - DNA, 1785 bp, Homo sapiens
atggtggattcgttaattgcgcgcgtaggagtaatggctcgcggtaatgccattactttgcctgtatgtggtcgggatgtgaagtttactcttgaagtgctccggggtgatagtgttgagaagacctctcgggtatggtcaggtaatgaacgtgaccaggagctgcttactgaggacgcactggatgatctcatcccttcttttctactgactggtcaacagacaccggcgttcggtcgaagagtatctggtgtcatagaaattgccgatgggagtcgccgtcgtaaagctgctgcacttaccgaaagtgattatcgtgttctggttggcgagctgcatgatgagcagatggctgcattatacagattgggtaacgattatcgcccaacaagtgcttatgaacgtggtcagcgttatgcaagccgattgcagaatgaatttgctggaaatatttctgcgctggctgatgcggaaaatatttcacatcttcatattcatgcagaagacactttcttgcctttctatcttgggaaaaaggacgatgtcacttatgcaataaagcccacttgttggccggggcttgacattattccttcttgtctggctctgcacggtattgaaattgagttaatgggcaaatttgatgaaggtaaactgcccaccgatccacacctgatgctcggactggccattgaaactgttgctcatgactatgatgtcatagttattgacagcgcgcctaacctgggtatcggcacgattaatgtcgtatgtgctgctgatgtgctgattgttcccacgcctgctgagttgtttgactacacctccgcactgcagtttttcgatatgcttcgtgatctgctcaagaacgttgatattaaagggttcgagcctgatgtacgtattttgcttaccaaatacagcaatagtaatggctctcagtccccgtggatggaggagcaaattcgggatgcctggggaagcatggttctaaaaaatgtggtacgtgaaacggatgaagttggtaaagcggttatcaatcacaagaaaggtaaaaatagcccgcgaatggtccagtcaaacgacctcactaaggcggcatatagtctctcccgggatcaaaaacgtatgctgtatctgttcgttgaccagatcagaaaatctgatggcaccctacaggaacatgacggtatctgcgagatccatgttgctaaatatgctgaaatattcggattgacctctgcggaagccagtaaggatatacggcaggcattgaagagtctcgcggggaaggaagtggttttttatagacctgaagaggatgccggcgatgaaaaaggctatgaatcttttccttggtttatcaaacaatccgaagaactcagtcaggaaatttctacactgacacgctggggatggcagagtttcgacgaggtgggctccgggcaaccgcagggccaagactctctaggaccagggactgccaagggacagaaaaggtccatggaaaaactgtcttcgacaaaactgttccctggtgccaaaaaggctgaagtcgcccagctgcaagaacaggtggccctgaaagatgcagaaattgagcgtctgcacagccagctctcccggacaacagctctccacagtgagagtcacacagagagagatttgctttcctgtggtgaggagagaggtgcttctgctaattggaacccttactcagaccagaaaagggcagatctctgtgagggcctgaccaactgcagaaatgatatggatcttgcctga

SEQ ID NO: 119299 - DNA, 1980 bp, Homo sapiens
  misc_feature (1)...(1980): n = a,t,c or g
atgaaggctatcagagatgccgagaaagcaggccgccccccgcacccggatatggaaattcgaggacgggttgagcaacgtgttggttatacaattgaacaaattaatcatatgcgtgatgtgtttggtacgcgattgcgacgtgctgaagacgtatttccaccggtgatcggggttgctgcccataaaggtaatgaacgtgaccaggagctgcttactgaggacgcactggatgatctcatcctttcttttctactgactggtcaacagacaccggcgttcggtcgaagagtatctggtgtcatagaaattgccgatgggagtcgccgtcgtanagctgctgcacttaccgaaagtgattatcgtgttctggttggcgagctggatgatgagcagatggctgcattatccagattgggtaacgattatcgcccaacaagtgcttatgaacgtggtcagcgttatgcaagccgattgcagaatgaatttgctggaaatatttctgcgctggctgatgcggaaaatatttcacgtaagattattacccgctgtatcaacaccgccaaattgcctaaatcagttgttgctcttttttctcaccccggtgaactatctgcccggtcaggtgatgcacttcaaaaagcctttacagataaagaggaattacttaagcagcaggcatctaaccttcatgagcagaaaaaagctggggtgatatttgaagctgaagaagttatcactcttttaacttctgtgcttaaaactgtgcaatctaaaaacttgtcacacttcacatggatctgtcatgcggaaacagcggttatcaatcacaagaaacgtaagaatagcccgcgaatcgtccagtcaaacgacctcactgaggcggcatatagtctctcccgggatcaaaaacgtatgctgtatctgttcgttgaccagatcagaaaatctgatggcaccctacaggaacatgacggtatctgcgagatccatgttgctaaatatgctgaaatattcggattgacctctgcggaagccagtaaggatatacggcaggcattgaagagtttcgcggggaaggaagtggttttttatcgccctgaagaggatgccggcgatgaaaaaggctatgaatcttttccttggtttatcaaacattgggtaacgatatcgccccaaacaagtgcttatgaacgtggtcagcgttatgcaagccgatgcaagaatgaatttgctggaaatatttctgcgctggctgatgcggaaaatatttcacgtaagattattacccgctgtatcaacaccgccaaattgcctaaatcagttgttgctcttttttctcaccccggtgaactatctgcccggtcaggtgatgcacttcaaaaagcctttacagataaagaggaattacttaagcagcaggcatctaaccttcatgagcagaaaaaagctggggtgatatttgaagctgaagaagttatcactcttttaacttctgtgcttaaaacgtcatctgcatcaagaactagtttaagctcacgacatcagtttgctcctggagcgacagtattgtataagggcgataaaatggtgcttaacctggacaggtctcgtgttccaactgagtgtaagagaaaattgaggccattcttaaggaacttgaaaagccaggggggtcctttagagtccacaggcatcccgaatttgctcctccatccacggggactgagagccattactattgctgtatttggtaagcaaaatacgtacatcaggctcgaaccctttaagatcaacgttcttgagcagatcacgaagcatatcgaaaaactgcagtgcggaggtgtagtcaaacaactcagcaggcgtgggaacaatcagcacatcagcagcacatacgacattaatcgtgccgatacccaggttaggcgcgctgtcaataactatgacatcatagtcatgagcaacggagtcttttag

SEQ ID NO: 119300 - DNA, 1932 bp, Homo sapiens
  misc_feature (1)...(1932): n = a,t,c or g
atggtggattcgttaattgcgcgcgtaggagtaatggctcgcggtaatgccattactttgcctgtatgtggtcgggatgtgaagtttactcttgaagtgctccggggtgatagtgttgagaagacctctcgggtatggtcagnagtatctggtgtcatagaaattgccgatgggagtcgccgtcgtaaagctgctgcacttaccgaaagtgattatcgtgttctggttggcgagctggatgatgagcagatggctgcattatccagattgggtaacgattatcgcccaacaagtgcttatgaacgtggtcagcgttatgcaagccgattgcagaatgaatttgctggaaatatttctgcgctggctgatgcggagtgtgacaatctaaaaacttgtcacacttcacatggatctgtcatggcggaaacagcggttatcaatcacaagaaacgtaaaaatagcccgcgaatcgtccagtcaaacgacctcactgaggcggcatatagtctctcccgggatcaaaaacgtatgctgtatctgttcgttgaccagatcagaaaatctgatggcaccctacaggaacatgacggtatctgcgagatccatgttgctaaatatgctgaaatattcggattgacctctgcggaagccagtaaggatatacggcaggcattgaagagtttcgcggggaaggaagtggttttttatcgccctgaagaggatgccggcgatgaaaaaggctatgaatcttttccttggtttatcaaactccatccagagggctttacagtgtacatatcaacccatatctcattcccttctttatcgggtttacagaaccggtttacgcagtttcggcttagtgaaacaaaagaaatcaccaatccgtatgccatgcgtttatacgaatccctgtgtcagtatcgtaagccggatggctcaggcatcgtctctctgaaaatcgactggatcatagagcgttaccagctgcctcaaagttaccagcgtatgcctgacttccgccgccgcttcctgcagggattttgccgatttcggaaccaccatcaaacaggattttcgcctgctggggcaaaccagcgtggaccgcttgctgcaactctctcagggccaggcggtgaagggcaatcagctgttgcccgtctcactggtgaaaagaaaaaccaccctggcgcccaatacgcaaaccgcctctccccgcgcgttggccgattcattaatgcagctggcacgacaggtttcccgacttggaaagcgggcagtgagcgcaacgcaattaatgacgatgtcacttatgcaataaagcccacttgctggccggggcttgacattattccttcctgtctggctctgcaccgtattgaaactgagttaatgggcaaatttgatgaaggtaaactgcccaccgatccacacctgatgctccgactggccattgaaactgttgctcatgactatgatgtcatagttattgacagcgcgcctaacctgggtatcggcacgattaatgtcgtatgtgctgctgatgtgctgattgttcccacgcctgctgagttgtttgactacacctccgcactgcagtttttcgatatgcttcgtgatctgctcaagaacgttgatcttaaaggcaatagtaatggctctcagtccccgtggatggaggagcaaattcgggatgcctggggaagcatggttctaaaaaatgttgtacgtgaaacggatgaagttggtaaaggtcagatccggatgagaactgtttttgaacaggccattgatcaacgctcttcaactggtgcctggagaaatgctctttctatttgggaacctgaatgcaatgaaatttcgatcggagtttctctagaccaagatggaggtagcaacagtgtgcttcgtaaacttgtagaacgggagtaa

SEQ ID NO: 119301 - DNA, 1386 bp, Homo sapiens
  misc_feature (1)...(1386): n = a,t,c or g
atgtcgtacagcagcaagtctgctttgcacttgaaaatccttcaggcaggacaggaggttcttaagtgtgacaatctaaaaacttgtcacacttcacatggatctgtcatggcggaaacagcggttatcaatcacaagaaacgtaaaaatagcccgcgaatcgtccagtcaaacgacctcactgaggcggcatatagtctctcccgggatcaaaaacgtatgctgtatctgttcgttgaccagatcagaaaatctgatggcaccctacaggaacatgacggtatctgcgagatccatgttgctaaatatgctgaaatattcggattgacctctgcggaagccagtaaggatatacggcaggcattgaagagtttcgcggngaaggaaagtgttttttatcgccctgaagaggatgccggcgatgaaaaaagctatgaatcttttccttggtttatcaaacgtgcgcacagtccatccagagggctttacagtgtacatatcaacccatatctcattcccttctttatcgggttacaagacccggttacgcagtttcggcttagtgaaacaaaagaaatcaccaatcctgttggaagttctggccagggaaatcaggcaggagaagaaataaagggcattcaatttggaaaagaggaagtcaaattgtccctgtttgcagatgacatgattgtatatctagaaaaccccattgtctcagcccaaaatctccttaagctgataagcaacttcagcaaagtctcaggatacaaaatcaatgtgcaaaaatcacaagcattcttatacaccaataacagacaaacagagagccaaatcatgagtgaactcccattcacaattgcttcaaagagaataaaatacctaggaatccaacttacaagggatgtgaaggacctcttcaaggagaactacaaaccactgctcaatgagataaaagaggatacaaacaaatggaagaacattccatgctcatgggtaggaagaatcaatattgtgaaaatggccatactgcccaagctcagtcgcatgcatggaagaccacaccaaccacctaacgctgccagtaccctcccgttccccaaacgccgttcacactatggtcagaaatccgaacgtttatctcgaagcggtgacaatagaaaatctcatcccgagtgtcgtcattggcagagctgtgcaaaaaaatcacgatgcctcgccttcacacgaacagtccgacacacaccgcgaagtgcctatcttcttacacgaaccatcgagctcctagaaagcagcgcactttggcatgttcaaacacaacggatatacgcgcccttatacgaaacacttgacccaggcaaccgcactcactgcgaatgggacacctaa

SEQ ID NO: 119302 - DNA, 1734 bp, Homo sapiens
atggagtggggcaagttcaaaagactagtcttaccaagtcaaggcaagtcaaaaccagaacaaaggtgccaatacaggcacaccgtgggtgatcaggccacgcttccactcagatccagagtagagaaacgaaatggagaggcagagggaagaatctaccgaaaactatgggatgttgccctgctctgttgtgtccaggaggtcattaatggggaaaggaaacctctgagagcactgactgaagtgaaatcgggatttaggctcagggaggacagcgataagttcgacgccaacgatccgatcctgaaagatcagacgcaagaatggtccggttctgcaacctttacatctgacggaaaaatccgtttattctacactgactattccggtaaacattacggcaaacaaagcctgacaacagcgcagaacgttcagcagtttatcgatgaaggcaattatacatccggcgacaaccatacgctgagagaccctcactacgttgaagacaaaggccataaataccttgtattcgaagccaacacgggaacagaaaacggataccaaggcgaagaatctttatttaacaaagcgtactacggcggcggcacgaacttcttccgtaaagaaagccagaagcttcagcagagcgctaaaaaacgcgatgctgagttagcgaacggcgccctcggtatcatagagttaaataatgattacacattgaaaaaagtaatgaagccgctgatcacttcaaacacgtgtgacaatctaaaaacttgtcacacttcacatggatctgtcatggcggaaacagcggttatcaatcacaagaaacgtaaaaatagcccgcgaatcgtccagtcaaacgacctcactgaggcggcatatagtctctcccgggatcaaaaacgtatgctgtatctgttcgttgaccagatcagaaaatctgatggcaccctacaggaacatgacggtatctgcgagatccatgttgctaaatatgctgaaatattcggattgacctctgcggaagccagtaaggatatacggcaggcattgaagagtttcgcggggaaggaagtggttttttatcgccctgaagaggatgccggcgatgaaaaaggctatgaatcttttccttggtttatcaaacgtgcgcacagtccatccagagggctttacagtgtacatatcaacccatatctcattcccttctttatcgggttacagaaccggtttacgcagtttcggcttagtgaaacaaaagaaatcaccaatccgtatgccatgcgtttatacgaatccctgtgtcagtatcaaggaggaggagaagaagaggaagaagaagaagaagaaggaggaggaggagaaagaggaggagaaggaggaggagaaaaaaatcaggcaccgtgtatgaaatctaacaatgcgctcatcgtcatcctcggcaccgtcaccctggatgctgtaggcataggcttggttatgccggtactgccgggcctcttgcgggatatcgtccattccgacagcatcgccagtcactatggcgtgctgctagcgctatatgcgttgatgcaatttctatgcgcacccgttctcggagcactgtcccaccgctttggccgccgcccagacctgctcgcttcgctacttggagccactatcgactactcgatcatggcgaccacacccgtcctgtggatctacccactaatcaattcaccatcttgttga
